United States Patent Application Publication US 2006/0134663 A1 - sequence listing, part 132

SEQ ID NO: 440931 - DNA, 863 bp, Homo Sapiens
  misc_feature (39)..(39): n is a, c, g, or t
ctcccctaacccctggcacttcacccctccttcaattangaaaagcattgttccagtgtgagtgatcactaaataaaattttacctatcccagtgccatcttttccccacagtgtctaggacagtcctgtctgttctgtgacaacaggatgctgtatatttgaaatatgtctttttattttcatgactgaatttctacttcatcacctattttaaggggcagagggaaaaaaagtcaaatgagacattgtcggcatggagattaaacattgtaggaaaaaagtataccatttttgttagaactttctgatggctttactaagatgtcaggttttgtttgaggactgaatttgacatatatgcaagatatttatttactgctgctgccttgggtctccaggttctacctaggaggtatttgctgttccattgcagcatagggaaactgttcaagcacacaatgtgaatgttgagatcatgtgcagagaggccagtaccaaaacttcagtatctggcccaatggcaagaggctactgttaggtttgcatttgggcagttagaacctcacagataccagctcccaagttgctagtccatcagtgtaaactgaacacaattctctcttgctttctctctctctactccctcacacatttggaccttgtcacttggtgtttaagcaccttgcctatcaacaaaatctggatgaggcagccccatgggacttctcctgttaataagggaacttggctctactattttattcttttaatgttttagtattttgatattgggattcaaatgaaaggggatctcattctgtgggctggaaaatcaggacttcatatgttgaggagagcaaac

SEQ ID NO: 440932 - DNA, 886 bp, Homo Sapiens
  misc_feature (876)..(876): n is a, c, g, or t
ctgtactttttcctggttatactgttactcagctatgaactcttgacacagaaatggggagaggttaccagcccgcggtgaatgttcctggtaaaatctgccctcgggaaaggctttggatttgggtaaggagtttgggcctgggctaacacagggatttgcaatgtctgtgtggattatttttcccgagtcccaaagattcactcagctgcaacacactcagtcgtcttaaaaagaggattcagttaattgaacacgttcatttttctcatcttaacaagttggtcatttttgtcgtcttaacaagttggaatgagttcatccaaaacagttgtcctgctgtgtgtacatcacaaatctgttttcttttgcttctctttaaaaatgtctcctgagtgatttcatcagcagtgctgttgctaagcctatatttagcaactgaaaatcatgctcagaaatactgtcatgcttttttaaaaaggcatatccatccctccacacatggctgattccagaaccttcatgcccttagcaaaaaaattgagctgtccttcagggtttcaaaaaaagtactgtactcctgctgcaccccaggctcttggcaaggaggggaccttttgtccctagagaatgttctttcttatgtattattgcaaaacaattttgttcttgcatactgaagcatcactggatgaatttctttcccctgtagacaaaccgagggtgagtattgctctttaaatgtcagtaaatttgttttagcttctggggcaaaccttgttgtactcattctgttcctcccagcataatatgttaggttgtcataaaatagggcaaattgaggatagtgtaactactgctgctggaaaaatgggnaaacagttaa

SEQ ID NO: 440933 - DNA, 3232 bp, Homo Sapiens
  misc_feature (408)..(505): n is a, c, g, or t
tgacacttttagggggagagccctattttagaagggaacatctggatctaagggggaaaacctttagcctttaagagggtatttctttgaattaaaaaggagttccacatgtgtggaccagtggtttaaaaaatcagttgttttacataaagtttaaaggggatttttcgaaaaaaatataagcgttcaagtaggccattgccactacggagtgtccacgcttaggtagggccaatcgtaagggcccctttgcgaatttgccaagtggggaaaggggaatttttcccaaggcgtatgagtttgggccccccaggggtttccccagcctccaagtttgtaaaagacggccagggatttttaattagaccccctttaaggcttatgggggctcgaggcccccctaagagnnnnnnnnnnnnnnnnnnnnnnnnnnnnnnnnnnnnnnnnnnnnnnnnnnnnnnnnnnnnnnnnnnnnnnnnnnnnnnnnnnnnnnnnnnnnnnnnnnccccagagggcttctccttttttaatcaatgaccaacttatccagctttggaaatctggacaaagagaaggctgagaggaggcctggtccagtgtctaagggtctctgagtgagtctgtgtcagcatgtgggccccagctgggcctgtccatgggttgggcacagcagtttcctgagtaagagccagccccaccctcagggcagcattccagcccaaaaagaaatccaggccctccaggttcggcctgttttcaaggccctcaggacagtcaataaataggttagattctgagccaggcctggaaagtgagggtattcaaagggcaggatgagctgctagggatcgtaatgattcccaggtactctcctgcccttctccaacaaggaagtaaataaatagacttttaactcaggaacggggtgttggagcaggggaaccctccccttggagttagtaattaagtctcatgttaaaaacaaggtagccccagcccctaccagcatctacaaaatcctacaggatggagggaagggctagccagcctgggggtacacagtacccagccccgcagtcctggaggaggtctcatgtctgttctggggctcctggggctccctcctcctttgggggtggctccaggaaaattggggtgactgagggtggcttcttcactgagtagggggaagccgggacccccaccaccaggaagtggttcttcttccgaaacaatctccacaggccccgatggttgccacgcacatccaggtcccagatatggaggcacttggcaagctgggtccaggtggtgaagtcatcatctttctccattcgaataaaggccacgtaggtgtggccctctgtgtctggcaggaaagagtcttcacaagggttcttgctgtggtccagaacctcagcctcactgagcagcctgtgaacttccacttcataagcttctttcttcagactgtccacattcctgagctggacacctggaaccgtgttgaacttgtgcttcttgaagtaggcctcgtgaaagtagccattcatgttgaggccgacgatgccaaagtggtaggatcgggaaacgtcagggatgatgcactctcggccccggcgttgttcaggcatccgcatccacatgtcccaatcccagagcttttccggtgtaggccacttgggctcaagctcctccttgtacaaggacctcctgagcacccagcccagcccaggcatggtctccacacggtacagtagtgctgggtcctcagccgtgtgttcatacccctggtcattccaggcagagatgcagtacaggctgtcatcctcctccagtaggtggatggattggctcaggaaactgaaaaaatccacagcaatgtccaggtcctcttccagaaccacagcaaacttggcctccggaaacaggttgaaagtggcagtgaggctggccttgtagtgctgagacacgcgggcattcttgatgctgatgggagtatgctggatgcccctcagaccaaacagtgccaccacatccatgggttcctcatagtagccgtcaatgaaaactgttatcatctgaggagacaccccctgggctgaaagcagagagcgcagcatcctgtacaggtaattgggtcggttccctgcaatgacagccacaggcacattgaggaccttgttgtctgggagtgggtcagggctgaactcgatgggtgtggggtccttgcagctgcatacacttccatagccctcaactttgctgcagaagcgccggcggcgacggttcagctctgtgtctgcccagtggcactctgcctcttctgctgagctcaatggcacatctgtcttcagcaggactgggtccccccaggaagagagggcaggtgacttagaatgtttctccccgaagacaggacctccttttcgtcccacgaaggcccatgtgtccctccagcccagggcagggccagcctggctgcccaggctcctcagcagagccttggctgtgtccttgaggtggaaggagccctcatccttgacagtgcagatgagcactcggccgggcgctaccatgttgaggaatagcaccatggcctcatcctcatgaggtgagtacgtgtcaaacacacgttttgccatcacgtggcccgtggcctggttgaggacaatgacatggatgccccggccctgctcccgggcctcatcctccagcaccgtggtgccatccactgccacatatactttgctgcgacttgaatacacctctacgtccaggacccgccggggaccactgcctctgcgccgtgggggctccaggcggcctagggcctcatcatagtcttgctctggctctgggtcttcattggcttcactgatggctcgccgagtgtccaggatcaacttgatattgacaatgacagtcaccagcaggaaaagcacggcccctgtctgacagaatctccgcagggcccgctggtttgtcagtttatacttccaggtaaggataacagctccgcttcttccgagccccaaagggcttgatgagggggctgggcttccagtcgtccataccggattggcgggtcaccaatgtcctggccagcccatgacttcaggaatggcttaggggccccgggccccgcttcgggccccgctagggccctcactgctcggcccggctcgccgcggcctccgcctcctccatgccgcttgcggcccatcccggg

SEQ ID NO: 440934 - DNA, 999 bp, Homo Sapiens
ctccgctttagcagcggcgaagggaggacccccgggagccggtccccggcgtccggtcgcccagcccttttcaggcttgggcccgcatggaggggaccgtggagtcccagacgcctgacctgcgggatgtggagggtaaggtgggcaggaagacccctgaagggctgctccgcgggctgcgaggcgagtgtgagctgggaacctctggcgccctgctgctcccaggggcgtctagcaccggccacgacttgggggacaagatcatggcgctgaagatggagctggcttacctgcgagccatcgatgtgaagatcctgcagcagctggtgaccttgaatgagggcatcgaggcagtgcgctggctgttggaggagcgggggacgttgaccagtcattgcagcagcctcaccagcagtcaatatagcctgacaggcgggagcccaggccgctcaaggcgaggcagctgggacagcctgccagacaccagcaccaccgaccggctggacagtgtctctattggcagcttcctggacacagtggcccccagcgagctggatgaacagggcccacctggggctccacgttccgagatggactggggcaaaagttatagctggtggagagagggccaggactgaggtggctgtggcagccaccaggctagggagcttgagagctgtgtggaagcccccaggggagaggcttcaaggtggaccacctgagtcaccagaggatgagagtgccaagctgggcttcgaggcccactggttctgggagcagtgccaggatgatgtgaccttcttgtaacaactattccacccttttgtaatcctgtggctcttttatccattagatgtggtctcccccaaaattgattctccctcagtctgagactaggaagaggctgcactgcaatcagttaccatggaaacctggctcatcatttctctagtccctagggagtctctgcctttatccctcaattattgggtcctagag

SEQ ID NO: 440935 - DNA, 1045 bp, Homo Sapiens
  misc_feature (63)..(71): n is a, c, g, or t
tgctatagatttttttccatagaggcccctttcaaatcttttgcttgcacagaagagcccccnnnnnnnnnaacgtttttcagttttggttttctggccccagtgggcccttctttttgttgagcctcaatggccaccttctttttttcagccaggaactgggtccccccccaggaaagagaggggcaggtgatttagaatgtttttccccggaggccaggacctcctttttcgttcccacgaagggcccatgtgtccctccagccccagggcagggccagcctggctgcccaggctcctcagcagagccttggctgtgtccttgaggtggaaggagccctcatccttgacagtgcagatgagcactcggccgggcgctaccatgttgaggaatagcaccatggcctcatcctcatgaggtgagtacgtgtcaaacacacgttttgccatcacgtggcccgtggcctggttgaggacaatgacatggatgccccggccctgctcccgggcctcatcctccagcaccgtggtgccatccactgccacatatactttgctgcgacttgaatacacctctacgtccaggacccgccggggaccactgcctctgcgccgtgggggctccaggcggcctagggcctcatcatagtcttgctctggctctgggtcttcattggcttcactgatggctcgccgagtgtccaggatcaacttgatattgacaatgacagtcaccagcaggaaaagcacggcccctgtctgacagaatctccgcagggcccgctggtttgtcagtttatacttccaggtaaggtaccagctccgcttcttccgagccccaaagggcttgatgagggggctgggcttccagtcgtccataccggattggcgggtcaccaatgtcctggccagcccatgacttcaggaatggcttaggggccccgggccccgctcgggccccgctagggccctcactgctcggcccggctcgccgcggcctccgcctcctccatgccgccctcgtgccgaattcgccacccaggcc

SEQ ID NO: 440936 - DNA, 741 bp, Homo Sapiens
tcccgtggcctgttgaggacaatgacatgatgccccggccctgctcccgggccctcatcctccagcaccggtggtgccatccacggccacatatactttgctgcgacgttgaatacacctctacgtccaggacccgccggggagccactggcctctgcgtccgtggggggctccacggcggcctagggcctcatcatagtcttgctcgtggctctgggtcattcacttggcttcaagtgatgggtcgccgagtgtccaggatcagacttgagtacttgacaatgacagtcaccaggcaggaaagagcagcggcgccctgtctgacagaatctgccgcagggcccgtctggtttgtcagttgctatagcttccaggtaacggtaaccagctccgcttcttccgagccccaaagggcattgatgagggggcctgggcttccagtcgtccataccggattggtgggtcaccaatgtcctggccagcccatgacttcaggaatgtgcgagccactcgatgtgaagatcctgcagcagctggtgaccttgtatgagggcatcgaggcagtgcgctggctgttggaggacgcgggggacgttgaccagtcattgcagcagcctcaccagcagtcaatatagcctgacaggcggagcccagccgctcaaggcgagcagctggacagcctgccagacaccagcaccaccgaccggctgacagtatcccgtaactccgagccgtacagcc

SEQ ID NO: 440937 - DNA, 1730 bp, Homo Sapiens
caataccttctttattatgtctataaaattatatgtagcattggaaatgttattgaatatgacaccaacaacgtgctattgtattttttaaattttgacttcttttaaagaaggtgataacaatctgtggaaaatgcttttactgtatcatgccaatatactgcaaggagtatttcaaaataatataaaagtaattcacagacttagattaagtgaagatcaaatgaccccaaaatttttcttccttagtttttcacagcaactgctaaagtccataagctgatttttccaagaaaattattctaataattttgagtgttcaatccgtgcaatggtccagtcaggctttactccttgtgtgaactccctctgaaactcatagcttgccctaagaagttgtttagtttcccactttctgtttccccaacttaaacttggaatacactggctcctcttaaagtttcactggggatgttggcactggttagataccaaaagcacatcaggatgttaaccaaacttccttcctttctcatcatagtaaatggagatgtctcctgttgatgtaaatacaatttcatctatgttagcagcaagggcatttttatggttgtcaggtagtgaagtaaccttttctttcaatgcatgtagcacctctttggccacaagttcttccaacagatcaaatttacactgtgacagcaacttggatacatgagcaaaagcctgcttcgctccctcggagaactctgtgatgctgaactctttgtcgaaataggcccagataaggaaggccttaattcgagtcctaacccagttgatggggttggagaatcccaggacgatcatcttggttttctggtgctgctggggcttctcctccgtgctgtagctgcgctgagggcaggcagggaaagaagcgaaggctgcggggagtcccgggctgctgagcactggccaccgggagccctgggcaggtagcgccgaggctgccaaggccctagcgcttcgtggaaataacgccgctcccaagccgaggcgacagcggcagaagtagcaaagtgtggccgacggcagcctcacctcggccacagcaggagtccggagtcggacggccccgcagggcagcgaccgagagtgcaggaactggggtagcaaacgagcggccagcgccatttttatgacccttcaccccggtgcctgccggtgctgtatggaaaggaagtcggtgggaaaccgcctcagcggtgtcggagaaagagactggagagcaaagtggacctgttgctgcagcctctggtgagtcggccccgtccccgctctccagcacgcagccaggccgaggcccttcggcaacccgccccgcgctcggacccagccactctggagtctgccggctcgcggaccttttctctgtcgctcgtgtttccgggcggatggcgctgaggaacgctttagagccgaagttccgaagacctggaagagggcaggcgtgagcaaccatggccgggcagcacctcccggtaccccggctggagggcgtttctcgggagcaagttcatgcagcacctctacccacaggtgaggccctcgcgcggggcagaacctcgagaaaccagcgagagacacgtctttacctttcggacagctgggaactggtttttagagacccaggggtgttgggcaagaaggcccaggacgggagaaatcctggttggcccttaaccaag

SEQ ID NO: 440938 - DNA, 675 bp, Homo Sapiens
  misc_feature (59)..(59): n is a, c, g, or t
  misc_feature (493)..(502): n is a, c, g, or t
  misc_feature (619)..(628): n is a, c, g, or t
acaattagagatgagtttttacccttaagctattgtttccttaaaaaataataaagatntaaaatattgtattgtttgaattggtcttagttataaacatcagaaaccatgacacaagctggtttgaacaatgggagcttcagttatttttgtccgagcaggcgatcggggtggggtgggttccaggcagtttgatcgcaactgagtgatggctcaaagattcaggctctttgtgtctctccatttgccttcctttccgctggccttagccaaaggcaggatcctctcctggttataatagctgccagtggaaatcgggctttatttgcaccatcattgacagatgagtggagttctgacatatgtcttcacacacaaacaaaaacagcccacatttgtgtcagtattatactcatttgtcagttgcagcaataggttggcttgcatctggagaatacaagcttgaacccttctcagtgcctcaggcttaggnnnnnnnnnnccatcaaacttagaaacagcttctcagaatctaacctgtttgttctttgctcttacttcctagaaaggtcagtggattatcactgattcctggattgtctgcatcccagaagaaacnnnnnnnnnnctctgccatgggggatatcttgcaactagaaactgtctgtgtttgcc

SEQ ID NO: 440939 - DNA, 928 bp, Homo Sapiens
tatgggttgctctttttatttttattcaaataaatacaatacttatgtatagcctgattaatttcccttgtcatatctcttttttcaggtttcaggcttagatttttagttgtgccatgctatggtcacatcataactgttctctaagttgaaacaagtatttcaacaggcaaatagcaaactcgccaaaagacctgtgggtcacttgcccaaatgaggcctactgagatgagaacaaacatctttttttggtaaaaactctatttttatagtgtatctttggatataatgcaattgtttcttccccttctttcccaggccaggcacttgaaaataagacatttcagggatgggcaacccactccattaacatccactgggactcaatttcccaagaaaattaaaacagtgtgaaagaacactggcatttagcatttgggcatttcagttaatgagactgataatgactgaaatatttttgatgtgctagaagtccaattcaggaaatgtaggactggagaaatttcatttgttctaaatgagtcttgcttccccctgaaattccgtcgtttaagcagtaacttctttaggttcggaaattagtctgattaatatcacctttattgggaagaactattatcctctctgtggcttggcctctggtatctacgtatattaatttaaataaaagtatggcttcaactgataattgatggttcagcttacaaggaactagtttaggcagtcacccttcttacatgaagccagttagggctaatgcaacctgtatggtcaacttcagtttaaaaatcttaattctcattgtaagaaagcagccaaatataaagccttgaggcaagtgggtctatggagtggcagatttgggagtgtggggccagggccacgctgctcatgctaatacaccgcc

SEQ ID NO: 440940 - DNA, 642 bp, Homo Sapiens
  misc_feature (20)..(37): n is a, c, g, or t
  misc_feature (378)..(394): n is a, c, g, or t
agagcgaaaactccgtctcnnnnnnnnnnnnnnnnnncttaagctgggtgcggttgctccctgtctctttttttaaaacacaatttaaaagcagaaagaaaaaatctgtgctgtttagactcagattcttaattagctagtatttcttaattcaatcaataaattattaagaccttttcactgctccctttttaaagtcttctttggagtgatttaagtgcttcttattaccaagctctcaaagagaagataaaattaaaatctgatgggtaaccatttaaataagacaactggggtaacccatttctccaggacccctctctgcaacagagagctattctctttctttggcctagtaaacctctgctcttaaccttnnnnnnnnnnnnnnnnngcaattggaaaaaatttcaagtcaatgaataaaataagatttggggataatggtagatgctaattatgaaagtcgactgtttcctttgaagggggagttcaaagctgtttttttgatgtgaattctttgggagacaatagaaaatggctaaataggatataacagaaacttttaaggatggaattcaactttacctaaaaaaggtttcaggccaggcatggtggctgacgtctgtaatcacagcactt

SEQ ID NO: 440941 - DNA, 853 bp, Homo Sapiens
  misc_feature (772)..(809): n is a, c, g, or t
ggcgtcggtaagaagagcacatgcttccgcacatattccagctgtagcatgtcggagtccgcgtacaggcgctgcacattggcctcactgagagacacacgacccgtgtagcagtagtcgacctacacctcgaaggactcggcgtccacatcgtgcatggtcacgctggcctgctggctctcgtacatgccacctgtgaacatgctcttgaagtagggacacgcagctgctagcacgttgcgattgcaggaaaagaggcgacccgtgccaggcccgctgccaggcgtcaccacctcgatggtcacatcacacagcagccgcgcgtcgtagaaggacttgagctgtgccagcagggctgcagaatgggccgtgtcctttaactcctctggacccgtgaaaaaggccgaaaccgagggcttggaaatcctcttgggccgcctcccaccacggggactggcgaggcggcgagagcgcgggacgtcttcccgggactgcatggtggagatggcgacgggcgctgacggcgagaaaggctgcaggaccaggctctggctcctcctcaaccttccctcgctgacgctaagacaagccgcgtcctggaacagactgcggcacgggccgcacttctgaattcagccctatcccgcggtgaggcctccctttattgcatagacagtggctgactcaccctctctcactcccgcgccctttctccgcctccgctcgccctcccgctctcgacgaattcgagctcggccgatttggcctgatnnnnnnnnnnnnnnnnnnnnnnnnnnnnnnnnnnnnnncgccgccaccgcgggagtccagtccctatagataacacctttcc

SEQ ID NO: 440942 - DNA, 1177 bp, Homo Sapiens
gtgggttgaccgtggcttgtgggttgaccgtggcttgtgggttgaccgtggctctggtcagcagcccttctaagtagtcctgatcttcttcagtgaagtgcatccagcgcacgcacttgtagacttctgcagcactgggaccccgctctttgggagcagcctgcagccactgcactgccacatggcacactgtctgctcactctccacgtccagactatccaagcgcaggacagccagcagctgggccagggtcagatctgctagagtctcctcccgaattgaacccatgtggctgagttgcttgaagttctgagctatataggactgggcctgggatcgcagcttgcgatggccaaaggcatctgcaaacttgaggatggcggtgcagttggtcaggtcaagacgtcgggctaagaaggaggcacaggcttcccgcacatattccagctgtagcatgtcggaggccgcgtacaggcgctccacgttggcctcactgagagacacacgacccgtgtagcagtagtcgaccaacacctcgaaggactcggcgtccacatcgtgcatggtcacgctggcctgctggctctcgtacatgccacctgtgaacatgctcttgaagtagggacatgccgcggccagcacattgcggttgcaggggaacaggcgacccgtgccaggcccgctgccaggcgtcaccacctcgatggtcacatcacacagcagccgcgcatcgtagaaggacttgagctgtgccagcagggctgcagaatgggccgtgtcctttaattcctctggacccgtgaaaaaggccgaaactgtgggtttgtgaatcttcttgggccgcttcccaccacggggactggctaggcggcgagagcgcggggcgtcttcccgggactgcatggtggagatggcgacgggcgctgatggcgagaaacgctgcaggacccggctctggctcctcctcaaccttccctcgctgacgctaagatagcagcgtctccgaagagacagcagcacgagcccatttactgaattcaaccctaccccgcagagccgcctcccgttatcgtttagacagtggctgactcaccctctctcactcccgcgtcctttctccgcgtctgctcgccgccccgctctcgacgaattcgagctcggccgatttggcctgat

SEQ ID NO: 440943 - DNA, 420 bp, Homo Sapiens
agctcggtaccccaaagcagctccatgtcacctccagctcaaaacctcagtcattttgctctccccttaccatccataaccaagaaggtaccaggttcgtggtagttttcctggataaaacgtcctggagacattttagtcccacttttccaggtccctggccttactcaaaggtgagagcaaaatgactgaggttttgagctggaggtgacatggagctgctttgaggcaaagatgataaagccacggtcaacccacgagccacggtcaacccacaagccacggtcaacccacaagccacggtcaacccacaagccacggtcaacccacaagccacggtcaacccacaagccacggtcaacccacaagccacggtcaacccacaagccacggtcaacccacgagccacggtcaacccac

SEQ ID NO: 440944 - DNA, 1003 bp, Homo Sapiens
  misc_feature (13)..(13): n is a, c, g, or t
  misc_feature (23)..(23): n is a, c, g, or t
  misc_feature (68)..(68): n is a, c, g, or t
  misc_feature (248)..(248): n is a, c, g, or t
  misc_feature (253)..(253): n is a, c, g, or t
  misc_feature (257)..(257): n is a, c, g, or t
  misc_feature (267)..(267): n is a, c, g, or t
  misc_feature (272)..(272): n is a, c, g, or t
  misc_feature (274)..(274): n is a, c, g, or t
  misc_feature (300)..(318): n is a, c, g, or t
  misc_feature (324)..(324): n is a, c, g, or t
  misc_feature (327)..(327): n is a, c, g, or t
  misc_feature (331)..(331): n is a, c, g, or t
  misc_feature (333)..(333): n is a, c, g, or t
  misc_feature (356)..(356): n is a, c, g, or t
  misc_feature (361)..(361): n is a, c, g, or t
  misc_feature (372)..(372): n is a, c, g, or t
  misc_feature (375)..(375): n is a, c, g, or t
  misc_feature (392)..(393): n is a, c, g, or t
  misc_feature (399)..(399): n is a, c, g, or t
  misc_feature (412)..(416): n is a, c, g, or t
  misc_feature (423)..(423): n is a, c, g, or t
  misc_feature (427)..(428): n is a, c, g, or t
  misc_feature (437)..(440): n is a, c, g, or t
  misc_feature (450)..(450): n is a, c, g, or t
  misc_feature (452)..(452): n is a, c, g, or t
  misc_feature (456)..(458): n is a, c, g, or t
  misc_feature (463)..(464): n is a, c, g, or t
  misc_feature (467)..(468): n is a, c, g, or t
  misc_feature (470)..(472): n is a, c, g, or t
  misc_feature (475)..(478): n is a, c, g, or t
  misc_feature (495)..(495): n is a, c, g, or t
  misc_feature (506)..(507): n is a, c, g, or t
  misc_feature (518)..(519): n is a, c, g, or t
  misc_feature (523)..(523): n is a, c, g, or t
  misc_feature (526)..(526): n is a, c, g, or t
  misc_feature (529)..(529): n is a, c, g, or t
  misc_feature (532)..(533): n is a, c, g, or t
  misc_feature (536)..(537): n is a, c, g, or t
  misc_feature (542)..(542): n is a, c, g, or t
  misc_feature (544)..(545): n is a, c, g, or t
  misc_feature (549)..(549): n is a, c, g, or t
  misc_feature (554)..(554): n is a, c, g, or t
  misc_feature (556)..(556): n is a, c, g, or t
  misc_feature (565)..(565): n is a, c, g, or t
  misc_feature (567)..(568): n is a, c, g, or t
  misc_feature (571)..(571): n is a, c, g, or t
  misc_feature (582)..(582): n is a, c, g, or t
  misc_feature (586)..(587): n is a, c, g, or t
  misc_feature (589)..(591): n is a, c, g, or t
  misc_feature (599)..(602): n is a, c, g, or t
  misc_feature (604)..(605): n is a, c, g, or t
  misc_feature (608)..(608): n is a, c, g, or t
  misc_feature (613)..(613): n is a, c, g, or t
  misc_feature (615)..(615): n is a, c, g, or t
  misc_feature (620)..(621): n is a, c, g, or t
  misc_feature (623)..(624): n is a, c, g, or t
  misc_feature (629)..(630): n is a, c, g, or t
  misc_feature (633)..(635): n is a, c, g, or t
  misc_feature (640)..(641): n is a, c, g, or t
  misc_feature (643)..(643): n is a, c, g, or t
  misc_feature (645)..(647): n is a, c, g, or t
  misc_feature (654)..(655): n is a, c, g, or t
  misc_feature (679)..(680): n is a, c, g, or t
  misc_feature (689)..(691): n is a, c, g, or t
  misc_feature (693)..(694): n is a, c, g, or t
  misc_feature (698)..(699): n is a, c, g, or t
  misc_feature (703)..(703): n is a, c, g, or t
  misc_feature (721)..(725): n is a, c, g, or t
  misc_feature (727)..(727): n is a, c, g, or t
  misc_feature (732)..(732): n is a, c, g, or t
  misc_feature (734)..(734): n is a, c, g, or t
catggtgagtggntcacagaganaagacatcaatcgtctgttagcagcgagagagacactttaagttnccccaagagtacaaatcccatctatgagacagcagtgctggcttcttaaaaacagtaaaaccaatcaaaaagaaaagatttagaggttcagacattagaacaaatgtggccagagataccacagagcccttgaagggaaaggcctcactgctggctccgtagcaatgttgaccaaaaaanagggnaggnaagggagtgnaaggnanaggaggggtggaaaggagggaggagnnnnnnnnnnnnnnnnnnngtaatnagnaaananaaaatatgggattatgaagttanagtanaaataaaattnagngaaggggaatgaatggnnaaaagngaaaatgtagagnnnnnggatgtntaannaagttaagnnnnaaaaagatgntntgtnnnaagtnnaanntnnnaannnnataaggagagtttattngagttgatttnntttttaataannaagnaanatnaannatnntaatnannaatnaaaangnaataaaatnannagnttgggatgggngaanngnnnaaaaaaannnnannaanaaaantnaaatnntnntaaannaannnaaaannangnnnttataannaaaatataaatgataatggaggtnngtgtgttannnanntttnnggtnagtttattttaaaaaaannnnngnaggananttggaaggagggtgagtcatataccaccgactttgggttcaatgttgatgagctcacatctgaatgcctgaaaccgtggggctgggaggcagtagagaagtgagatggagctgcacagggaccccctggagacctgggattccacccgccagcccgtggggactcgggggccaggcgaggaaaccaccccggggacgaatttgctgccaccacatgtcagacgctttgcccctcgtgccgaattcgccacccaggcctcgttacgttgg

SEQ ID NO: 440945 - DNA, 887 bp, Homo Sapiens
ccatctcttcaccataacatttttattaaataaagggaaatattaggagacgatgtctgctaagataggaggttaattctttacatggtgagtgggtcacagagacaagacatcaatcgtctgttagcagcgagagagacactttaagttgccccaagagtacaaatcccatctatgagacagcagtgctggcttcttaaaaacagtaaaaccaatcaaaaagaaaagatttagaggttcagacattagaacaaatgtggccagagataccacagagcccttgaagggaaaggcctcactgctggctccgtagcaatgttgacccaaaaacagggcaggccagggagtggcagggcgcggaggggtggaaaggagggaggagaaaaaagacaccccaccagacctgcggcaagcgccactatgggattctgaagttaggcgtcgccctccaattgcgggaaggggactgcctggccaacagggcaaatgtagagggccgggatgtctcagccagttaaggccccacaagatgctcagtgccaaatggaaggtcccaagccccataaggagcgatttctaggagttgatatggttttacctccggaaaagcagatgaaggcaggaactgaggcatgaccagggccatacccatcagacagacttgggatgcgcgggaacggacgggcaaatacaaagcgaacgcagagcacttggccctacgtcctcggggccacgacacgaagagggaatgggaagttagtaaagtcccgagcatgcgataagctggaaacagtgagaaggtagcgaatgatcatccccgagagcgtgtcacaaagatagaggtaagagatacaagaagagacgaacagccggcggcagggaaaaac

SEQ ID NO: 440946 - DNA, 946 bp, Homo Sapiens
caaactgcttccggacattgaggtggtctcgggtgaggatgacagaggcgtgggcagcccccagggagcaggaagcaatattgatcctccctccgttcagtcctctcacggcaatgaggaagccctgcccctcgctcccaattctgttggccacagggacagcacagtcttcgaagatcacagctcgtgttggctgggagttccaccccacctttttctccttcttgccaaagctgaggccaggggtccccttctcaacaactatgcatgagatgcccttggggcctggtcctcctgttcggcacatgaccacatagatgtctgactcaccagcaccactgatgaaggccttggagccattgaggatgtaatgatctccctgtttcttagcggaggtcagaagagaggcagcatcactcccacttcctggttcagtgaggcagtaggaagcaaacttctccatggtacagagcggtgggcaaaatttgtgcctctgttcctcatttccgaagctatcaatcatccaggcacacatgttgtggatgcttatataggctgtggtgctggtgcagcctgtagccaaggcttcaaaaatgacagaggtatcaagacgtgacagcccagacccgcccacatctgtttgtatgtagacccctccgaagcctagctgggctgccttccgcatcacatccactgggaacagctccttctggtcccactctgccatatttggagccatctctcgggcagcaaagtcaaaggccactttttgaaattctttctgctcttcattaagtcccatggaagggtcgatgcaggaggtcaagctccggtggccggtctggacgaggacccggagaccgccgggcaggcagccgaggcgcgccccgaaacgccggcagccgctccacagcatagccgccgcagctccgcgatcccaagaatc

SEQ ID NO: 440947 - DNA, 1575 bp, Homo Sapiens
  misc_feature (18)..(18): n is a, c, g, or t
  misc_feature (45)..(45): n is a, c, g, or t
  misc_feature (87)..(87): n is a, c, g, or t
aaggtcctactcctaccngactaaccctacaaacacttcctcaanaacttcttttaggattgtgaacaccaactgccccccaatttnaagtgcctctaattgaaaaccacaaactatctacaatctccccagttcctctctggctctgaaaatagactgcctttacatcatttccttgctctcttttgttgataggataaactccatttctaagccttttactgaaggtcttcctgcccaggagttagcatgggcttcacacacagtagaagcctaggaaatggttgctgtgttaccaaagagaaggggatgctaaaatgcataatgccttacagttacagaggatcaggaaggattctgtaggaaattacagaaacccgaggagctgtgagaaagaggtacacttaggggtcatttcattacctgccttctctcacaaagtccccccataacagtacaaacttagagagagatgactgcttgtagcatctggtctaaaagatctgaatggctcttgagcccttattaccaattacggttacatgatcacaggtctcctgttcatgccctggccatggcggctcttaatcctagaagtatcttacttttcaaattacttacagtacctaagtgtccttcttgggttgctgaaatacccacaatcatctccaatgagttttcctttatttttaatcaaagaagcaaaaggggaccccacgccttccattactgagacttgtggccaacaccaggtcttctttaagcgtctcttcctggagcaacaaagtgcaccaacgtaagcagctttttctccttcttgccaaagctgaggccaggggtccccttctcaacaactatgcatgagatgcccttggggcctggtcctcctgttcggcacatgaccacatagatgtctgactcaccagcaccactgatgaaggccttggagccattgaggatgtaatgatctccctgtttcttagcggaggtcagaagagaggcagcatcactcccacttcctggttcagtgaggcagtaggaagcaaacttctccatggtacagagcggtgggcaaaatttgtgcctctgttcctcatttccgaagctatcaatcatccaggcacacatgttgtggatgcttatataggctgtggtgctggtgcagcctgtagccaaggcttcaaaaatgacagaggtatcaagacgtgacagcccagacccgcccacatctgtttgtatgtagacccctccgaagcctagctgggctgccttccgcatcacatccactgggaacagctccttctggtcccactctgccatatttggagccatctctcgggcagcaaagtcaaaggccactttttgaaattctttctgctcttcattaagtcccatggaagggtcgatgcaggaggtcaagctccggtggccggtctggacgaggacccggagaccgccgggcaggcagccgaggcgcgccccgaaacgccggcagccgctccacagcatagccgccgcagctccgcgttcagctaagagtctgaacgccttcgacctccgttgcgctcgcccgct

SEQ ID NO: 440948 - DNA, 1877 bp, Homo Sapiens
  misc_feature (24)..(24): n is a, c, g, or t
  misc_feature (79)..(79): n is a, c, g, or t
  misc_feature (85)..(85): n is a, c, g, or t
  misc_feature (89)..(89): n is a, c, g, or t
  misc_feature (136)..(136): n is a, c, g, or t
  misc_feature (215)..(215): n is a, c, g, or t
  misc_feature (224)..(224): n is a, c, g, or t
  misc_feature (235)..(235): n is a, c, g, or t
  misc_feature (251)..(251): n is a, c, g, or t
  misc_feature (299)..(299): n is a, c, g, or t
  misc_feature (305)..(305): n is a, c, g, or t
  misc_feature (538)..(538): n is a, c, g, or t
  misc_feature (679)..(679): n is a, c, g, or t
  misc_feature (687)..(687): n is a, c, g, or t
  misc_feature (1365)..(1441): n is a, c, g, or t
  misc_feature (1707)..(1716): n is a, c, g, or t
ccagcgctctccccggatcgtgcngggcctgaacctctccgccggcgcaggctctgctcgcgccagctcgctcccgcanccatgnccancaccatcgagcgggagttcgaagagttggatactcagcgtcgctggnagccgctgtacttgatgatcacagtcgtgttaaactgcaaaatgctgagaatgattatattaatgccagtttagttganatagaagangcacaaagganttacatcttaacacanggtccacttcctaacacatgctgccatttctggcttatggtttggcancagaanaccaaagcagttgtcatgctgaaccgcattgtggagaaagaatcgagtggtgaaaccagaacaatatctcactttcattatactacctggccagattttggagtccctgaatcaccagcttcatttctcaatttcttgtttaaagtgagagaatctggctccttgaaccctgaccatgggcctgcggtgatccactgtagtgcaggcattgggcgctctggcaccttctctcntggtagacacttgtcttgttttgatggaaaaaggagatgatattaacataaaacaagtgttactgaacatgagaaaataccgaatgggtcttattcagaccccagatcaactgagattctcatacatggctataatagaangagcaaantgtataaagggagattctagtatacagaaacgatggaaagaactttctaaggaagacttatttcgtgcctttgatcattcaccagacaaaataatgactgaatcatacaatgggaacagaataggtctagaagaagaacaactgacaggtgaccgatgtacaggactttcctctacaatgcaagatacaatggaggagaacagtgagagtgctctacggaaacgtattcgagaggacagaaaggccaccacagctcagaaggtgcagcagatgaaacagaggctaaatgagaatgaacgaaaaagaaaaaggccaagattgacagacacctaatattcatgacttgagaatattctgcagctataaattttgaaccattgatgtgcaaagcaagacctgaagcccactccggaaactaaagtgaggctcgctaaccctctagattgcctcacagttgtttgtttacaaagtaaactttacatccaggggatgaagagcacccaccagcagaagactttgcagaacctttaattggatgtgttaagtgtttttaatgagtgtatgaaatgtagaaagatgtacaagaaataaattaggagagattactttgtattgtactgccattcctactgtatttttatactttttggcagcattaaatatttttgttaaatagtnnnnnnnnnnnnnnnnnnnnnnnnnnnnnnnnnnnnnnnnnnnnnnnnnnnnnnnnnnnnnnnnnnnnnnnnnnnnngaaggaggagggcgcgcgagccgagagaggaacctcgcccgagagggaggaccgcaatcaagagcgacacaccacgcatttgttgtgaaacaaaggggggccccacataagagggccgtcaattataaatcaacaatcagagagcggcgagggcgccggtattacaaacaaccgcggtcgtgaggagggagacaaaagaatgcggcaaacgcaggacggagcgaacactcatgggagagaagaaaagaacaccctatctctcgttnnnnnnnnnncgaggagcacaaccatatcaggggaggaacacaacacccccacgaagagagagagattaacagccccgccgggggagaataatgaacaaccactgagcaggtggtaatagagtgggttacacacaacgccgcggacaagatgctgcagcggccgtgcagag

SEQ ID NO: 440949 - DNA, 1601 bp, Homo Sapiens
  misc_feature (6)..(6): n is a, c, g, or t
  misc_feature (406)..(406): n is a, c, g, or t
  misc_feature (418)..(418): n is a, c, g, or t
  misc_feature (877)..(877): n is a, c, g, or t
ataatnactttattcatttccagattatgagtatgacacagcatatacatatatttagataatatataaaacatagaataaaccgcagaagaaatattggtctggaattccttatgggccatctttaattctgtaagttcatggtaaaggtatctccccccacactggggcaggcagcggaataagctccagcgttcatgcgccactcacaggactgcttacccccactgcacttacaatgcagttacagagttacggcatgttcaccggtgtccatgacaagcaacaccaagtataaataacagaactacagcagagcaaactaagataaatatgtttttgcatcgtcctccacatagtttccttttaaaaagaagagtcacatccagggtctatccctcgagtnacaattccagtnattgctttgccttgttctgaactgggagatacagtttgaactctgccggcagctcatcttctgagtagagtctgtttgagaagtaaacccgtcggatgcgacaatttgcatggatctgtcaaggcaatgcttcttttgagaggcgaaatgtgactgtgctcccccttttcctgaatcttctagaggccctcttccaggactggaaacgcgtcatctccggcatctccttggcttgtcttagggatggattctggcaagagggaggtcttacttgctgtattcacctctatacctgacccgacttctgaatatttcctggacctttgtgaggccaaagctccctggacagtgtggcaactgaagccagaaacccacactgttctgctatgtgggccacaagccaatattagacgcagtgtgccctatcccccaacccagggctctatctgggaaaggganagtacctgcactctgaggtctcgatgtaattggtgccgtatgctcgccgtgtgaagtctagcaagttgaactgaatctggttccagccgtcatccagccgcatgggcatggtgcagatgaagggtttgacccgggtggtgctctggtagttacttgcccgaaagcgacaacgcacattcttgtcatctagtacctgcacttcgaaggtaaaatacttcttcaggtttttgataatcataacaaggaaaggaagtttaattcccagcgtcttcttggggtctgcagggcatgtgatatatgtggtgcttacatttgtcccttcaatctctagcaccagggactggatgtcattatcagtgattcttttgatgtggccattccgtacctttttgtcccagatttgcagaggcttgctgccgatgctgtaggggatggagagggagccgctctggaacgtgtttttgaacatctcgccggcggccttctcctaagccgcccccggagccgacctaggccccggagtagatacaggcaccgagcgtcgagggcacagcagcaggccggccctgttccgaagaagggtggttgagctcctggcctccggatctgcagccactgatggccggactcggacgcggcaacgctaagtccgcgatcttcagctcctaagctgcgagctcagaacggaaaccacagcaactaccgtcgcgccgcggtatatccc

SEQ ID NO: 440950 - DNA, 1289 bp, Homo Sapiens
ttttttacaaaccaggaatatatcactttattcatttccagattatgagtatgacacagcatatacatatatttagataatatataaaacatagaataaaccgcaggaagaaatattggtctggaattccttatgggccatctttaattctgtaagttcatggtaaaggtatctccccccacactggggcaggcggcggaataagctccagcgttcatgcgccactcacaggactgcttacccccactgcacttacaatgcagtcacagagttacggcatgttcaccggtgtccatgacaagcaacaccaagtataaataacagaactacagcagagcaaactaagataaatatgtttttgcatcgtcctccacatagtttccttttaaaaagaagagtcacatccaggggtctatccctcgagtcacaattccagttattgctttgccttgttctgaactgggagatacagtttgaactctgccggcagctcatcttctgagtagagtctgtctgagaagtaaacccgtcggatgcgacaatttgcatggatctgcactctgagggtctcgatgtaattggtgccgtatgctcgccgtgtgaagtctagcaagttgaactgaatctggttccagccgtcatccagccgcatgggcatggtgcagatgaagggtttgacccgggtggtgctctggtagttacttgcccgaaagcgacgacgcacattcttgtcatctagtacctgcacttcgaaggtaaaatacttcttcaggtttttgataatcatgacaaggaaaggaagtttaattcccagcgtcttcttggggtctgcagggcatgtgatatatgtggtgcttacatttgtcccttcaatctctagcaccagggactggatgtcattatcagtgattcttttgatgtggccattccgtacctttttgtcccagatttgcagaggcttgctgccgatgctgtagaggatggagaggaagccgctctggaacgtgtttttgaacatctcgccggcggccttctcctaagccgcccccggagccgacctaggccccggagtagatacaggcaccgagcgtcgagggcacagcagcaggccggccctgttccgaagaagggtggttgagctcctggcctccggatctgcagccactgatggccggactcggacgcggcaacgctaagtccgcgatcttcagctcctaagctgcgagctcagaacggaaaccacagcaactaccgtccgcgccgcggtatttccccgccttcaatccgct

SEQ ID NO: 440951 - DNA, 556 bp, Homo Sapiens
  misc_feature (16)..(16): n is a, c, g, or t
  misc_feature (30)..(30): n is a, c, g, or t
  misc_feature (35)..(35): n is a, c, g, or t
ccctgcaactccaaangttaaaaaaattcnttcangtttttgaaaaatcaagaacaaggaaaaggaaattttaaatccccaacgtcctccttggggtcctgcaaggccatgtgaatatatgtggtgccttaacatttgtccccttcaaatctcctaagcacccagggaactggatgtccattaatcagtgattcttttgaatgtggccattccgtacctttttgtcccagatttgcagaggcttgctgccgatgctgtagaggatggagaggaagccgctctggaacgtgtttttgaacatctcgccggcggccttctcctaagccgcccccggagccgacctaggccccggagtagatacaggcaccgagcgtcgagggcacagcagcaggccggccctgttccgaagaagggtggttgagctcctggctccggatctgcagccactgatggccggactcggacgcggcaacgctaagtccgcgatcttcagctcctaagctgcgagctcagaacggaaaccacagcaactaccggtgcgccgcgaattcttcca

SEQ ID NO: 440952 - DNA, 1014 bp, Homo Sapiens
  misc_feature (23)..(23): n is a, c, g, or t
  misc_feature (25)..(25): n is a, c, g, or t
  misc_feature (33)..(33): n is a, c, g, or t
  misc_feature (50)..(51): n is a, c, g, or t
  misc_feature (53)..(53): n is a, c, g, or t
  misc_feature (58)..(58): n is a, c, g, or t
  misc_feature (70)..(71): n is a, c, g, or t
  misc_feature (76)..(76): n is a, c, g, or t
  misc_feature (85)..(85): n is a, c, g, or t
  misc_feature (127)..(127): n is a, c, g, or t
  misc_feature (762)..(770): n is a, c, g, or t
acctcaatgaggcagctgagcancngaaagtanggctcctctctgaatcnntntcacnagtcaaggcccnntcttnaaaggcacnacacagatgtagttggttacattgtcactctcagagttcagngggtagtttttcagcatatatagggtagctagccttgctgcttggaagttggctcttagagttcggtagacagctttccgaagaccgatgagatgctgacttggatgctgtccagctttattaaatgggcaagcagcactgaccagtgtaaatcctctggaaatcacttcggtttcttgaatgagacgtaaagcttttctcacgaggttagtaaaagctcggctgtttgtggccatatcttccaaatgaacgctgtatttttttagggtcacttgtagtttggctgtcctccataatctcaaagctcttatgaccagatacacaaatagaatcactccccataccagccaggaagacacaatccaccaagtgggaagcataacgagcaagctaatgaaggcaaatagcattgagagatcccaaatattaggggttgccagggagcaaagtgttggaaggtgtccattttcctgttgttgagattgccctgcagacaggatactgggatcaagtagctcaatcagctccacatcctcttgtaacaggacttcctgttgcaggatggtatgtaatgagtcgagtcggaatccaatatccaacttgtgaagtaagtcatctttcttattgcactgagnnnnnnnnntccaacttttgatggtttcagccacttttaacaggataccttgttttggtaggactcttgtaggaggcttttgttgtccctctgttgtgcatttttctgtttttggtgacaaagaagaacatatttcaaagtctgtgtgtcccagatcctgtaagtattggtaaagtggagaattctcaaaaaccacctcttcgtcaaactccggtgtcatccttctccgccatgccacccgcctcagcacgat

SEQ ID NO: 440953 - DNA, 429 bp, Homo Sapiens
  misc_feature (394)..(394): n is a, c, g, or t
  misc_feature (401)..(401): n is a, c, g, or t
  misc_feature (409)..(409): n is a, c, g, or t
  misc_feature (415)..(415): n is a, c, g, or t
  misc_feature (417)..(417): n is a, c, g, or t
ggcaggaactttacagtttataaagcttttgcataagtcacctctggttcttcccaaccatcttacgacgctttattactgtgatttcagagaagaaacaggcttacagaggttaagggcttgagaccactcaactggttttaagtggaatccagaccagaggtgccggctccacgtctactgccctttccacggtgccatgctgcctcccacaaaacatccacagtgcccttggccaatgaggggccgccatcggaggtcacaggaagccttttcacagtccctctggggcatgagtggggagcagctcttctccccagagctttaaagccccatcgaggaaggggtgagaactgacctcctgaagtgcccgagtgtgtgtgtacggggaganttgactnaatttttntttttnanaactcattaaga

SEQ ID NO: 440954 - DNA, 929 bp, Homo Sapiens
  misc_feature (494)..(494): n is a, c, g, or t
  misc_feature (578)..(578): n is a, c, g, or t
  misc_feature (580)..(581): n is a, c, g, or t
  misc_feature (584)..(584): n is a, c, g, or t
  misc_feature (586)..(586): n is a, c, g, or t
  misc_feature (590)..(590): n is a, c, g, or t
  misc_feature (595)..(595): n is a, c, g, or t
  misc_feature (601)..(601): n is a, c, g, or t
  misc_feature (677)..(677): n is a, c, g, or t
  misc_feature (690)..(691): n is a, c, g, or t
  misc_feature (925)..(925): n is a, c, g, or t
ttaatacgaactgtttaattgttataacaagatttgagaggcaggggtaggtaagtaagtcaccaactggcgataagtcaccaactgttaatatgtgtctgcaagtttcttgtttttcacaatcactagatttacatacaattataggttatggttctccatgtacacatacagtgaaagacattttccaaataccttttgatgtagaatggaacctgagacaaaaaaatcacttaagaaatcaaatctcatataatggaaatactttaaccacagcattcacacatttgactgtggattcgcaaatgcttatctaaacagaggcaacgcaattaaactgccttcactcaaaatggtgtcagaaggcaactaccctatttactagccactgataagttatgacaacactatttcatagcctgtcactatatttcttttaaccccccagcagtaggatttaggatttcctcaacactaagggcttatctcaaatnctttagtgcacgaacagtaaaaaatcagagttgcaatgccacattgagaaactagataatgacttggcaataaaagggggggcngnnagntnctgncactncctgtntttctaagttttctattttctaatacagagcgaaacttttaatgctaacggcaaaaataaatctaacaggcctagngattctgagggtnnccccgtgacaatagaaaacttttagatcactattaagaggtctttatattgttcataaacaataggaaaataagactgatactgtttataattactaactagataaaatttggcaaaagacatctaatatactttttacaatgaaaatgatttctaaaaatgattcccttgatctcatacctatagaaaaactatcagtgattactttttagtatgaaaataataagctagttncaca

SEQ ID NO: 440955 - DNA, 1093 bp, Homo Sapiens
  misc_feature (843)..(859): n is a, c, g, or t
  misc_feature (870)..(870): n is a, c, g, or t
  misc_feature (1059)..(1059): n is a, c, g, or t
  misc_feature (1062)..(1062): n is a, c, g, or t
gcggccgctgcctgctcttcaccgagggcatgtggctgagcgccaacctcacggtgcaggagcgcgagcgcttcacggtgcaggagtggggcccgccggccgcctgccgcttcagcctgctcgccagcctcctgtctctgctgctggccgccgcgcacgcctggcgcacgttcttcttcctctgcaagggacacgagggctccttcttctccgccttcctgaacctcctggtcagcgccttcgtggtcttcctggtcttcattgccagcaccatcgtgagcgtgggcttcaccatgtggtgcgacaccatcaccgagaagggcaccgtaccccacagctgtgaagagctccaggacatcgacttggagctgggcgtggacaactccgccttctacgatcagtttgcaattgcccagtttggcctctgggcctcatggctggcctggctggccatcaccacgctggccttcctgaaggtctaccacaactaccgtcaggaggacctgctggacagcctgatccacgagaaggagctgctgctggcccggccgtaccccacgcacctccttccaagaggagaagagcgctgtcatttacggcacagtgcaggcagggggagctgggcccgacctccctgctgcagctcgggggcacagggcctgcctggggaagcagctggggggctctgcctggagcctggccacatgcagccctgcgtgtgtcccctcgacagccacgtgtagtgaggtgagcgccccagtgcccacctgtgagacctggcagtggacctgggtgggtgccggctccctgatgagggatggtgcacgagagactatgggtgtnnnnnnnnnnnnnnnnncacctccaggnctcgcacagggccccttggctgtcccagtaggacctgactggccagcctatgtggagggcgtccagcttgtctcccccaaccctggccggatgctgtctccatgccagctggcccagggggtgggcagatgtcacttagccctgaacgaattctgcatgaattctgccatccaggcagaggctgcgtgnttnggaggagctcacggcaccttccagcctctgg

SEQ ID NO: 440956 - DNA, 487 bp, Homo Sapiens
gcggccgctgcctgctcttcaccgagggcatgtggctgagcgccaacctcacggtgcaggagcgcgagcgcttcacggtgcaggagtggggcccgccggccgcctgccgcttcagcctgctcgccagcctcctgtctctgctgctggccgccgcgcacgcctggcgcacgctcttcttcctatgcaagggacacgagggctccttcttctccgccttcctgaacctcctggtcagcgccttcgtggtcttcctggtcttcattgccagcaccatcgtgagcgtgggcttcaccatgtggtgcgacaccatcaccgagaagggcaccgtaccccacagctgtgaagagctccaggacatcgacttggagctgggcgtggacaactccgccttctacgatcagtttgcaattgcccaggtccaattccggaccccaggctggcctctgaaggctcttggctgccgtggctggcctgaggacgcttctcc

SEQ ID NO: 440957 - DNA, 1094 bp, Homo Sapiens
  misc_feature (1068)..(1069): n is a, c, g, or t
ccccgttttgttttctatgtcttttgttttggaatccaagaatggttttaatgtgttggccgagaaaaataaactgtaaagttctgtgaggtcttctaaaaatttacaagaaaaactgatgggcagttctaatcagacttggatgttatcttttcccccctttttaaaaatgacaacagatacagttccacaaaatacaatagaaactgtttttttatcttgactgccagagacgctcctttgcaatgccttccggtaaccaaatttttgggcacaacacacagctggccttcatttcttcaggggctggtaaacagaggcattggggtcaagtccagaggggctggtctccacaaatttggaagagtagtggggggaaacagggctcagggggctgggtggcggcactgtatgttatgctgggcatgacggccatgacttcggctatcttctgttttaggtccttgatttcctgatctttctgaaggatttgtccttgggcaatctcgagctgccgctttgcatcgcccagtgcggagaacaggtccagcttgattctcgtctctgcacttaagctgttctccaggtgctgtgttttgtcttgcatggctgagagggctgacattaacacctcagtgtccttctcattttccttatatttccgaagctcctggacttttagttctagttctctgatttggtcttctttcaccttcatgtccatcgtgagcttcttgccctctgcttctagttctctgatccgattccgtaaggtttcggtgcattctcccctagatgcagcagcaaacgcaacagcccgggcagcagtggcttcttctaacttcttcctctttttctcttccattaactgtttctctacaaaacttcgggcttcctgctcagcttttagctttttctccaactggctgatattctgcttgtctttttgcttcatttgcacggcattatgtaacttgttctgcagcagctcgttctcctgccgaagctggcccatttctgagcggatccctcgctcggtgctcgaaagggagctgatctgactgcggnntcttgttccacttgtctgctggctt

SEQ ID NO: 440958 - DNA, 857 bp, Homo Sapiens
  misc_feature (770)..(784): n is a, c, g, or t
taaattattattaaaaagaggagatttagatttattagatttattttttggaaaaagatgggttatatatgttattttttaaaaattttgaggcttaaaaataaataataatcttttaatataataccagtaatcatcagtatttacgaattagcccaactcatttaatatttatttttaaccgccaaaatcagttccttaggtgctttctgagccatcggcagacatgcccagggctgggagaaagctgggtctcctggcacacacacttccagctggagtctaagaaggcaacgctctgccttttttcccagttcaactataaaccagtgtacttcttgtggtctatttagtgccacagttttcacatttttgtgctttttgttgatgatttcactgttttgaaataatccccaagcttagtgaaatgctatctagtgttaattgtgatacacttttgtgttacagaggaaacacatgtattagagaagcttcattcaagcaggcatcagtatttatagtgctgctggccctgacttcaatattgatgaatcaacaatatgtatcaaataagacgtctttaaatagaaacacacataaaacaaggttacgcattgatcaattagagaaaatgtgaccagagaattgcaggaatctaactgtatttcccctggcagccgcggttcaatatttgctaactcagtgtacacagtgactttatagaacataaatactgtggttgtgtgcgctcgctcccgtgtgtggtcccnnnnnnnnnnnnnnncggtgataggcatataaaaaaaaaacaagagaaagagaccagcatgtgcaacatggcgaaaccccattttttt

SEQ ID NO: 440959 - DNA, 285 bp, Homo Sapiens
tgaggacagaactttgggctctggccaaagcattttattagccgacccgtaactcgtccattcttggtctggtgaaaaccctccaaagttactgcaagggcagagctccaggagaagtcatcctatagtcagccacgggagggggccacatttaatgatcctttacagtccagggctgccaacccactgagcctgggctgggaggagcaagagagagggtgtgtgtgtgtatatggatttgcacatgtgtgcatgcatggtatatgcagtatgtgtatgtgcact

SEQ ID NO: 440960 - DNA, 969 bp, Homo Sapiens
ctgaaacaccacgggcgcagttcaaccaaggtcattgactttgggtccagctgtttcgagtaccagaagctctacacatatatccagtctcggttctacagagctccagaaatcatcttaggaagccgctacagcacaccaattgacatatggagttttggctgcatccttgcagaacttttaacaggacagcctctcttccctggagaggatgaaggagaccagttggcctgcatgatggagcttctagggatgccaccaccaaaacttctggagcaatccaaacgtgccaagtactttattaattccaagggcataccccgctactgctctgtgactacccaggcagatgggagggttgtgcttgtggggggtcgctcacgtaggggtaaaaagcggggtcccccaggcagcaaagactgggggacagcactgaaagggtgtgatgactacttgtttatagagttcttgaaaaggtgttttcactgggacccctctgcccgcttgaccccagctcaagcattaagacacccttggattagcaagtttgttcccagacctctcaccaccatagacaaggtgttagggaaacgggtagttaatcctgcaagttctttccagggattgggttctaagctgcctccagttgttggaatagccaataagcttaaagctaacttaatgtcagaaaccaatggtagtatacccctatgcagtgtattgccaaaactgattagctagtggacagagatatgcccagagatgcatatgtgtatatttttatgatcttacaaacctgcaaatggaaaaaatgcaagcccattggtggatgtttttgttagagtagactttttttaaacaagacaaaacatttttatatgattataaaagaattcttcaagggctaattacctaaccagcttgtattggccatctggaatatgcattaaatgactttttataggtcaa

SEQ ID NO: 440961 - DNA, 1370 bp, Homo Sapiens
  misc_feature (570)..(570): n is a, c, g, or t
  misc_feature (810)..(810): n is a, c, g, or t
  misc_feature (825)..(825): n is a, c, g, or t
  misc_feature (1001)..(1074): n is a, c, g, or t
  misc_feature (1259)..(1259): n is a, c, g, or t
  misc_feature (1262)..(1262): n is a, c, g, or t
  misc_feature (1334)..(1334): n is a, c, g, or t
tccccattgcgacaggcctccagcagttcccgtagccccgctcactgctgggacccctgtcccaggtcctgctgccccaggccccagtggtgctgtgctgctaactccggccgcctcggggctctccgccaagctcgatccaggggaggatggagaggaagatgaggaagaagtcggggaagaagaggacgacggtgaattgttactgccactgccggctgggttgggagcgaccccagcggcagatgaagtagaaaccgctgggaccacgggagcggcggcgacggtacagattgtgctggtggtactgcaacagctggtaccgtcaaccgggtccggggatcggggcctgtcgggcggatcccgactgccatccccctccggcagcgctaggccgtgccgcggggaggcgaagggggccaggccgctggccgtgggagaggctggggtggtccccggggccaggccagggctgagtgggggaggaggtggcggcggcggcgctgaagcccctggggcgggctggagctgttgttgatgatggtggtgatgatgctgagagcgacgcancgccgccatcttcggactcccctagcactgtcactgcggcaacggcccccaccgcccgccctcacttccgactgtcggaccaatcagcatccagcgcacaggaaatgatgctaggcggggtagcaggggccaaagagaaggagggaagtattgggagctcagagaacagccaagggaacggggcggggctttgtcactgagaggcgggctttgtgacgtggtggcgggccggctggaganatttgaatgctggancagcttctgcctagatgggaaacatttcctgcatttctcactttcagtcggctttctttgccctgctccgctctgtttcccttagtctccctttgcttgctccagagccagctgttgagatgcagatcagagcaagcagggaatgtgtccgttatcatctattaagcgtccttgtnnnnnnnnnnnnnnnnnnnnnnnnnnnnnnnnnnnnnnnnnnnnnnnnnnnnnnnnnnnnnnnnnnnnnnnnnnctgccagtaaaacacaagtataattagcccgttggtaattttttaaattatagtatttcttttccaggtgtccccttgagctcttgtcccttccctataatttttctcaccctatgtgctttaattcctcgtttttaaatgctggttcagattgctaggattggcgttccagctctgccatttgntgnttatatatgtacttgctatttcatcactctatgcctgtttttctctgtaaaattgaaataacaatagtgcantaagtgtgaattattaaaattatgattttttttcct

SEQ ID NO: 440962 - DNA, 1376 bp, Homo Sapiens
gtccaaaccctcagccaagattcttagatattaatactttctatcacggtggctttttttaccctataagacagaatcttttttccaacatattttcaattttacatttccagtatagcattaatacatttgtcatttattaaataatggcaaaccatagcatcataaagtattaagactgaagggctactaacctacctattcattttaaagatgaggaaacaaatgccagagacagtaataacttgtcaggagtttccagaattcaattctccttttttagattaataaattagaccagatttcttccccatggttactgtctgaggagattaactaatatgcgatacatgatgtcttgggttctttcatgtttaattcagtttgttgtgatttctaaaaatgtatctctttaaaacaattgctgctgtgcaacagtgtgatggcaagggaacagaaaacaacaaaaaaacttgattgaatacttcaatcaaagtgcttcttttttatgtgaggataaatcatactgaattaaggggaaatttaagaatattttttaagaaataacaatttcaggtaggcaattgtgaggaaaataacaatcatacaagccaaggccacgtgattcttccacaagccccagggtgagagatcgatgccctgctttaccaaatattcttcgccagtacatgttgcatagttacaaggattgtttcctgttgcattgagtcctgggcagaagttttgtcccaaaaattcattatgctgcaaagccgtaaatccatatcgtggaatgctgaagtactgaagccatgacagccaagatgcaatggttgtgagattgaccaacagacctgaaaaaatcatcataaacacaaaacagatggtcatgagaagtgttgctacagaaaccacactctgacctgctgctatggccagtgccatggaactggctgaataagccaccatcataagggtaaacatcataacgaagaaggcatctgcctttggcttcaatcctaacatgaagtacactatacaggtaaatataatacttggtaacatcctcatgggtaataaatcagataacagttttccaaggaaataagatgacactctgtagtatccgctgatgtattcatgtatgaagagcttcttctctaccacaaagagttccacggctgaaacactgctgaaacactggttggtcgtcaggaagaagagaaccccagctctgttctggattccagtagaatcattttttagcccaaagtaaatggcacctataaccagtcccagtacgactgtgacaatgatctgagctatagaggcctggggattacccagcaagtttttgaatgaacgcaaggaaaccc

SEQ ID NO: 440963 - DNA, 701 bp, Homo Sapiens
ttttttcttggatacagcactttaatgccagtgggcctttaggatagggaggagttgggagccaatctccatctccgtactcctaacccaacttccaccacgctggaggagacaccagggttccagctgtgagcctggtgcttgccttctgctacaagccccatcccgacctccttggagacttctagctcaagctctggaggaaatccaccagcaggtgctcagggaagccaaagtccatctgcagcagcaggaagccatctcgagtgataatctcagggttgatgatgtcgaagaggctcacgcctttgctgttcatgagggctgtaaacactacctcgagccgagacatgacctcagggatgcccacaggtgatcattgactgcaggaagctctggacggactcggagctgctctcagtcaagttggcaacagtctttggtgtcatctggtactccatgaggcttacgaagagctttttcttagaataggaggtctgcaccgcacccacgatttcctcttcaaatgtgtaccccacacaatgttgcccgtcctgcgcgtgccgagagtgattttatcactcactttacgaataagcccactcctccccctagattcggccggaatttctttgtcccctcccgtgggcatgcggccggtgcacttccggccctggttcggggcatgcctccggccaacc

SEQ ID NO: 440964 - DNA, 733 bp, Homo Sapiens
taatatatatatatacttttattattcacccgttaactccattatatgccaatcacgagctagttttcagcagttacattcccttgatcacggctgcatgaggatgtaattaactggaaaacacggagaccagagacacgaccggaggtgacgtcacgcagcccacgccatcgcaatacaattgtcaagttcgctggcggtttggtaaagccggttcagttctgctccctttgccagggattctcacgtgtgtgaaaattggaccaacagtggtggggttccatttcctggttcgaattttcagtggctttatccagaatcgcactggtgactggttattgtagcaccagtccaaccttctctgcccccatgctggggcatttccaattgtaaaggtaatactgcaggttgccgtcccctatgccaaacttgagcttctccaggaaggttttgttctccatgagatccagtgcattgaacacatcaaaccctttcattttggcgaggacaagggcgtcgctcatgaggtctagaagaggggtctgggtgtgaacgttgtagaaagaataagcagctttgagactcttgtgggttggatggttcatgatggtggagggcagcggataaaagctcaggaaatctgtcacctctccgtttgcgttctccaccacgaagggtcgatgatattctcctgggggtagaaccagtgcttcaccttcttctggcttatgac

SEQ ID NO: 440965 - DNA, 544 bp, Homo Sapiens
aatatataaataatatatatatatacttttattattcacccgttaactccattatatgccaatcacgagctagttttcagcagttacattcccttgatcacggctgcatgagcagttacattcccttgatcacggctgcatgaggatgtaattaactggaaaacacggagaccagagacacgaccggaggtgacgtcacgcagcccacgccatcgcaatacaattgtcaagttcgctggcggtttggtaaagccggttcagttctgctccctttgctagggattctcacgtgtgtgaaaattggaccaacagtggtggggttccatttcctggttcgaattttcagtggctttatctagaatcgcactggtgactggttattgtagcaccagtccaaccttctctgcccccatgctggggcatttccaattgtaaaggtaatactgcaggttgccgtcccctatgccaaacttgagcttcttcaggaagggtttgttctccatgagatcagtgcattgaacacatcaaaccctttcattttggg

SEQ ID NO: 440966 - DNA, 791 bp, Homo Sapiens
  misc_feature (515)..(557): n is a, c, g, or t
atgttttgttgaagaaaattaggtaaaatttttacaacttgtatttcaatgagagttcaaaaacaaagtattttaaggcagacgaaaaatttagaataatcgtttattcgcaggatattgtttttgagggctatttgaattattaactggaacttgatataagcaattaaatattggtggttttatctacgttattgtaaagagaatgacatttaaataatgtgtgtaatgtataatgtactattgacatgggcatcaacacttttattcttaagcatttcagggtaaatatattttataagtatctatttaatcttttgtagttaactgtactttttaagagctcaatttgaaaaatctgttactaaaaaaataaattgtatgtcgattgaattgtactggatacattttccatttttctaaagagaagtttgatatgagcagttagaagttggaataagcaatttctactatatattgcatttcttttatgttttacagttttccccattttnnnnnnnnnnnnnnnnnnnnnnnnnnnnnnnnnnnnnnnnnnnatctttgaaggaaaattctccttactgggatagtcaggtaaacagttggtcaagactttgtaaagaaattggtttctgtaaatcccattattgatatgtttatttttcatgaaaatttcaatgtagttggggtagattatatttaggaagcaaaagtaagaagcagcattttatgattcataatttcagtttactagactgaagttttaagtaacactttcagtttcgtcttct

SEQ ID NO: 440967 - DNA, 1151 bp, Homo Sapiens
  misc_feature (974)..(974): n is a, c, g, or t
  misc_feature (981)..(981): n is a, c, g, or t
  misc_feature (1018)..(1018): n is a, c, g, or t
  misc_feature (1023)..(1023): n is a, c, g, or t
  misc_feature (1067)..(1067): n is a, c, g, or t
  misc_feature (1084)..(1084): n is a, c, g, or t
  misc_feature (1086)..(1086): n is a, c, g, or t
  misc_feature (1106)..(1106): n is a, c, g, or t
  misc_feature (1118)..(1118): n is a, c, g, or t
  misc_feature (1130)..(1130): n is a, c, g, or t
  misc_feature (1132)..(1133): n is a, c, g, or t
  misc_feature (1138)..(1138): n is a, c, g, or t
  misc_feature (1145)..(1145): n is a, c, g, or t
tttggatgtaaaactgacttttattacaattaaaaaagaacaaagacaatttggtaagtgcctttaattacaacatacctgctatttacatgtaatcatacttttatatatagcttgaataagttttattacatgtaaactataagatattacaagttaaactccagtcttttctggatattcaattgaaatactactggcagaaacatacagaaaacaaatacccatttcagttcctcaggtaccattactggttgaatgatcaagatctggccacagaagagaagtggaaatatgcatcaaaacaaaacttattcttaacatgactaacagtattgttatttaaaccctaaacataattaataattggatcattaaaaacacaacttcaatttatatagcacctttcttccgaagagttgaaagcattcgtgcttatctctattatttcgtttgtccccataacatctctatgaggtaggcaatggttagtatcattatccccattttgtatatggagaaactgaggcacagagacagttaaatcatttgctcgaggtcacatagtaacagtcattgctggaacagggaccacagccctgtgctcttgtttccaaaacccatgtttccctttacactaaattgtcccacttgagaatttaattcaataactctacacttttccaataaataaaaaagtgcatttttttcacccataaaaatttttgaaatactatgagcaagatacaaacattctgggatggatggtagatggatgctacactcttctagaaagtgcttatggaaatgtttattttaatatgaggagtttcttttcctagttaaaacaaagtagatgtctttacaagaaatatattttgaaaaaatgcttctagtcacctactcaattatagctctagtagccatattatattatctacaaccaggtttattctgagtttaaaagaagaaanatctaantattagttaatcttgagataattttctcattacacantttantcagagatcagagtggcggatagggaatgggccaaacattctcnggggacagagactgagnanacagggcgcaatctgatttngacacacccgcncctcgcccacangnnactancggtgtnccgagc

SEQ ID NO: 440968 - DNA, 867 bp, Homo Sapiens
  misc_feature (395)..(411): n is a, c, g, or t
  misc_feature (771)..(771): n is a, c, g, or t
ttttttttgatatttaaaaaatcattttacttattaaaactttctcatttcccaaggcacttcagtagctttcacaaaaacatgtttgttcttttttaaccaggtgaggcatatgctttaggagtaccatggtaacataatcagcaaagagaagacaattacactgaacacaaaatatcacccaataaagttacaggactaaagtgagctactctgaaagactatgaacacaatttaaatttcttttttgtaatatcctcccatgactaagtatcaagaaaggaacacacacaatgacactgtttttggcacttagagaagtgctagaggctagggctggtaaggccttgcaccagtggcagctgcagacaattgccagagtgattctgtgtttnnnnnnnnnnnnnnnnnggcacaaaccaggaggctaaggaaccagcctttcccaagtgcattctgaagggcaaataacaaggagaaaaggatacaacaccaaacaaataaacagtaaaacaaaacccacattacagctttgagagaaaagacaacgttgctcatctctctcacctgataaatttcctttaaaccatacataagacgctatagtagcaaggaggtttccacagcagtggaaaacaagaatagtagattcaatggagcatttattatgagcctgcacaagcccagtgctttgatcagatgtaaacaagtctactcagtcgtcatgctgagtgggcttaagagctcacacatcagtgcactttggctggngatctggatttgctcattctgccccatattaattaccttccactttcccttagtctgggttctcctggcctggggaagcaatgatccagttaatgt

SEQ ID NO: 440969 - DNA, 1251 bp, Homo Sapiens
  misc_feature (8)..(8): n is a, c, g, or t
  misc_feature (23)..(23): n is a, c, g, or t
  misc_feature (29)..(29): n is a, c, g, or t
  misc_feature (31)..(31): n is a, c, g, or t
  misc_feature (34)..(34): n is a, c, g, or t
  misc_feature (41)..(41): n is a, c, g, or t
  misc_feature (50)..(50): n is a, c, g, or t
  misc_feature (65)..(65): n is a, c, g, or t
  misc_feature (68)..(68): n is a, c, g, or t
  misc_feature (80)..(80): n is a, c, g, or t
  misc_feature (103)..(103): n is a, c, g, or t
  misc_feature (207)..(207): n is a, c, g, or t
cacggctnattcttatcttcttnggaggncnagntgaaatntcgatgaanggcactcccataganaancagtacaacgtnccccagtgcccatacatccaagnccttcccactgagctctgccggaatcagaaatgcctcggggccatgaatgctgggttcccgccgtgctggacagctgagcgtcgttccccctcaaacttggttntgacgccaaagtcggcgatcttcacgtgcccatcatcccccaggagcaggttggatggcttgatgtccctgtggacgatcttctggccagtgcaagtactcgaggcccaaggatgacgtcccgcaggtagaggcgagcttgctcctccgagaagggccttgtcacagggcacttccatgacggggcccctttctcaggaggtcaaacaccaaatagaggttgtcctcagctgggtcatccaggacctcgatcagtttgaccacattcacgtggtccagcttcttcaggatggcaatctcctggtacacccgctccaggggcagcagctgcttggctggtcctccctgggcagcctgggaccctctcgggggagggcgacgtggaaagccatactgcttcagtaacttctttttggaaaggactttcattgcatagtgtctgtcttcactttcgttgtaggccagcctcaccacaccgtaggcacccttgccaatctcactctgcagcttgtactggttcagctgcacgcagtcctctgcatctgagatggccacgtggtgggactcgatggtgggcctccgccaggcccggggggagatgtggctggcaggccccgtggcataaggcccagcctgcgcctccagatagcttcctgctggccgctcctgtagggaaagcttcctggctgagaggctaggccgggctgggagcagtcttgaagtactgccagggatcacagaggcagctctggcccgtggtggggggtccacaccgtttctagtaggctctgggccaccatctgcctcctccaagtgagtcacatcgatggctgccacccgttctaccagctctgcccgaggatcctggcagcagacagctggacccccctccattgcttcagtcaagggggttcttctgcgtagccttgttgggaacctgggcgccgggcgacagtgtccgcggcccggcgggcggccccactcgctcctgctgcgcgccccgccccgccccgccccgatcccgggaattccggaccggtccagc

SEQ ID NO: 440970 - DNA, 1245 bp, Homo Sapiens
  misc_feature (144)..(144): n is a, c, g, or t
  misc_feature (1159)..(1195): n is a, c, g, or t
catcatttccactgtgatagtttcggatcccttgaagtaagtagagtcttagaaaacagtaccttctcgtttcccacgattttccttttatgtggaccagtctctgatgattttctccgtaacaatttttaaagcatttctggnccaagtttaattgttttttctgcatcatcaaggcattccagctgttccaggcggaagtaacaccacactatatccagctggaggacggcatagttatccactgtgtccagcagctctctgcaacactcacagaaatatttgtcagcgtccaacagacatggcaaggctattccatattcttttcttttcaggaaagctctgcccttctcatgatatcccatagctaacataagggcttttctttctgatgggggaattctgattgatctgcctgtctggttagctatgtctaagtacggtgtcatttctggatccaccactgtctctgctgctctctttgccagtatttctagtcctctcttggtcctctgaatttgtttttctttgagtttggcctcattttgctcctcttcctctaactggaagtttttcctcgcgtcctcttcagattgttttagttcaagcaccatcgctttcacattgtgagccacgccttgttcttcaagggttttccctagttgtagttgcttcttatttatgacaattttgatataattttcttgaagtccaaaggtttcagctattttggacctcagttctctgccagtgatgtgcaatcgggtctccaacaagtttttcctatctttttttagtcttggtggtaaaaacacctcgattgtagcaattcccgttgttctataattgtcatttcctgttccacgctcaattgccttgcaacgtatttcttctattaccttttctacttcattttcacagcattctagtctgtcagagtactgcttagcaaggtcctttaatgccaaaccaacttttttattttcatctgtatatggaggtttccaaagttgaatcctgtcttcccttaaaaactgggtcaattttgcttgaagatatttcttttgtgccatccctgcgccacgccactcccgccgcgaccagcagagtgcccggatccgctctcgacgaattcgagctcggccgatttggcctgatnnnnnnnnnnnnnnnnnnnnnnnnnnnnnnnnnnnnncgccgccaccgcgtgagctccagttcgccctatagtgatctatacattcg

SEQ ID NO: 440971 - DNA, 1075 bp, Homo Sapiens
  misc_feature (989)..(1025): n is a, c, g, or t
gtcatcgttcgtgttggacttcgttgtgatgcccccccgcctgttatctgagatttccgctgctgcctcaaattcttgccagtaatagccttcttcgggatacccctatggaggcaaactgatacctttgaagggtttgcaccccccacccgaacgcagcattctccccagacctgggcctcccctgccgctattacctctcatatagataaggcccaggatcatcattaacagacccaatctgggggccatctcctcccagatcctcctcctcctccctcctccagaggttttagtttgttgatcaggatgtaagtgtggtgcttgcggtcaaactgtttcagctcaaaaccaaagacataccgcagatgctctgcggcccttgcgatgatgtccgggaacagaatcttcaagtctccaataacgtatttcaccatctccgagcgtgtgatgggactcttcttcttgtctttcaccaggaggaactgcaccaactccgccaccgtccgattcagccggcggtaggccctgcgccttgccaaggctttggccgccaaggccctcgcgcctttccgggtgagggcgggctccgcagccccctcctccctcccggcgccaagctcctccttggggcgctcctgcgaggcggtcggggcccgggtctcaccatcatggccgccatccttctccccctcggcctgcgggaccgggagccccctgctctctggtgtctgcaacatgttttcgggcaggcaggtgcagagcgcgtacacgggccgaggggtgtgggagccgccgcgcaagccccgggggaggggttggacagcggcagtgacggcgggagtacaaggagcaatggcagcgggagctttgtggctgctgggccgcaccgcacgggagtcaaacctgcggccgcaacgccgccagcagccggaacctgcggcccgcccgctctcgacgaattcgagctcggccgatttggcctgatnnnnnnnnnnnnnnnnnnnnnnnnnnnnnnnnnnnnncgccgccaccgcgtgagctccaggtcgccctatagtgatctatcatttcg

SEQ ID NO: 440972 - DNA, 1617 bp, Homo Sapiens
  misc_feature (974)..(1008): n is a, c, g, or t
ttttgctccacaaatgtttaatttattaagtgtgccagggtatactgctaactcattgcattttaatttttctctagatactcaaatagctaagcaaatgaaggtacatgccagtctttcttcttttatacacaacagacaaaagtgttggggggctagacaccaaccagctatttttttcccctggaaccagatcatcatactgctgagttccttcaaaccatcaaagtacagccttccttccaatgttgcataatctgttcaaaatcacagtataaatacaaagttcttccatccattttacaaaaccagcaaaactctacaataaaatcctacaggaaaaagtagaccaatctcatttacaaacagcattttaacagtaattattaaatgttacaaaacataagatacaaaatctaaatccttaaagtcacacgatttctacagaaataagaccctcgccccacccatattacttatgactcaggacagtagttcgtcctcacggggacccactggccaacttttcaccaaccctcaccagaggtggatgccggccctagcactggccctggccctcatactggcttcagctctggccttggctctggccctgtcggcctcgtctgctagggcctcacggtactgcactggccagtgctgcggttccttcttatgcagtttggccacgaaccccaggacttccatcttgctgatttccaggttgcttcggggaccccaagagaattcatattctggtggattggtgtgaggcacccgcctgtaactgagatatcgctgctgcacaaatcttccataataagcctcttcggatacccaaagaggaaatgatactttgagggttgcacccccaaccgacgcagcatctcccagacctgggcctccctggcgctattacctctcatatagataaggcccaggatcatcattaacagacccaatctggggccatnnnnnnnnnnnnnnnnnnnnnnnnnnnnnnnnnnnagaggttttagtttgttgatcaggatgtaagtgtggtgcttgcggtcaaactgtttcagctcaaaaccaaagacataccgcagatgctctgcggcccttgcgatgatgtccgggaacagaatcttcaagtctccaataacgtatttcaccatctccgagcgtgtgatgggactcttcttcttgtctttcaccaggaggaactgcaccaactccgccaccgtccgattcagccggcggtaggccctgcgccttgccaaggatttggccgccaaggccctcgcgcctttccgggtgagggcgggctccgcagccccctcctccctcccggcgccaagctcctccttggggcgctcctgcgaggcggtcggggcccgggtctcaccatcatggccgccatccttctccccctcggcctgcgggaccgggagccccctgctctctggtgtctgcaacatgttttcgggcaggcaggtgcagagcgcgtacacgggccgaggggtgtgggagccgccgcgcaagccccgggggaggggttggacagcggcagtgacggcgggagtacagggagcccgctctcgacgaattcgagctcggccgatttggcctgat

SEQ ID NO: 440973 - DNA, 1022 bp, Homo Sapiens
  misc_feature (4)..(4): n is a, c, g, or t
  misc_feature (23)..(24): n is a, c, g, or t
  misc_feature (27)..(27): n is a, c, g, or t
  misc_feature (30)..(30): n is a, c, g, or t
  misc_feature (41)..(41): n is a, c, g, or t
  misc_feature (44)..(44): n is a, c, g, or t
  misc_feature (57)..(59): n is a, c, g, or t
  misc_feature (65)..(65): n is a, c, g, or t
  misc_feature (74)..(74): n is a, c, g, or t
  misc_feature (102)..(102): n is a, c, g, or t
  misc_feature (115)..(115): n is a, c, g, or t
  misc_feature (747)..(747): n is a, c, g, or t
  misc_feature (875)..(875): n is a, c, g, or t
aaangtcaccagaagacaggganngcnctnagccaagaganccnctagtctaagatnnngattcncacctggtntctggtttagcctgattgcaattgacanactctggcttagnaaatgtaatccctaataagacagggatgatattgatgtagaacttgacataagatctctattttcttgaaaagagcacaaggtttgttttaagtcctgaagtagctcaatctcttccttcaactgctgccacctttgttgagatgcatgaatttttttctctattgctgcttgaaaatttacaaatgtgtcttcgaacaatctacagtcaaaaagtgcactcccgatttcttcatagtctgattctgaagtagtctcatccatgagtttttctggaattgaatgaactttgtctaatatttcttcaagtaagtaattaagaagtcctgcttccttgcatttcttaagaaaaggaactttcacagttgcatctgtgtgtctgccatgctcttctttcacttgtcttatgaatgtattacatttcattgtttcgggtggctgtacatgattgcctgagaggggtttcttccttcctctttttcttttcactcctgaaaatttagcactttgagcgatgatcgggaattgagcatgttgctggcaaagcagtttataaattcctcgaactccatcagactgtggaactgcgtcgtccttcttggcacagaaaaagtggtaattcttgttacagtnttttaaatcacatcccacggtggctcctcttttatgacaaaatttgcatttcaacttccttcctctctggatttctttctttactgattccacatcaaaacttctatcaggattaagtggatcctgancctcacattccacaagtcctgaagaatacagcggtgggaaggaggagcgcctcctgcgcgggccgggcctccgggctgctggcgccgagcaccctctcgggccggggcggcgacgcctgggccatgactgtgctgcagctgcgggtg

SEQ ID NO: 440974 - DNA, 920 bp, Homo Sapiens
tttgaaaatttacaaaaatgtgtcttcgaaacatctacaggtcaaaaaagtgcactccccgatttctcaatagtctgattctgaagtagtctcatccatgagtttttctggaaattgaaatgaactttgtctaatatttctttcaagtaagtaattaagaagtccctgcttccttgcatttcttaagaaaaggaactttcacagttgcatctgtgtgtctgccatgctcttctttcacttgtcttatgaatgtattacatttcattgtttcgggtggctgtacatgattgcctgagaggggtttcttccttcctctttttcttttcactcctgaaaaatttagcactttgagcgatgatcgggaattgagcatgttgctggcaaagcagtttataaattcctcgaactccatcagactgtggaactgcgtcgtccttcttggcacagaaaaagtggtaattcttgttacagttttttaaatcacatcccacggtggctcctcttttatgacaaaatttgcatttcaacttccttcctctctggatttctttctttactgattccacatcaaaacttctatcaggattaagtggatcctgatcctcacattccacaagtcctgaagaatacagcaaacaattctcatgagcagctatattctctgattgtgcaaagtacaggacattatattcgacatctttggggcagagtgcacatgtccttttttccatcttttctgcaacctgaaagacaccggtgggaaggaggagcgcctcctgcgcgggccgggcctccgggctgctggcgccgagcaccctctcgggccggggcggcgacgcctgggccatgactgtgctgcagctgcgggtggcggccggatagcgagatcccggatcccgggaatccggaccggtccagcc

SEQ ID NO: 440975 - DNA, 469 bp, Homo Sapiens
  misc_feature (368)..(368): n is a, c, g, or t
  misc_feature (426)..(426): n is a, c, g, or t
  misc_feature (432)..(432): n is a, c, g, or t
agtataatccaaatttattatatctaagaggctatcatgggctgtaagtagaatcaaaggttaagaacattttatgcacttattccacaaacatttactgagcatactaggtgctgggaatgtgacagtgagcaaaaaacacaagagtgtgcaaagagtgatcaaaatgtcaaccagtaagaacagggaagagctgctgaggccaagaggagacgactagttctaaagatgtgtggatttcacagcctggtctctggttttgagcctgattgcaatttgacatgactcttggcttaggaaacggtaatccctaataagacagggatgatattgatgtaagaacttgacataagatctctatttttctncgaaaaggagcaccagggtttggtttttaagtcctggaaagtaagctcaatgctcttncctttnaactggctggccacctttggttggagatgccatgaat

SEQ ID NO: 440976 - DNA, 1082 bp, Homo Sapiens
ccgcgtctccatggcgacggcctttttccctgcgaggaccccggcggcagggctgccccgcggcgcctgcttggcgcgacgctctagcggttaccgctgcgggctggctgggcgtagtggggctgcgcggctgccacggagctagaggggttaaaaactaatatttatatgacagaagaaaaagatgtcattccgtaaagtaaacatcatcatcttggtcctggctgttgctctcttcttactggttttgcaccataacttcctcagcttgagcagtttgttaaggaatgaggttacagattcaggaattgtagggcctcaacctatagactttgtcccaaatgctctccgacatgcagtagatgggagacaagaggagattcctgtggtcatcgctgcatctgaagacaggcttgggggggccattgcagctataaacagcattcagcacaacactcgctccaatgtgattttctacattgttactctcaacaatacagcagaccatctccggtcctggctcaacagtgattccctgaaaagcatcagatacaaaattgtcaattttgaccctaaacttttgggaggaaaagtaaaggaggatcctgaccagggggaatccatgaaacctttaacctttgcaaggttctacttgccaattctggttcccagcgcaaagaaggccatatacatggatgatgatgtaattgtgcaaggtgatattcttgccctttacaatacagcactgaagccaggacatgcagctgcattttcagaagattgtgattcagcctctactaaagttgtcatccgtggagcaggaaaccagtacaattacattggctatcttgactataaaaaggaaagaattcgtaagctttccatgaaagccagcacttgctcatttaatccctggaagtttttggtggcaaacctgacgggatgggaaacgacggaatataacctaaccaactggaaaaaaatggaatgaaaactcaatggtaaaaagaaggggactggtataaacagaaacccctgggcttggaaggcattcacaaacaccctcccttctggccttaata

SEQ ID NO: 440977 - DNA, 448 bp, Homo Sapiens
  misc_feature (12)..(12): n is a, c, g, or t
aacaatgtaganaatcacattggagcgagtgttgtgctgaatgctgtttatagctgcaatggcccccccaagcctgtcttcagatgcagcgatgaccacaggaatctcctcttgtctcccatctactgcatgtcggagagcatttgggacaaagtctataggttgaggccctacaattcctgaatctgtaacctcattccttaacaaactgctcaagctgaggaagttatggtgcaaaaccagtaagaagagagcaacagccaggaccaagatgatgatgtttactttacggaatgacatctttttcttctgtcatataaatattagtttttaaccactttgaagtgatcggaaagtgatgtgacgctccggggatcccaccaggctcagagacacccctggttagggctccgacaagtcgttcccctcaaaggctcgccgcggccgc

SEQ ID NO: 440978 - DNA, 932 bp, Homo Sapiens
  misc_feature (42)..(78): n is a, c, g, or t
ggatagactatatagggccctggattaccgcggtggcggcgnnnnnnnnnnnnnnnnnnnnnnnnnnnnnnnnnnnnnatcaggccaaatcggccgagctcgaattcgtcgagagcggggcggttaccgctgcgggctggctgggcgtagtggggctgcgcggctgccacggagctagagggcaagtgtgctcggcccagcgtgcagggaacgcgggcggccagacaacgggctgggctccggggcctgcggcgcgggcgctgagctggcagggcgggtcggggcgcgggctgcatccgcatctcctccatcgcctgcagtaagggcggccgcggcgagcctttgaggggaacgacttgtcggagccctaaccaggggtatctctgagcctggtgggatccccggagcgtcacatcactttccgatcacttcaaagtacagcagaccgaggacacggttgttaccaagaccaggctgttgccttggaagagcccagagcgtgtcaagggagacagccacatcacgccagaaatacatgacagctggattagccctgggagagggaggcccagatgtgggagctcaggggaggtgcagctcaacgtggagtttggaggaggctaccttgacctttgaatgccaagtgggagccagccagatgaaaggggttaaaaactaatatttatatgacagaagaaaaagatgtcattccgtaaagtaaacatcatcatcttggtcctggctgttgctctcttcttactggttttgcaccataacttcctcagcttgagcagtttgttaaggaatgaggttacagattcaggaattgtagggcctcaacctatagactttgtcccaaatgctctccgacatgcagtagatgggagacaagaggagattcctgtggtcatcgctgcatctgaagacaggct

SEQ ID NO: 440979 - DNA, 477 bp, Homo Sapiens
gtcatcgctgttgcctgtgtgcaagtcaattgcttaccagacaccccgtcttcctacaatatagtataatgggaagaggttgcaaattcagggaactcttttgctgcaatttacactccccaatcatttcatcccaaaacttaagcctgcttttctgtagacttcttcatggacttgacagcctaattgttcttgaacatctggtttattatgtcaacatctaggttcctattctaacttggaatttcaaatatttattttctaatctgaagaagtcagtttatttaacagctcttctctctactggctataaaattgtatctattttgtttgaagcagtaagtacatatatcctatttgtgtttttagtacaattacattggctatcttgactataaaaagggaaagaattcgtaagctttccatgaaagccagcactttgctcattttaatcctgggaggtttttgttggcaaac

SEQ ID NO: 440980 - DNA, 1312 bp, Homo Sapiens
  misc_feature (348)..(348): n is a, c, g, or t
caggcagcacccatattttccaaggtgttacagtcaggttactttatccaaaatagcatcttgagctttattgttgactgtggttaaaatttgatagcccattccatcccttcaggctgctgaatttgtctttatgttcttcaggcacccgagcagtgatagcgtggcccagactcctgaattgctacggcgataccccttggaggatcacactgagtttcccctgcccccagatgtagtgttcttctgccagcccgagggctgcctgagcgtgcggcagcggcgcatgagccttcgggatgatacctcttttgtcttcaccctcactgacaatgacactggagtcangcgatatggcatctgtgttaacttctaccgctccttccaaaagcgaatctctaaggagaagggggaaggtggggcagggctcccgtgggaaggaaggaacccatgccacctgtgcctcagaagagggtggcactgagagctcagagagtggctcatccctgcagcctctcagtgctgactctacccctgatgtgaaccagtctcctcggggcaaacgccgggccaaggcggggagccgctcccgcaacagtactctcacgtccctgtgcgtgctcagccactaccctattcttctccaccttccgagagtgtttgtatactctcaagcgcctggtggactgcatgatagtgagcgccttctgggcaagaaactgggcatccctcgaggcgtacaaagggacaccatgtggcggatctttactggatcgctgctggtagaggagaagtcaagtgcccttctgcatgaccttcgagagattgaggcctggatctatcgattgctgagctccccagtaccacgtctctgggcagaaagcgagtacacactcgaggtctaccccaagagctcagcagctctgacctttgctcttccagacccatctcgattcaaccctaggtggattcccaatgaacctttcctatggaacttctaggtgtggaccagcctggctccagggtgctacacctgatactgtatagaagaccacgtggatgagtagggtcccgagaatacaatggatatccatgtctgtgaatggattcgtggaatgatctaaccaacggagtatatgtaccgataccgagccaccactgcgtgattagcgacaagcgatgagagccaagcccgcaaaaaggaggtcagacaagaatcactcaaatggacacagcgatgagtggacaggacagacaacgggctaccaaccagagggacacgcacacaaagagcaaaaccgcacaaccgcaa

SEQ ID NO: 440981 - DNA, 1680 bp, Homo Sapiens
  misc_feature (184)..(230): n is a, c, g, or t
  misc_feature (586)..(637): n is a, c, g, or t
  misc_feature (1600)..(1600): n is a, c, g, or t
  misc_feature (1658)..(1658): n is a, c, g, or t
tggcagaacccaactgttttctttctgttatcaaagctggtagttttgaaatagcaccaataataacccagggaaatgtcatgtaatttttattttccattatgacaggtgtctaatgcatgtcagcacgaaagtgtcatcactgctgtgtcatccctcttggttttcactatgcatctataannnnnnnnnnnnnnnnnnnnnnnnnnnnnnnnnnnnnnnnnnnnnnnaaactggaaaaactagccattttgagagaaggaaggttctaggctatgagcatgaaggtccttgtgcctcttgggaaaatacctgaaatcctataatgaagacttttgatgcttcttgctttcaaaaagctgtgcttggtttggagtagacacctgttcagaaactaatgcaagtgtggagtctacatacgtgggctcatagtataatttgtggccagctacatttttccagtttaaataaactcactaaccattaatttttgaatatcttttgttgagatagttggacaaatgattttgctcttttggagagtgaagtccatgacatctaattttactgtcatccaaaatgtgtnnnnnnnnnnnnnnnnnnnnnnnnnnnnnnnnnnnnnnnnnnnnnnnnnnnngttagtgtgacagcgtacagaagagtactatgtttttgcctccatgtttgtttgaatctttacctgacattgccgcttttgttaggtctgggcaatttgtgcttcagtgtttttgaaacaatggcttgataccatttctaaatgtatgtattataaaaaactaattatgtttagttggtcattacctacagagtgccatagtccacatgaacctcatatttgtactgcccattcttttgtgcaggttcataatatccataaagtatctagttaaaccttaagaattcaaatgaaagcaaaagtctaaaaccggttctacttctcattagccaggatttaataatcccaacgttgaatgttctttgtaacaaccaatttttttctatctttcttctttaattattttaatgtagttgatttttctggaactcagttaaaatgaatggaaagaaaacttcaggatatcatttaatgactattaagtattattggtaaaaacgtgaagataagacttttagatcacagcttcaaattttatggaaaattaagcaagcaatacctagccaatagttctgcttaactttttggttaagtattttgttgggattcctataaataatttttcacacaaagttttaaatttctggtgtactttgactctcaactgagagtggatagagtttttcttttgaggattacatcttaaaatgtccatcgcctggctggttataagcatttgtcaccttttgaaggtaaaatatactctggcccttcttgactcagttacaggtcattttaggtccagtaataagagtcaggtgtttggttattgctttcagagtcagacattgtttaggtttatttaaaaactattagcaggttttcactgacaatgcttttttaaaataaaaaatgtaaatccacttttttaagggcagatggtcattatgcatatacagcttngactataggtttgggtccatataggaacccattcacaaaaaactctggttacagaaanagggaaatccctcttgagaaag

SEQ ID NO: 440982 - DNA, 1654 bp, Homo Sapiens
  misc_feature (9)..(9): n is a, c, g, or t
  misc_feature (11)..(11): n is a, c, g, or t
  misc_feature (18)..(18): n is a, c, g, or t
  misc_feature (48)..(56): n is a, c, g, or t
  misc_feature (134)..(134): n is a, c, g, or t
  misc_feature (178)..(178): n is a, c, g, or t
  misc_feature (243)..(243): n is a, c, g, or t
  misc_feature (259)..(259): n is a, c, g, or t
  misc_feature (293)..(293): n is a, c, g, or t
  misc_feature (297)..(297): n is a, c, g, or t
  misc_feature (305)..(305): n is a, c, g, or t
  misc_feature (357)..(357): n is a, c, g, or t
  misc_feature (365)..(365): n is a, c, g, or t
  misc_feature (397)..(397): n is a, c, g, or t
  misc_feature (442)..(442): n is a, c, g, or t
  misc_feature (498)..(498): n is a, c, g, or t
  misc_feature (510)..(510): n is a, c, g, or t
  misc_feature (527)..(527): n is a, c, g, or t
  misc_feature (619)..(619): n is a, c, g, or t
  misc_feature (622)..(622): n is a, c, g, or t
  misc_feature (626)..(626): n is a, c, g, or t
  misc_feature (720)..(720): n is a, c, g, or t
  misc_feature (763)..(763): n is a, c, g, or t
  misc_feature (775)..(775): n is a, c, g, or t
  misc_feature (850)..(850): n is a, c, g, or t
  misc_feature (1436)..(1436): n is a, c, g, or t
  misc_feature (1637)..(1637): n is a, c, g, or t
tcccgggangncgcaaanccgccatttatacgggggtgtgtatcttgnnnnnnnnncggtaaggacggagccgacggctcggcgatcgggtcggttccggcatcgacgtatcgtttggtcgccccagagagganacaggtttcttcagcttgccgctgaggatgtggcatcggctgcnctcaccgccgccgcctctgtgaaactgcgggagttagggacagcggaccagggctagatgggtgngacgcgaatctcgccnaaaacttaccctgtagcggggcgcacttgagagncganctctgggncgtggcgaattttgcagcctaaggtcttggcaagcgcattgctgtgggctgncggagagnaggctggagttcgagaccgcccaccggagagnaggcgagagttcgaggcctaggtacagcgcatttcgctaggcatncccaagaatatccgcgtgatccttttggccagagtttttttaactaatatccccancccaaacagtanaacacatcacatgtcgnccacctgggagcgttgaacctggtagttactaggcgcccctggtggaaataaaactcattatgccctagttatgtcttagtgcctgggtgangangatntagcggttaaagattaactgagcgcacttagaggttgtctttgtctacctaaggaaaatatcaatagattaaacccccaaccttaaagaatctncgtgaatttttctgaggaaacgtgcaatattgtcatacaaaangccccaaatatncaaacattgctttttgttaaaagtttgttttgttttgcagtgacatctgtttgagcagatgaatatgccattggngaaagtcaaggactgtcggagaggaggacatggcagaccttaactaaagtgagggggacagtagagcactaaaagttctaggaaaggagatgaactgcttattccatcagatgaaaatatagtcagaacagatgagtagtagaacttaaacatgcccggagttgccaggaatttgcaaaagccttgatataattcctgttgctgtagaaagactttctacagtcactaatatatcaagttatgttcactagaaaaaaagtttacttagtttatagaaatgggctgaaaaatcctaattacttatctgtgaggttattttcatgaaggttaatcatccagaaactattagagagcctcggaatatatttcttctaatctgctctacctatcccattcaaaggagggaatctgaagatttaaggacaaagagcagttgaaaactcagagctgtggttaatgggagaatttcaaggatggtgaaaaaaactaacatcattgcatccctgttttttgtattctggactttttagtttagctcttggtaaactacatcagaaattctttatgctaactctaacacacattntggggtattgctaatttaatctttgaatactgtttttgctgtttcatgattatatgttatgtcctaccagctagattgccaactcttgactactgactggaaagttattgtttattcagcaaataaggaattaagtcagtgaagtgagagatttcgtgtgtaaggattgttaacttgaacatttcaccagttacacacagntcagccctacttaaatt

SEQ ID NO: 440983 - DNA, 788 bp, Homo Sapiens
atattactgatattaaacattgattgaacaagatgaaaatatggagaaccttagtacatttcttatctttttgtttaaaatgtaagcataaaaaattctaactgtaagagatatcagttaaaggagggatcttaagttaacagattattgactgtgtgtaattacatgtacaagtagagttactatttatattgaccaaataaactaggtaagattaataggcacagaggtataatcttaccatggatgagctttaaacattaatatgaaattgtacagttttgttaaataaaaccagatatttgtttagagtttaaaatatatattattccttaatagactgtgtagctattttagagactgtttcaatgacatgcttctaaattagaataattttaaaaatcaaatttatcataagtgatcatattattaaacatttactatagctgcaggagatgcaaagatgaataaagtgcatttctcaggctacgatctagtagtggggataaggcaagtccccaaatacctgaaatatgaggtggcatatgttaagcatcaccagagaggcacaaagttctctggagagtgaattaaaggagaggtcacagctagattggatgggagatgaagaagtatttggaattgggggtaggaatgagtggaccaagagagtcttcacggtagagtagtattttaacttgacttgaagggtaggctgatttttaccaggcagagatgagggagtacattctaggcaacaagaagaggaaaggcaagctctgggcatg

SEQ ID NO: 440984 - DNA, 1624 bp, Homo Sapiens
  misc_feature (102)..(102): n is a, c, g, or t
  misc_feature (135)..(135): n is a, c, g, or t
  misc_feature (153)..(154): n is a, c, g, or t
  misc_feature (171)..(171): n is a, c, g, or t
  misc_feature (192)..(194): n is a, c, g, or t
  misc_feature (196)..(197): n is a, c, g, or t
  misc_feature (205)..(205): n is a, c, g, or t
  misc_feature (216)..(216): n is a, c, g, or t
  misc_feature (238)..(239): n is a, c, g, or t
  misc_feature (246)..(246): n is a, c, g, or t
  misc_feature (249)..(249): n is a, c, g, or t
  misc_feature (255)..(255): n is a, c, g, or t
  misc_feature (260)..(260): n is a, c, g, or t
  misc_feature (263)..(263): n is a, c, g, or t
  misc_feature (269)..(269): n is a, c, g, or t
  misc_feature (276)..(277): n is a, c, g, or t
  misc_feature (280)..(280): n is a, c, g, or t
  misc_feature (293)..(293): n is a, c, g, or t
  misc_feature (298)..(298): n is a, c, g, or t
  misc_feature (300)..(300): n is a, c, g, or t
  misc_feature (312)..(312): n is a, c, g, or t
  misc_feature (315)..(333): n is a, c, g, or t
  misc_feature (337)..(337): n is a, c, g, or t
  misc_feature (349)..(349): n is a, c, g, or t
  misc_feature (355)..(355): n is a, c, g, or t
  misc_feature (398)..(399): n is a, c, g, or t
  misc_feature (403)..(404): n is a, c, g, or t
  misc_feature (411)..(412): n is a, c, g, or t
  misc_feature (414)..(414): n is a, c, g, or t
  misc_feature (418)..(418): n is a, c, g, or t
  misc_feature (420)..(420): n is a, c, g, or t
  misc_feature (422)..(422): n is a, c, g, or t
  misc_feature (424)..(424): n is a, c, g, or t
  misc_feature (426)..(523): n is a, c, g, or t
  misc_feature (528)..(528): n is a, c, g, or t
  misc_feature (535)..(535): n is a, c, g, or t
  misc_feature (541)..(541): n is a, c, g, or t
  misc_feature (546)..(546): n is a, c, g, or t
  misc_feature (549)..(549): n is a, c, g, or t
  misc_feature (554)..(554): n is a, c, g, or t
  misc_feature (563)..(563): n is a, c, g, or t
  misc_feature (566)..(567): n is a, c, g, or t
  misc_feature (569)..(569): n is a, c, g, or t
  misc_feature (580)..(580): n is a, c, g, or t
  misc_feature (584)..(584): n is a, c, g, or t
  misc_feature (876)..(903): n is a, c, g, or t
  misc_feature (1295)..(1295): n is a, c, g, or t
  misc_feature (1403)..(1403): n is a, c, g, or t
tatattttatatgattttttatatttgtattaacatatggatagctttaaaattcacacaagaacaaaatgactataaaaatactcagaaatacagaatttnattggatatgattgcttattcaaataggtgatnatgtgaagatttaaattnnctatgattatttttaanaaaacagttattaatatattnnntnnctaagttnttgcttttttnttttactggttaatttataaannaatgganatntttacnatgtngtntctgtnttataannttnacaaaggcaacanatttngnacagttagtttntgnnnnnnnnnnnnnnnnnnnaatncaaactttattnacttantattcttctttcttttattttttggctcatgttccataatttnngggnntcttttnngntttntntngngnnnnnnnnnnnnnnnnnnnnnnnnnnnnnnnnnnnnnnnnnnnnnnnnnnnnnnnnnnnnnnnnnnnnnnnnnnnnnnnnnnnnnnnnnnnnnnnnnnttgtnctctttntacagngttcnttnttttnggtgtgttnttnntncagggctcttntttnttattatatggaatattggagtattataaagttgatgattactactcattcttaggaaccaagagcattatgagatttagttttattaacttcacattcattgaaagtgaaatcaaatactgtacttttagtaatgtccaaaacttcataactttctctccccttatataagtttagtaaagatgtattattttatatggactgaaatatctacagaaccttctcaaatggaatctgaaatttcattttaaaagactgtttttccacaacatgcatttaatttaaaagtggnnnnnnnnnnnnnnnnnnnnnnnnnnnntgacaattggagagctgttggtctaacatgagaacatgattcaggaccagcattaagcagtgcatgaccattagctgcagagtaactgtacaggagtggaatttcatatacaatgattcaccatgtggcattccacaagtatgtatagaatatgtttatttggaaaacatctgttgtcagtgggagacaaacttagtatatttctgataaaggtttatattgaaaaatcccacaaaactgttacaaagtttttctaaagcatttcgtacaagcctagtatttgatcattaggtcacaacttgaattttaagcaaatactacttaactctgcattatgtctgattgtccttaacaagttgtaaataggtttctatatatttttcaaatgactntaagttttagttacatataaattgttaagtattaaatttatcatattaaatcaaggaaatgcataaatacaattattaaaaaatgctttcaaactaactttttgattngcgtcttttgaaataagtcactaatgcttagctataaaaactaaaaagaagtaagacttccctttcaaaatttctctgaatgaaattatcaagcatcttcccggtcactaaagtaggaacaaccaaactaggtaaatttgactttatttctttgaggaaagctattgttctaataaactgaacatcagaatcacgttacaaattgtctacgtacaggaggg

SEQ ID NO: 440985 - DNA, 2281 bp, Homo Sapiens
  misc_feature (480)..(482): n is a, c, g, or t
  misc_feature (486)..(486): n is a, c, g, or t
  misc_feature (492)..(581): n is a, c, g, or t
  misc_feature (787)..(821): n is a, c, g, or t
gtgatgtaacagagggctttactgaaaaggttgacaaatgaaaagagatctaaaacccaacaaatcttttagttaaaaggttacttggaaacagaatatagtataaccaagttataaaaatgcaaaaaacagcttataagaactttctttcgacaatgtcattgtttaagaatgtaactaaattacttttgaggtatttcataatacatgttgggtattttaaatagtaaaaagtaacatacatatgtgagttcagtaatggctcaaatattttctatttagtctgataaattaattggcacttaaaataactatactttattcataaaatatccaagataaagaatatgctatataaaataaccaaccatttaatagtaacatgcttacagtggctcaaagctgaatgtgacaaatgtactccaggaaaatgtatttaacattggacctagctatattctaatcctaaacttacttttnnngggngggcgnnnnnnnnnnnnnnnnnnnnnnnnnnnnnnnnnnnnnnnnnnnnnnnnnnnnnnnnnnnnnnnnnnnnnnnnnnnnnnnnnnnnnnnnnncaaaggtgaacaccaccacactcggattaaacttacttctatatgaaaaataaccagactaacttttaaggattagtggttccaccaattcaattttaagactactaacagaattttataatataaacgcctacgatacgacagcatacataagaaaaatattttttaaagttttagtaattcaaaccaaaacatgctgtaagttnnnnnnnnnnnnnnnnnnnnnnnnnnnnnnnnnnntacacttaacactagagtacctttctgaagaaaaaactttttatgacttcaatgacatgttatttttaagcagcagcggaagtcttaaacacctttacatgcttcgaaatactgttgatgatctgattttcaatactgtattgggtgccattaaagagaccattgttctttgaatcagtctctgtgttgctgtgggaaacacggtaaggcagaagcactagaatcatggaggcaaattactgaaacactgtgatactgaaatactgctggcttctggaataatcttctgacatgtggaattagacatctgaagtgtcgctccaatcagtcacagttactaagctgctttttaatgtgcttgattcattttcttgaagtccttctccctttggccccttaggattaaatgcgccccaggcatttagcacatgagcaaaatgtggttcatttttcgcaggtggaggttccttctgttctttcccagatttttttcccaaagatatctcttcctctagggatgatatgtcccagtcttcatcctccacatccgcacactttagttcttgtaattcttcttttttgataaacatctcagggacattagttccaccgactggtttgttcacatttttgcgatgtggaaacatcttttcaactttttcagtaggtgttttaacggcgatctctgcgggcttgggagaatcatcagtgtcctcgatttcgcttccctcggtcccgtccgcgtcacttttcactgtgttcttcccgaagctgcccttgttttgtggtggcggcacaggaagtgggcctggggatgcgtatgcccggatgaggtcgtcgtcctcctgctcctcctctgaactaaaaggaggggtcgtaatagttgaagactttctgggaaaaggatcttccatgacatttttcttaatttttggaacagatgtcctatcagtagaaacagctttttgtctaatcagttgtctgtttttggaaggaagttgtatcattttgggtacttctccagttgaaagggtatccatttgagaaacactgcactgatctgaagagagtagtgctttctcctcaattttacagctgacttgatgttcaaggaattctcgaatttgatgaaagttaggtatttctctttcttgcttatgtctttctgattccacactttttagtactctatgcaactgatcacttgaaatgccacgtatatctgcattaatccccaaggtttccagtttctccatcaagttctgctccaccattgttcttagtcccttagtgagggaggagttactcttcaaagctttccttaaatgcattttgttgttatttaatttctgttcattttcccttcctttttcttcctctgaaagttcttctattggttcccagtatgtgcgacgagaatgcctgttcatgcatcccgggaattccggaccggtaccagc

SEQ ID NO: 440986 - DNA, 760 bp, Homo Sapiens
tcagatagtcaacttttacttataatttattaaagaaataaagctagtttaaattttttctgaggaacctgtaactttcagaaaattactacaatgtacactgttgaaacttaacatatcattactttattgtgactcaagattattttcatctgtattaagtatttgcaaaatgcaacataggaatacttaataacactgtaataactctatcatctctccataatttatgcaaaaattttaagtttttcccccatcgtcacctaagacatttctaatcttttataattagttgactcactttcatatagtaccaattaacattagcctaatgaaactaagtcaaatatggtcaaaaataatcatcatgcatttacaaaacaatattatttgccagtcagagtcaacttttattgagcacctcctatattccagaaccaaaaacatgtttgttccttacaaaattctcaaagccaccctttaaggtaagtaatagtacgttctacttaacagatgaaaaaactaagaatcagactgatacaacttccctcaacatcataggcaggaaacataattatactgacctgcccaattttaagaaaaaacatctattttgttacattttggtggcaattacctacaaaaattcttttggctttttacacggttttccttaaaaaatcaatggggaaatataaaacccgtatatttttttaaatttaccacttaacccagtttaaccctctcctccttttttcct

SEQ ID NO: 440987 - DNA, 927 bp, Homo Sapiens
ctctggacgtatcccagctttgtctgccccccctccaagttgtgtgtctgtctctatgtgcctgtcccaggtgcgtagttgctcacaccagcgttagttatgaatgtatcaatgtgcagcccacttttcaatgcaattaaagtcccactgaagagcagttccttctgctgttctaaccagtgatgagtcgttctgcaattgacctggtcccccaacagggtactccctgcggcagaccacccacggttgttcaggaagattccgtagatgaagtactggcctcacatatgaagtcccacgctccatggttggttcggtatcaggtatgctttcacggaccatgggcccagcagtcgggcactttccactgatttattgtactgcctgtcctcagaagggactgttggcacttgtctgggggctgggctcaggctcgcagggcgctgggggcgctctccagcatgtctcggaagtgggtggcaacacgacccaggtgggagccgtcccagaagacctttccacagccacgtgcagtagtagaagcaccgcagcccaggtgtcctcagcacacccaccagggactccctgccagctgcagccagggtgccgtcggccagcatgtccggtgtctccgcccgcaggtcagccatctgcagccagcggtaggggcggtcataggtgcagccctcaggtgctgtgtttggggctgggcctggctcctgcaccgtctggctctgggtggtctcgtcacactgagcttctgggccccttctggtgacatgctgagccacatgagctgttttatcatgtccctgtagacctttaggtaactggtcacagttacaggcctggcagcggctgaagatgtctgcgtgggtgacacgcacgttgaaatgcttgagcacagccttggcctgctgcatgggc

SEQ ID NO: 440988 - DNA, 1251 bp, Homo Sapiens
  misc_feature (557)..(588): n is a, c, g, or t
ggcctgggtggcgaattcggcacgaggggcagccacccctgcccagcgagagcgcagacaccgtgtgaggggacagcagcccttggtgcaaagccagagactgatcctggctctgacggctgaagagggaagacccaaggctgggtggtgtggctcgtgaatccacttagaattcttggcttgtgtcgcatactgggtgtcagcggcacacatttactctgcattgtccccgtctttcccatcgcctagcgtttggggaggaacagggagagagcttcggggcgtctgtctccgtgctctcctgcctccaccgccttggttttgcttcctgctggaggcagggcacctgctgcgacccagattcttctgcaggatgtgtctgtctttgtcacggtggacagagggtgacatcataggagcagctcgctggccagaaggggatgggggcatccctgtgcctcactcagctcctgctgctcttagggaaaggaggcctgggtcaagccagcatccccttggtaaagacccccgcaggccaccaggcattctggacacgnnnnnnnnnnnnnnnnnnnnnnnnnnnnnnnnaaacttcacagcaggccagctgcagtgacttgtcatcaagagtcacctcaactgcgcccccctcccatcctttcctatgagaagccactgctttgggggcgccggctagaaaaagtagggtgcggtggccaggagggcccctgccgcgcggggggctgggtctggttgagtcgctgctttcccgagggcagcgcagggatccggggaagctgcggcagggagcgggtgccggcttcgtggctctgaggtgtaacgggggtaggctccctccctcggaggacatcgtctgtgtccaggttcagaaagtggcccaggaagggggcagtttctgtcgcgggtccggtgggggcgcaggcgcggtgcggtcggtgcaggtgggcaaatgcgcggcgcgcgcgggggacagagcagggatggggtctgtcacctccggcaagtgtgaaccgggctgggctccccacagccttcccgtgggcggaaccgggcagggaagtcttaagggctaagttagtgggtgtgcataaacagaactctgttcccgggtgtacctttacggaacaacacaaagcggatatcgtttccaatgggtttggcaaacaacactgtgttgaaatgtgggaaaggggtgcagacagcgaaatcgggaatctgcttccaggttta

SEQ ID NO: 440989 - DNA, 2041 bp, Homo Sapiens
cggatctgtatctaggcgtatagacttgcaggtgtcaagtcacgattacgcagtgcaaagtctgtgtcttctgccgacgtgatgcagccaggttccaccctgcgagatattctttctatattcgcatggtcagaacagttctcaagcagtaagtgcctccttgccacttttatttggctgcgcctcgaatttctgtccatctacttctacctccattaccaaagcgcttgtcatggtttccaccagtctctgagatgagttcatacttgagacctcttcttttttcattgagctccattacagggtttttgccacttgctgtgaggatagggccctgagttcttacctctaaggtactggaggtttcagttgtagaatttccagtattattgcttgagtttgaagacactgtttcatttttactttcattatctgatttttcatcggaactcatacattcaatatctgcatcaaagcctgttggatatcccattgcctgcaataccttcaccgctacgtgaagttttgctgttttcttggatggtcctgaggcttcatatgttgtgccatccacatctacagacattgtgaagactggggcatgaacggggccagactgagataggagcttatactgaagcccaggcctgatctgatttagcctcattagtgcattcataaggtctattgctttactatccagaattttccttaagtttcgtttcatcttcttgttggggtctttatcatcccctaatccatcttcaaatggcctctttagagctgaagacccagcaccttctttatcagtaactgaccaggaatacttctgaaaaggcttactagatggaagggggtccatctccagcactttgtaaatctggccaaaggctgatagtctgagtgcatgctgtgcactgtgggtaatatcttctttttgctggatggtcatatagctcagagcatctgttgggtctcgctcacaaggatcatgaagaccaggacccccaggaagtagtattccagatgccaaacactccattactcgtctcaaggcctccccagcgcccaaaggtctattacaagtacctatagacttttcacatataagttctagtggccatcctttcaatggtgcccatgtggggactctgttgcacaaatcacgcagaatgcggaggacaattacacatgattttaatccatttgcccttgcctgaaaccatttggcatgtcgaagagacgccaaggcgttcaggcatttctgcctgtccaataagtccggaggatctttcatcgaaacattttctccatccttcttctccaattcgtccctaattagaggtgaggtaagtatcaccttcaaagttagcgtgggctcttttgtattccgaattataatagatgcctcatttacacattgttccacttgatatttctcttctgtgagtttctgaatctgaataggaagattatctttgactgtatttaacagggtctctgtgggtttgtctttgcacattaaaaccagctccaagtccatatcatctttaatcagcaagccttttgcaaccaggccaatcctcattacaccacacaatgtccgaccaccttgatccttggaatagttttctccggcctcatctttcttcacttctgtctcaccctctgtttttgtgcctttatttgtttcatccaaccaatctgagacatgtttaagagcacattcaacagtagataccatattctgaacagcttcaagttcctccggagatggatagattgttgaatgtttcaccataacatgtcgatcatcattagcaaaagatcgaatagatctcatggttttctatagtattttagcttctttttccgatcctttcccctctttcttgtcgtcttcactagacactgttttgtgtaaacaaatacctcctcataagcctgagtcccctgacagctcagcgtcaatatagcaaatgtctgaaggcttgttctcttggaacacacctttataagaagcaacagttgaggccaggca

SEQ ID NO: 440990 - DNA, 1020 bp, Homo Sapiens
  misc_feature (448)..(448): n is a, c, g, or t
  misc_feature (921)..(921): n is a, c, g, or t
ttgggctcaagcgatcctcccacctcagcctggagaatagctgggactacaggtgtgcaccaccatgcccggctaattttgttattttttgcagagatgaggtctccctatgttgcctaggctaagattctgcatttctaccaagctcccaggtgctgttactggcccgggaccgtaatcttgagtgtctaaggtctagaaagcctcttgcacccagaagtgacccagccatggatcctgtatcagactgcttgttctgacttagaattcagaaaatacactccctgcaatataaacccctggttctgcaaaccgcccttcccaggaaaggcaaccgtccctgctaacctcctccccaggaaacacacacagtcaccattgcctgtcagagtgaagactatcacagaggtgacagggctcagtccaaccccgtgaaacccccagtgangagccacagtgtgtttgcttctctggcctctccactgtttctcctagcaccattttcctggctgttctgttgttttataaaccggttccttgcaggtttcaggtatgctgtctctccagctgcagagtgagccccacggcaggggccgtgtgcccaccacctcaatgttaggttttgttgggtgggttgaatatggcttgaaataaggacccacctccagcagctcagtggtagaaggggttgtggctttaggatttactttgtggcttggtcactcctcaaggggctgtgaagctgtcattttccctcacaagccttggccctcatgtcattgcatgctcagcctattcccagcaggcatggaaaccactcttggtgtctccagacaaactacggaaaggcagccctgtgggaacagcaggtattcttgggatccgcggtgagactccagctggaggagtgcaggagggttncaggccacgggcccagcagctactggttgccacctggcctcctgctcagctccccggctccacccagggtatcattttagactccagcacccattttat

SEQ ID NO: 440991 - DNA, 1523 bp, Homo Sapiens
gttcagccgtctgtatatctccccagatacctgaaactgaccacctgagtacgttttcccattgctgagctgtttccctgatatctggccatgcaacggagatcaagagggataaatactggacttattctactcctttctcaaatcttccatgttgggatcaacaatattccacctgtcaccctagcaactttggccctcaacatctggttcttcttgaaccctcagaagccactgtatagctcctgccttagtgtggagaagtgttaccagcaaaaagactggcagcgtttactgctctctccccttcaccatgctgatgattggcatttgtatttcaatatggcatccatgctctggaaaggaataaatctagaaagaagactgggaagtagatggtttgcctatgttatcaccgcattttctgtacttactggagtggtatacctgctcttgcaatttgctgttgccgaatttatggatgaacctgacttcaaaaggagctgtgctgtaggtttctcaggagttttgtttgctttgaaagttcttaacaaccattattgccctggaggctttgtcaacattttgggctttcctgtaccgaacagatttgcttgttgggtcgaacttgtggctattcatttattctcaccagggacttccttcgctgggcatctggctgggattcttgttggactaatgtacactcaagggcctctgaagaaaatcatggaagcatgtgcaggcggtttttcctccagtgttggttacccaggacggcaatactactttaatagttcaggcagctctggatatcaggattattatccgcatggcaggccagatcactatgaagaagcacccaggaactatgacacgtacacagcaggactgagtgaagaagaacagctcgagagagcattacaagccagcctctgggaccgaggaaataccagaaatagcccaccaccctacgggtttcatctctcaccagaagaaatgaggagacagcggcttcacagattcgatagccagtgaggtggcatcttgggaagacatggcctattcgtgtaattattgcccatttggctcattccccaagcccctaattcattttaattcattttaaacaaaagcagagtacaccggtattgctccagatcgctcacatcacctgggacagtcccatggcccctatgagtcaactcacagcttgcggggagtgggccttctcctggccttgttcttgctcataaacaggtcacttcctccatgaagagaccagtttccacgctcccatctctcactgctgactcagcgatgcctctgcctcggtctgcttttgaagactgtgaccttcaccaggaggttttacttacaccagtcgggaagattagtccctcattctgcctggagtgccccgtgtttgacttggcagcgggtgtggagccatccccgcgtcctcctggcgcaatgcccctgtggctgtccaggaacaggatgtggctgcctttggccgaagt

SEQ ID NO: 440992 - DNA, 696 bp, Homo Sapiens
  misc_feature (591)..(591): n is a, c, g, or t
ctgactttgtccttttattcatggaacacaagcaccaggaaatgccttaaacgactcagacagacaatctgtggattgtaacgtggcggggcccaagggcgtgttttggacatttggctaggacaagtggctggtacaatggccaattaagaggcacttttatgaggaaaaacatactttctgcaagatagatctctagtgaccgatccaccaaatgccttcgctctactctgtatgtggcatctgctgctactttgctgatgcgttaaatgatgtcctatctcctggacacacaagctgccactgggaaggggctgggaacctacattgctggtgtcactgatactaatggtgtgtgtaggagtcttccccaccttaggtctttcttacacttcttcaataagactttctataaaggcagaagcataacagaaccaaagcgaaggccttgcaaacaccagccagacgcaggggcccgaggagctgaggagctgaggcgccggggttggggagagtaggacaacattcggccaaggcagccacatcctgttcctggacagccacagtggcaatgtgccaggaggacgcggngatggctccacacccgctgccaagtcaaacacggggcacttccaggcagaattgaggatgaaaaccccgtaagttggtggggcttaattttctggtatttttcct

SEQ ID NO: 440993 - DNA, 1397 bp, Homo Sapiens
cgacggcgcggaggccccgggctgcggcgcaggctccaaagaagaagaaaccaaggcccagagagggaggcccaggtgcagggagcaggcgagggaaggatccgtacaggggcccaacactactccagcaaccgaagcccccaaaaggagcccggtgatgctgcgaaggctgtgaacaggggaggcggcactgtgggggctgccggcagccggggctggggagagacatgtggacacgtggcctctatggctcccgcctgccagatcctccgctgggccctcgccctggggctgggcctcatgttcgaggtcacgcacgccttccggtctcaagatgagttcctgtccagtctggagagctatgagatcgccttccccacccgcgtggaccacaacggggcactgctggccttctcgccacctcctccccggaggcagcgccgcggcacgggggccacagccgagtcccgcctcttctacaaagtggcctcgcccagcacccacttcctgctgaacctgacccgcagctcccgtctactggcagggcacgtctccgtggagtactggacacgggagggcctggcctggcagagggcggcccggccccactgcctctacgctggtcacctgcagggccaggccagcagctcccatgtggccatcagcacctgtggaggcctgcacggcctgatcgtggcagacgaggaagagtacctgattgagcccctgcacggtgggcccaagggttctcggagcccggaggaaagtggaccacatgtggtgtacaagcgttcctctctgcgtcacccccacctggacacagcctgtggagtgagagatgagaaaccgtggaaagggcggccatggtggctgcggaccttgaagccaccgcctgccaggcccctggggaatgaaacagagcgtggccagccaggcctgaagcgatcggtcagccgagagcgctacgtggagaccctggtggtggctgacaagatgatggtggcctatcacgggcgccgggatgtggagcagtatgtcctggccatcatgaaacatgtcaggttggcaaaatttttccaggactccagtctggggaagcaccgttaacatccctcgaaaatcgccctcatcctggctccgggaaggaaccggcccactccgggagaaatacccaccatggccgggaaagttccctggaaaaggtttctggaaaagggcaaaaaatcccttcggaaaaccaccagggggccgagggaaaaggcccttccccaaaaaaacggggggggcttagcccggggcagccgggcgggcccacacacggggcttagagaacatctgcggagttaagggaaaagagacccagggggggcaactatagggggtgtcagatccccggg

SEQ ID NO: 440994 - DNA, 1076 bp, Homo Sapiens
  misc_feature (221)..(221): n is a, c, g, or t
ccctgctccccaagggggggccaaagagcttgcccagagggcccttctcattcgggattcgggggggacaggttgttagaccaaggatggccccaacccagttccctggtgggaccagggatggttcattccccacaagggttgtccattccatcaatgggtaattgggggagaacctctttacggccataggccatatttaagcaaatttgtcccagccntgaacctctgagcctgggtggtgaagtggacctgggtagcgccggttagggggactggtagagctgggagagcagggcctggctggacttctggctggggttgttggcaaacttcacagtaatcggttccgtagcaccgctgggcttctggccattcagccctttgatggcttcttctgcctcaatcctcttatcaaagcggatgaatcccacccctctggacactcctgtgacttgatcaaccaggattcgtgaggtgatgatacgcgccgtattgcgagaaaagttgctccagttccttctgggtcatggttttgggaaggccgctaacatagaggttagcatccctgattgaggcagagctcggacgggcatatgagacctttatggttttggtctggagtctgagtccatttaaagtgttgatggctttctctgcatcctttggatcaatatagttaacaaatccataccctaaactctgtcctgtaattttgtctctcacaagtttgcaggattctatttcaccaatgctcccgaagagactcctgaattcttcttgggtcatattctggggtaaatagttgacgatgaggttggttttgctgtcatctgtggttgcccctgtttgcatgggagaaggacagtttctgttgttgctggagggtccattgcttgtattggatgtcggaccatttgacacctgaggctccatggtgctaattatcatcttcaagccattccactccatctgtgatcagaagaagatggaccctcacacagtgtgtcaaaagcggaaaggaacgttatgtaaaagctgacattccatcccgggaattccggaccggtccagcc

SEQ ID NO: 440995 - DNA, 850 bp, Homo Sapiens
gcccctcatctcacacttcgcagaggcacgttcaggaagccactggctgccactgcacaaggctgctccaagattccatgtcacctgggcctgtgagttatttgaaacagcaacctaaccccacgccaagctgggctgttttctccaaaggaattctcaactgtcttcaacagaatttctgtgcaagtcagccccagacagtgggaaggtggtgttatgcctggggatgtggtttctccgagcagcagtgatgtttggagattaatactggaaagctgcgctttgtcctggaatatcatcaagaatctgctgcagctcctcctcttcaaaccgtccctcccaagcttgggattagagccttggactcctcagcagtctctgggcaaaggttggccaaaacaggccaactcagacttatgaagctttttctggagtagcaaagctacgaacactggcaatggtctctctgtttttgaaacgactgaaacgggctgtgtagtttaatgttttcatgaagacttctgagagctcctgttcgtcctctgcactctcattctgctgctttcgatgttccagaagcatatgaacttctgaatttagaagtgtctcagctgtttcaaactcacctgagtgtccggctttgtttatctttgacacaggtccccggaacttcgcagtttatcacataaaataacccagttgcccaggcggtccctcccaaggccatggtccctgcccaaggccatgttccctccccagccccacgccgcgctggggcttgcccaagccgccgctgaggcagggaccttgggcgaagcgcgcataacgccaggcctgcggcgaccacgcg

SEQ ID NO: 440996 - DNA, 2623 bp, Homo Sapiens
  misc_feature (265)..(274): n is a, c, g, or t
  misc_feature (531)..(548): n is a, c, g, or t
  misc_feature (597)..(644): n is a, c, g, or t
  misc_feature (1313)..(1313): n is a, c, g, or t
  misc_feature (1398)..(1625): n is a, c, g, or t
  misc_feature (1651)..(1665): n is a, c, g, or t
ggcgagagaagtgtggggtggtgatcgaccgcggggcggaaatcgtggggggtgattctgcgccaaaccccccggtgggtggggagagaatggttccacagatatgtgtgcgagcgagaaaatgttatgaagagacggggcgcacaaagcataaatcttcgctggtgtgggacaccagcggccgggggcggttgtaatttttgacgggtccgcggggcctcccggttctgcgggcccgcccccgtgcgggaaggggggccccgcnnnnnnnnnncccctaaagaggaataggcgtgtgtagaaagatggggtgtaaaaagaagaaactgcggggggtaaccacaacgcgcgggcgagttgtttattttacaagggggagagggggacaccaggggcccccttgttctcgcgggggcagaagggttttgtcgttagggaaacacaaggggttggtaccgcaagggtgtaaattaccgcgcccggggggccggccggccccccagacaaaaggggttaagaaaagaatttttnnnnnnnnnnnnnnnnnnagcacaagcgcgattggttggttttgttccactatacgggtaggcggtnnnnnnnnnnnnnnnnnnnnnnnnnnnnnnnnnnnnnnnnnnnnnnnngttgagttcgcctagaaggggggtgtcgtttttgagtagaattgcaattttatttttctccagagaagtttttcttcagtccttaacaactccgctccttatatgggctttggtggaggtcatggggcagcacctgcaggtctacgttggggtggaggtgttcggtccttgcctgcttcatgagctcaattcctcaccactgtgctgtgaatggcacaactcacatggtaatgtagcttcacatccagcctgggaagtacacaggcgtcaaggatgctcatttcagaaacatcgctgactgctgcggcctctacgtttcaaatgatgaatttcttagtagccttgtcattgggcacacaacaaccacagttcatacagcaaatgggctgcagtgaacagtgcacacctggttgtggacctctttggcacgaccattgcttcttctttgttatcttggaggtgcaggcccaagaaagatgaagtaaaaatcttaatttgagggtgactaaatgaatccttcaagaccacttaccccaaatccacattctgcaagacagttcaagaagaaaggcaaagtagccatctatctcaaggggctatgggctccacaatacttagcacttgtccccaagtgtaaacacttccccatggcgtgcttctttccgtctncccaggttaggcacaacgatgccaagggtgctgtcatcgacactcccatcctttaagaatttcaggccagttgtggtggctcatnnnnnnnnnnnnnnnnnnnnnnnnnnnnnnnnnnnnnnnnnnnnnnnnnnnnnnnnnnnnnnnnnnnnnnnnnnnnnnnnnnnnnnnnnnnnnnnnnnnnnnnnnnnnnnnnnnnnnnnnnnnnnnnnnnnnnnnnnnnnnnnnnnnnnnnnnnnnnnnnnnnnnnnnnnnnnnnnnnnnnnnnnnnnnnnnnnnnnnnnnnnnnnnnnnnnnnnnnnnnnnnnnnnnagagttaagaccctatctccattttnnnnnnnnnnnnnnnaaagcatttcaaactaacagcggtttaattcttcctttagtatctaggtaaaactggtctttctctataaagtctactatcttctggtctagtttcaaaaagtataaacaccctgaaattaaaacatgaaatattaagaaaaaagatgatgtggaggccaaaaaccaggaatgaggtagtcaacagtgtggttatgtgacccctcatctcacacttcgcagaggcacgttcaggaagccactggctgccactgcacaaggctgctccaagattccatgtcacctgggcctgtgagttatttgaaacagcaacctaaccccacgccaagctgggctgttttctccaaaggaattctcaactgtcttcaacagaatttctgtgcaagtcagccccagacagtgggaaggtggtgttatgcctggggatgtggtttctccgagcagcagtgatgtttggagattaatactgaaagctgcgctttgtctggatatcatcaagaatctgctgcagctcctcatcttcaaaccgtccctccaagcttgggattagagccttggactcctcagcagtctctgggcaaaggttggccaaacaggccaactcaaacttatgaagctttttctggagtagcaagctacgaacactggcaatggtctctctgtttttgaaacgactgaaacgggctgtgtagtttaatgttttcatgaagacttctgagagctcctgttcgtcctctgcactctcattctgctgctttcgatgttccagaagcatatgaacttctgaatttagaagtgtctcagctgtttcaaactctttaggaaagatgagctgtgaggcgtcctcctctacgtcgccagcccgcggatcgctgccacccgccgccatcgccgagccgcaccgcccaccaccaatcccggaattccggaccgggccgcgtgtttgggaaaggaggcgc

SEQ ID NO: 440997 - DNA, 678 bp, Homo Sapiens
  misc_feature (58)..(58): n is a, c, g, or t
  misc_feature (87)..(87): n is a, c, g, or t
  misc_feature (94)..(94): n is a, c, g, or t
ggatcagctttttacttgttagcttaaaggtgcaatattatctagcagcaacgctggnttgctgctagttctgggagaagccctcanaactaanacttgaaaaatgaataagactttgtcactaatccaacttcaaatggatcaaatgattcaaaattacaaaaatactaatcattttaggctcaatctttagctggaaaatagagataattcacgtgtactgttcaacaagcaattattcatatagtctctcaagtactcaattctaaccaagaacatggtgtcctgtggtgtctacagtagaataaacagtaaagccttgtacttcaataatcgatcctccaggggaaaaaattattctaagtggatttatgtgtagagatggttttaagtgatgttcctatctctttagcactaaatcagtggcagtaactattgaggaggaagcaagaaagaagccaagacccacagtggctcgcttccaagttgcatatggactagttgcttgtggcagggagagacatgggttccgaaatccagtctgttctttggaggggcctgaccatggctgtgactccacggtgctattctagatagattaattcagactttgcttggttttgcatcctaagattgcgttatagaaagaggagaatgaaggccaggcacggtggttca

SEQ ID NO: 440998 - DNA, 1629 bp, Homo Sapiens
  misc_feature (11)..(11): n is a, c, g, or t
ctttacaatcntacaaaagtgacattcagtagaaatagtactgtaagtactcatagaaccattctttttcacttttagtacagtatgcaataaattacatgagatattcaacattttattataaaacaggctttctgttagatgattttgctcaactttaggtgttctgagcatgtttaaggtaggctaggctaagccatgatgtttagtaggttaggggtattaagtgcattttcaaattaccatattttcaacttacaatagtttcaacgggaggtaaccccatcgtaagtggaggaacatctagtgcctggccagagccggttctcaataaatataactcttctccatcttcttcaaacctcaggccaggtttcagtgacctcctctcactttctaagattatttttgcttgctggtgggtttactgtcatttttaaccacatctaacctaccttaaaaaagtgtatggatgggggtgccaggtacaaagacttagcataaagaaaacgaccatttactttgaaacataaacaaaggccaattaataatttatgagtctgttccttgtccctcgagtttttagcaggcatggaatcattccacaggtcattatttcagtttggtctctgttcctaaggggtgaaggttttctgagggctgtggatcccaaactcacctggctcagaggctcaaacagcctctctttgtccatcaacccgatttagacagcatcctgggcctgaaaaccttctgtgctggcttcaagtgaaaatagttcactgggtcaaaagtaggctggtccaagacgcaggacggtcagtaaacgttggctgtgttcagaaactgcggcttggctgtttcttacattgatttatggtttgtttccatgaaaccgaaaatgattggtccacctggcagctggctggctggctggcaactggaggcctttctgtcctggctgagggccctggccccttggtggcctttgggaagcagcatctcatcgggccgttttttcgttctggcgggcggccggcttggcccgcggggtcgggctctccgcgcagtgcagagacgtctccaccctcagggacagaggttctgacgtggcgggaggtctgtttccgtgcgctgcgaggaggattccacgtgccgggaggacgcctcgaggaatgcgagggagccgctttcccgagggggaagagggagggcccctcgctgcggcgctgggaggtctccacccgccgggacgacgtctccacgcggtgggacgaggtctccacgcggaccgtggacgtttctgtgttaggcggtggtccccacccggggcgaagactgcttggcccctcgggctgaggccattctgccggcgtgagggggccagggaggcctcggggcaccctacagcccaatggtcaccgcaggcagaagagaggaaaactacggtactgccatagccgggagcgccacaacacgatgacgtggaagcaccatggtccttcgaaggctaaaacactggactcctgcccctcaggcgctcccacggcccgggccccgccccctcgctattttggagccagcgcgggtggagccatcccagggctggatcccgggaattccggaccg

SEQ ID NO: 440999 - DNA, 1381 bp, Homo Sapiens; identical to SEQ ID NO: 150596

SEQ ID NO: 441000 - DNA, 1162 bp, Homo Sapiens
  misc_feature (7)..(7): n is a, c, g, or t
  misc_feature (19)..(19): n is a, c, g, or t
  misc_feature (33)..(33): n is a, c, g, or t
  misc_feature (40)..(40): n is a, c, g, or t
  misc_feature (47)..(47): n is a, c, g, or t
  misc_feature (134)..(134): n is a, c, g, or t
  misc_feature (172)..(172): n is a, c, g, or t
cacgttncacacgatggcnagggagtgagtgcntctctcntgctgtngaccctcccgctcgatcaccctgacagatacctgaacgggatgccccccgcagggccggggctcccagtcatccccctggatctttntggtacacaggctggtgggtctggtactccccccctcncgctgggtagtgcgtcttctgggcttggtggaaggagggctgggctgctggccgggtaacgttctgctcgtgtatcaccggaatggagatgtacccccgcgggagcttggtgactgccacagggctgctcctgccggaggaaggcaggctggccgaggaggatgaggatgagcagtcagaggcagctggagactgggaccgctcaggtccgtgggaggctgggggctgggctgccgccgccgctgccacctgtccacactgtttatctggctgagtggtttctggcatgccccgcagaggtgactgggacctctgaggagccgctgctgccgcctcagttcggaatcgctgcatcccaggctggggatagacatggaaagggtgcacctgccggttctcagcgccttcatggagcacaggaatgggaatgtagcctggtcggagctgggggtacacagggtggccttccctagcaggcggcagcctagagccctcccgggaagggccattggcagaggatggagtctccttggggccctcagagggcacgcgcgggtcgttccacgtagtggtgcggctgttgtggtccacgaagaagggccagccggtctgcgggtcgatcttgatctcccatccggggggcaaagggtcgcggtcaccgttgccggacgccacctgcatcatgggcgagtgggtggcggcgctcatgctgggttggggtctgcccgctggggcgcgggtgcggggcgctggctccgggcgccgagtctctggccgggccgccgccgtgggcccctctccgccgccgacgtgtccgggaagccggcgccgggcacctttatgaattaaaggcgggggtgacgtggccagagaggggtggaagtgtctggaaatagcctcctcgctgccagaggggaaggaggagataaagggaggtagcaactggccggctagaaacttctggtccagtccagagaagttggccgcggc

SEQ ID NO: 441001 - DNA, 782 bp, Homo Sapiens
  misc_feature (4)..(4): n is a, c, g, or t
  misc_feature (23)..(23): n is a, c, g, or t
  misc_feature (28)..(28): n is a, c, g, or t
  misc_feature (43)..(44): n is a, c, g, or t
  misc_feature (68)..(68): n is a, c, g, or t
  misc_feature (216)..(217): n is a, c, g, or t
  misc_feature (326)..(326): n is a, c, g, or t
  misc_feature (328)..(328): n is a, c, g, or t
accnagagtatctttaatgaggntttcncgcttctgccccatnntgggtcctctctcatctcttggantctgtacccggtttacaatctcttgcttgatggagttgattacaaacaataaattatcatattctgtgttgaggccccataatttcactttattagcttcatactgggctttcttctttaaccgacaagctctggaagccagcttatnnttttccttccttgaccttggtcgggctgttaagggaagctcactgactggagtcaggtcactaatcaccttattcagtttccgaagttcattgcctatctggaggagtntnttaggatttggagtcaggtcttctacatcagttctccgtgacttctttactgcatattttccatgatgtaagccatttttctgatacatattacttggcaaagtatctcggttccactcagatggtctcagcatcctctcttgctgtgatggtgtaagttgttcactatactcccagaagtatcttcttttacctctcttccgtgaagatattgaagtcacctccttcaggtcttctacagaatcattttcatagcctggttcagagaaagtatcactaatatcatcatccttgtcatcttcataatcctcttcctcttcttcctcctcctcattttcagacagttcatgctcactgccgaatccttcatcatggtcctcatcatcaacatcctcctcgtcctcctcatcttcttcaggactgcatttagttggctgttcatccaagatcgggg

SEQ ID NO: 441002 - DNA, 1371 bp, Homo Sapiens
ttttttttctaatcccaagcatttattgctttttaaaaagggaactgtacatgatcagatcatggaaggatagctccactcctccccgaccttggtcacaggccgccatgaggagggactgctccagtcctccggtggccactgccatcttcctcatcactgtccttagctttggagtacacaactccaagtggcccgagtctagactctatcaaattccacactgatagcaacaatgactgcatctgatgtgtgctgctggcaatcttaagcccaaaatgcttcaaagattaaacagccatatacatttaaaatacatagaaaaataatataattagaatgtatacaaagtagattacaaaacaacttcactacaagaaatacatcttatatccaagcacaaaaatgtggaaatatacatgaaaggatatacgtttaagaaaccacatttttatttctaaatgctgagtgagaaggcatggactactaaattctggattactgataaaatttcaaaaagaacttgattttgctagcagaaatttttaccccattctcaagcttctataaacagttcttgaagggattagacagctgttcctctttccaaattctgtttaatttcagctgtgtatttcccatagaatctttcagctttcttgttgaatttggcattcctttcattaatgtagtcgatatctgcatcatcattataaggacgtctccggctatatttgtctcgtttttcaatctgtttttccagatctatgaccatcctgtcaatttcctctgtggaaggcacatgtgttccatgaagaagactattggatgttgggaaaaactcttctccatgtttttctctcagtctctcatatgtttccatgtcaggtttgatctgcttggtcaaccgatgatactggcgtaactgggcagcagcataatctgaaaatcccagatcagggtttttcctcttctttttcctctcccatctttctgcatcttctgcactgatctccagcaacttcactttctcatagtcttctcctcttgccgcacattcctttttcttttcctcttcctttagttcccactccaaacgagcttttttggcttcccaatttgcaggtaattttagtcttttatcttcttccacaacttcctggtgatttaatttacgagcttcattccgcatcaggtgcagctcccggaatttgcgcagtctctgttcgcgcttctgagcggccagctccgccgccgcagcgagggacccctcctccgcgctgtccaccagcacctcggatgcagctatagccgccatcacaacctttctctcttcccacttccggcaacaagatagagcactaccccgct

SEQ ID NO: 441003 - DNA, 1978 bp, Homo Sapiens
  misc_feature (2)..(2): n is a, c, g, or t
  misc_feature (7)..(7): n is a, c, g, or t
  misc_feature (33)..(33): n is a, c, g, or t
  misc_feature (55)..(55): n is a, c, g, or t
  misc_feature (97)..(163): n is a, c, g, or t
  misc_feature (674)..(690): n is a, c, g, or t
  misc_feature (700)..(700): n is a, c, g, or t
  misc_feature (724)..(761): n is a, c, g, or t
anttgtngaataaatgaatatttgtcaataggnacataaccacatagagcgagcnttagatttagagagcaaaatatttgggttctaatatgcaaannnnnnnnnnnnnnnnnnnnnnnnnnnnnnnnnnnnnnnnnnnnnnnnnnnnnnnnnnnnnnnnnnnctaggttattcggacctatgtggcctaccacacaggcttattgcaaggttcaaatgcagaaacatatgaaagtgctattatgaatacaacttagagcaatacaaacaaaacaaggaacagcaatggaatttcaagctgaaattcacaccctcggattgtacccatgtactgatggagtcaacaagaaagtgacaaaatagctgattactaatgagaacgaatatgccattcttctgagtgggaagaattctgcaacaccctgtagcttgtcgctgcaattaattacttcccaaacttcacaaagatgtcagagacccaccatcaataattctctcacagaagcacaagggccaaatgtcccacgtttatttacatatgaaatgtgtttcatacagttatgatggatggagtgcataacacctgacagcagcaagaccttttgaggaaccgaacattgactacagtatatcatgcaagtatctatatatacacaaaagaattccttttcttnnnnnnnnnnnnnnnnnggtacggggnaggtgcgggggtaaatacaagatnnnnnnnnnnnnnnnnnnnnnnnnnnnnnnnnnnnnnntagaactctctcagagaactataaaacggaagggacagaagagtacctctgctgcattttaataaagcagaactaccgacgttaaatatacttcttgaaatggctgaactaaacccgggtggctcagtgcttaaggtaacggccaattgcaatacacaggcggctgcattgataagtcggtggttgaagttgtgcatcccgactctaagtaccataacgtttggcagtagcacccagaacaggaaacgccaactcttttgacagcaaagggttaagtcaactgatttttttctggtcaagagccagagaaatacttgatattcttagctgtgtttctgtaatagttagttaataaattacatgacaaaaacctgactatataaatctattggtctaactacgtatttgtaacttttatagtagtccagccctttcgttactttccctccttgtgctcttaaagccagccttgcagatctgccgagaaaacaaatcccatttttttctttagaatagccttccccattcctcaaaatggaactgaggaaatcagcattccttattagattcctagcttcagtttttatccacggctgggaaaggagcgacctgcaagactgctttaaacacccttcggcatggcctgaagacaaaggcacgtccacactggagtgcagttgtctcaaatgtgaactcactccctcagggcaggcacatcgaggaagtgctaagacacttaaaagttcctagtgtttttgagacccacaattacttacaatttatgtagtgaattctaaaaattaaaaacactaaaaaaggcattattttagcctgtaattagttaacccattcaaaatccaaacatacaaaatggtttatttgaattcaggaactgcccctgttactaagaactctgttttaaagaaacagtacaaaaagaaaaattctaacccaaaacaactcaaatggttttccactaaatactgatacaaacatgtaacaaagagtataaaaagttattcatttaaatatatacaaactcttttaaactcaaatactgttttaatacttatcgaggatatatacgacgaggtgaaggaaggtacattgaaagagaatatattgcacagcctagacagtactgttaaccggacgcgtgggtcgacgatatcccgggattccggccgtaccagcctcttttttacccgttcatagcc

SEQ ID NO: 441004 - DNA, 785 bp, Homo Sapiens
  misc_feature (290)..(290): n is a, c, g, or t
  misc_feature (338)..(338): n is a, c, g, or t
  misc_feature (427)..(427): n is a, c, g, or t
tataaaaagttattcatttaaatattacaaactcttttaaactcaaatactgttttaatacttatcgaggatatatacgacgaggtgaaggaaggtacattgaaagagaatatattgcaacagccctagacagtactgtgtaactctcattatactgcaaactttgtaacaaaaatgtcttttttattccaatgtggacagggattttcctcatggagcatctgtggctatttctcggctgagctcatccttttggatttgatgaaggccatgccgtgtgtccgcatgtnagtatttaaggcagcttcagtttcaaaagtttttgcgcaacactttgncactttctgtctgaacacggcgcccatcaggggattccatcctcgtggctgggtttgttcctccctgttggttatcttcccccagcccncattttgcttggacactggctgaggttcctttaacttgtgtacgatgaagaggtgccctggacagagagacgtgagacgtgtagcagaggccacactcccggcactggtaggaagaaccatccgatttgtgctgagggatgtgttcgtggaattgcagcaggttttcggtggtgaagccacacacggcacacttgtgaaccttaaaaacattgattttcagctttttcagtggttgagtgattgctcctcggggaggcctgaactccagaactggttcttccaacttccgcttgggactggggaccttagtgtcttcttttatttctgtttcctcctcattggtggcatctgtcattt

SEQ ID NO: 441005 - DNA, 434 bp, Homo Sapiens
  misc_feature (398)..(398): n is a, c, g, or t
ccaaacatacaaaatggtttatttgaattcaggaactgcccctgttactaagaactctgttttaaagaaacagtacaaaaagaaaaattctaacccaaaacaactcaaatggttttccactaaatactgatacaaacatgtaacaaagagtataaaaagttattcatttaaatatatacaaactcttttaaactcaaatactgttttaatacttatcgaggatatatacgacgaggtgaaggaaggtacattgaaagagaatatattgcaacagcctaggacagtactgttaactctattatactggcaaactttgttaacaaaaatgtcttttttattccaatgtgggacgggggttttcctcatgggggcctctgtgggctcttttctcgggctgnggcttcatcccttttggggttttggtggaggggcct

SEQ ID NO: 441006 - DNA, 928 bp, Homo Sapiens
  misc_feature (2)..(3): n is a, c, g, or t
  misc_feature (6)..(6): n is a, c, g, or t
  misc_feature (10)..(10): n is a, c, g, or t
anntanatancatctaagttttctgatcactaccaggtaattttcaaccaataagaaaaaggaaccaacactcagctctgtagaaatctaccttcttttagaaacctcaggcctctgcacccctttagacaactcatttacaaccacaaccttccatggcttctcacatgccagccagggcagggtaaaaacggcaatttcttacaccgaaaggtcctttttatgtaacaaacagacctccccaaaccacaacttttttgtcctattgatgactcgcatgagatcaaatctctagtgtcccctgactgccccgacagggtctaggacaacacaggttaaaaaggacagcagggtcgttcaactcccacactgcctcaggtgttttctcaaagcacgacaattctgcaatggagacttacacgtggaaaagaatcaaactgtgcaggtaccctcagtcctctgccactaccagctcaatagcttgagctcagaggatcaagtcaagtctctgtctcacttttaatctagcacacaagaggcacaactcaggcagtacacggtattgaagcatgcaacaggtcattggtaacaaaactcagttagattaagagtacattaaataaatctttgtagttgagtagaaatcacaaaacagttggtgaggacaggtctgtaggctcagctttacatccaggtttttatacaccagcagccagattcacaattgatagatattgcaccggaaagatgtgtgcagggaaaagaaatcatcatcacatttaatgttcatgataaaaatataaaaacaaaaccagatatgacctccatgtagtacataaagtgccttcagaattggtgcatttacaacaaaaactggttatattagctaccattagcaaacgcatacaaacaggagactaaatagttc

SEQ ID NO: 441007 - DNA, 1466 bp, Homo Sapiens
  misc_feature (408)..(408): n is a, c, g, or t
  misc_feature (412)..(412): n is a, c, g, or t
  misc_feature (429)..(429): n is a, c, g, or t
  misc_feature (449)..(449): n is a, c, g, or t
  misc_feature (619)..(636): n is a, c, g, or t
atatgacctccctgtagtacataaagtgccttcagaatgggtgcatttacaacaaaaactgggttatttagctaccattagcaaacgcatacaaacaggagactaaacagatctggtttccacagttttgaatcaagcagtgccaagtttcattcaaaatgtctctactacaaacagcaaagaggaaatagaataaaagatgactgtacagcgcccaggaagggttaagtaatttctcggattagaaatgggagtccaaccctgttctcaaatgtgttagaccacatgtaattccttctaaggaataatggtgtgattcctttcaagtcaacacaaaatttgtcatgctatgttacatttctctcagcctgtagctattagctaaatttgtacaaaaaaaccccaaancaanaacgtaatatccagttnttcattctgagtatggaaanaattatcattatgtctaatattatattggaaattctctcaaagtacttgtctgtaggtttttggacaaaaatttgccttccaattctaataaagtagagggtggaggtgtcagagtacttcaaaaataaaaatgtcattgacattaagcctggtatgaaagtgaaatacnnnnnnnnnnnnnnnnnntgctcacttttccaagtacatgagacatctttaatcataacgaaataaaatctgaaaatcggtctaaatcattttaaaaagtaaacatgagtcgtaatactatacctgttgagtgattaattccattcattgtcattagaaaggatgtaaaatatttattaagggctttgcctgcagaggcacaacataaatagcattaagtcctcctgaaatgtaattagtgtacacatcaaccagttgataatttgtggtgggaaaggcaggaactcaagctgggaccaggttcccgcatccgaacttggacgagtgcgtggtgaaggctcggctccagggaccatgcctgcagctgctctctgccatcgcctctgcaaaagtctgttaggcaaatgcaaaagtgcaagcagaacttgcttgaagaacaaccacccccgaggcacagggtgcttaatccaccccttcaaatccttgagcattttccacggccatgagaagtttctctcgtaaatcttcaaaggtttattttggaagtaaatcaaggcagataaaggctgtggtgaactctgtgccgtttctcaggactggcccattgctctattgaaacagctgaaaccaattgaaacattaagttcgggaatcctttataagtacttgcgatgcccttggacaaactgaataaaccgatacgctttcggggccatgaatagcacaagctttcctaaacactgaatgacggggtggtttgggccagagccggtcttgtaaatagaaagctgtcttcagtcattcacattccaatcacccaaggccgacatgaacaactccacttcgtc

SEQ ID NO: 441008 - DNA, 600 bp, Homo Sapiens
  misc_feature (44)..(44): n is a, c, g, or t
  misc_feature (69)..(69): n is a, c, g, or t
ccttgagcatttcccacggccatgagaagtttctctcgtaatcntcaaaggtttccatatggaggtaantcaaggcgattaaagcatgtgtgaagctctgggcagtttcctcaggactgcccccattgctctattgtaaacagctgaggaccattggaaccataaagttcggcaaatccattcataggtactcgcgatgtccctgtgacaaactgcagtaaccggatacgcttttcggcgtccatgagtagcacagccttccagaaccactgaatgacggggtggtttggtcagtagccgttcttgtaaatagaatgctgtctccagtcattcacatccacatcaccgaggccgcacatgagcaactccagctcattttcatcaaaaattttaatcaaatcaataggaagtagttctgtgaatccctccaagaaggcgttcatctgcttctggaccctgttcacaaatctccactggatgactaagtcgatatattcccttttgttttcatttgtgaccattatttctgacccattgggcttcaaatccacttgatatgtctgtccaaagttttcttcgtctatgcagaacatgaggtcc

SEQ ID NO: 441009 - DNA, 1818 bp, Homo Sapiens
  misc_feature (448)..(448): n is a, c, g, or t
  misc_feature (1783)..(1783): n is a, c, g, or t
tgattaacatgatggttgtggataatgccacaagtacacagggagacccagtaacaagacatgcagggtgagggcaagcggctgagctgcccaagcatttcaaaaccaggactttggcttcccatgcagttggagggtagaagggatgtgcggaactgatgacttcaccggctcctcagcagcatgtacattcaaattgaagatgcttgagagccccactataccaaatcgtgagtctggtcactcctccagcagagcttgggtgcagtgacagttagaaaagctgagttccaattgagtctgttgcaccaagagtccttttgaagacgctcatcaaagtaattattttcttttgagcagatgtacagcacatccatggggaaggccatttaaaagggtgtttttccagcccagtcaaatgatccccatcccacttttttctcagttnccctctgagtttcttcctgctggccgccctcactatacagaaatagccaagcagcaacagggtcagtcatcaatggtgggcaaccaaaaggccatgttggaacacgcactggcaaaagtcatgaacttggggttgaattgcaaacaggtaatcgggcctgtgtgtttaccatccaacacagctacttttataccgctctctccattccagacatggatcttgccatcctctgaaccaatcataataaactgagagtctggagtaaatgaagcctccagtgtgacagctttgctgttggcataacccccaaatgtgtgcatcaccactcctttgaatgcatcaatcagacgaatgaagctgccgttggtggaaatgaggatgagcttgccatcattgctgaatttaagtcctgtccactcacaagttcgatcatactgcatcttaaaggtagcaaatggccccttatcaaaagaacgaaggtcataaagcttgaccatttcagagttgacacctgcagcgaaaattaacccttctggatcaaaagaacaaactggcttcccctgcagatgcatgaggccctggcagttaggagaccggagatcccagagtcgaatggtcttatcaagagacccagaaatgaaagtgtcatccacaggtgacatggacaaggccaccacccttttgctatgtccaggaaagtatctgatgtatttgttgtcatgcaaggacaagtaacgaatagtatcgtctattttgttagagctgtaaacaactgtgtttgctgcatgagtgtatctgatgaggtccacaccatatttcttactgtacagggttctctttggtttgccctcctggcagtcatagagcacgatggagtcgtcgtcgctactcgagatgaccgtctcgccgttggggctgaaatcgaagcagttaatcttgtccgagttttcgcggaacaccttagcgacgcggaactccgcaacacgctgtcggtcagcttcatggcggcggctggggaaggcagcggcggcgcaggccgggccagggcccggcggcgagcgggcgggctgccgagggccaaacccagcagggcgggcaccgcagccagcaggctagcgggaagtcgccaacagttggccgcctcctcctcttcttcctgcttgtcgaggtcttctgcctggactgtggagcctcgccgaccgttcgtcctcacagccacctcacggacaaccggcgcgtcgccggctcattgtgtccgccattttggcctcgtgccgattcgccacccagcctcgctaccttagaaccgttagtgagtactgcctcgtgttttanaaaaacacctgcggggtttgaccaaactgcgtgtg

SEQ ID NO: 441010 - DNA, 514 bp, Homo Sapiens
  misc_feature (180)..(180): n is a, c, g, or t
  misc_feature (182)..(182): n is a, c, g, or t
  misc_feature (469)..(469): n is a, c, g, or t
cgtggtggcgtttgggcttaatgcagctttggcgaggtcggatgacgggtgggagccagcggtggaaggggtggcgaaagtaccggtttgccccaggccgccgaggggcctccttagagagaccttgcctgctccgctcgcgtccgccggggccgcgcgggtcctcctggcgccgccagntntcaaaaaaccactcgagttgtcactgcgacggccctgggccaggagccgtttcgggatctgtcaaacaacgagttttcgtcgttcgaatcaggttgactgtggtccttcatccccccaatctcccgtacctggcgagtccagctcgtcgcggataccgttaaccctggataaaaaaaatggaggttacctctgtccgtgtagattcctaaactgtcctggagtgatccttggagtaaaggaaaggtgctttgaagcacattcagccatcaaccctgtgggatggcanccactgatttgtcctatggtctttacagggacccagtctgccttc

SEQ ID NO: 441011 - DNA, 1146 bp, Homo Sapiens
ctgactttgaggtttaggtgaaatcgcctgctccagcattggagctgtttcattgtagtcttcctttttttcagcaccatcaaccccaacagctttggatgccaacaaaccagtaatcttgttaagtcgagctctctttgcctgaaacgagttgccttgattatttttcctcttgtttgataatgtgctctctggctgtggaaagaccatctttggaacgttctctacatgaagtccaaatgtttcactagatgtaggcagatcttccttcttctctacgtctggtgtggctatacaagttgaagtttcctccttctttgaaggtactttaaaccactttctctcatctttatccttatctttattgctgttagcgctggttcgaggtttactccctgttttgttcttggctgcagctgcagcagctgctttgactaaagctatccaatcctgccccttagcatcctcgggcatggctttaatgtgcattctttttaaacaacgaattactccatcataaaactgaactgtaaatgttccttctttgttaattgcttcaatcttggcagggtaatagcgacagtctgtccaacgagccagaacttcttctccagctttaaaatcaaagaaatcttcctcatcttttagcccttcttttcttagtgctggtctctcaaggggtcgcaatctattgctatcccagtaaatccactcatcataacgatgactccagcgctcaaaatggaccagcatcttgccctcctcatagtcaatttttgtcaattcgtgatggataccatttttgtaagtagtccagtgcctccaaacgagcaccaatctcaaaagtgattccagggcgatttgtgggctttttactcatcttgagatcctatttttcagtattctcttttcactaccgactcggcctcctctctgcacagcagcctggccgtccggggccgagctggggcacgagcagggcggccagcccgggcctctgcctctgcctccgcccaggcagcggccggggagggagcaggagcggagcgagctggggccgcagcgccggatccgcccaaggtttcgcgggagggagctgggtccgagccctcaagctcgctcagggtccgctgccatcgccccgct

SEQ ID NO: 441012 - DNA, 1114 bp, Homo Sapiens
  misc_feature (139)..(256): n is a, c, g, or t
  misc_feature (258)..(282): n is a, c, g, or t
  misc_feature (1033)..(1033): n is a, c, g, or t
  misc_feature (1044)..(1044): n is a, c, g, or t
  misc_feature (1054)..(1054): n is a, c, g, or t
  misc_feature (1084)..(1084): n is a, c, g, or t
  misc_feature (1087)..(1087): n is a, c, g, or t
  misc_feature (1099)..(1099): n is a, c, g, or t
  misc_feature (1108)..(1108): n is a, c, g, or t
agcgggtcgtggcggccgaggctcgggcctccaggaccactggctgcccatgagagacgaaggatggcatccaagggggccggcgtgtctttctcccgcaagagctgtaggctgacctcagatgctgagaaatccaggnnnnnnnnnnnnnnnnnnnnnnnnnnnnnnnnnnnnnnnnnnnnnnnnnnnnnnnnnnnnnnnnnnnnnnnnnnnnnnnnnnnnnnnnnnnnnnnnnnnnnnnnnnnnnnnnnnnnnngnnnnnnnnnnnnnnnnnnnnnnnnnttttggacccgctgcagctgggaggggagctgtccaggaggccggcctgggaatgagcacaggcctgcggctggcagagagccgggtcgagccagccctggagaagcaggcccagctggaggagcagctgcgggacaaggtgctccacgagaaggacctgtcccagcagcagatgcaaagcgacctggacaaggctgacctcagtgccaggagggtccctggtgggtgctgcatgaggcaggcgtcactgcagaagagtgacagagctgggcctggcagtgaagcgtcttcagaagcagaatctggagaaggatcaggtcgacaaggacctcaccgagaagcttgaggccctggaatccctgcggctacaggagcaggcggccctggagacagaggatggagaggggctacagcggagcctaagggacctggcacaggccgtcctgtctgacgctgagagcggcagcctgcgtccaacagcgtccgaccgcagcctgcgggggctctcgggccagcggaccccgtctccaccgcggcgctcctcgccgggccgaggccgttcgccccgcagaggcccctccccggcctgctcagacgactccacgctcgcttgccctgattctctccgccctgcacttttgccagctgaaagttccagggagaagagcaacctggtccacagccctgcaggtggcccagcagcaaggccgaggagctgccgcaggagcgggagaagctgcaggttgcccangaggagctgcncgccacgagnaccggctggaggaagagcagaagagacgtncanatggcgcacggntcgcggganctgagc

SEQ ID NO: 441013 - DNA, 1168 bp, Homo Sapiens
  misc_feature (123)..(131): n is a, c, g, or t
  misc_feature (735)..(860): n is a, c, g, or t
cggcgggttggtgcgcccgccagaccccttgtgcgaaaaatcaaactcggcccgcgccctcgagggagttccgcggttccgtccctatttctggagcgcgatttagtggtgggtgtatcggcnnnnnnnnncccagcgcttgtacgtattcgtgcttctcccacaagaacttgtcccagctcgtctgcctatgagagcagcgcgataaaggagttagatggggggaggggcgccacgccactataattgttcttctcgatgatggagaaagcgcgcggtggggggaatgggcgtacgcgtcgggtcccgaatataaaggtgcggtattgagagagtggcgggggcgacttccgcgcgggatgccagcgccttatccccggccgcttgcaccgccgctcgtacccgcttgggctttgagtgtcaggctagccccaccgaaggggacgccccttcggggcgcctggatggttcaagtccgtattaacgggttgggttggtgccatgtggggggagtgggggacaagggtacctgtctttgtttggaagcccccttgttccccgcaaggtgggtccgtccaagggtggggaccatatttggtcccaagggggtgggcgcgggcccggcttttcttaccatccggcaggccgggtggttgagggccccagggccggcgtgctgggtcagctcccctttccagctgcagcggggtccaggggtttaccgtggtttcagtnnnnnnnnnnnnnnnnnnnnnnnnnnnnnnnnnnnnnnnnnnnnnnnnnnnnnnnnnnnnnnnnnnnnnnnnnnnnnnnnnnnnnnnnnnnnnnnnnnnnnnnnnnnnnnnnnnnnnnnnnnnnnnccggtggctgctgggggtgcatggtcagaagaggaaagatgcggttcaggtagtcattcagcagcttctcctgcacaatgcctgtgaccctggatttctcagcatctgaggtcagcctacagctcttgcgggagaaagacacgccggcccccttggatgccatccttcgtctctcatgggcagccagtggtcctgggggccggagcctcggccgcagcgacccggctcacaacatccgcccaacctcttggctacggcgtccgttcagggccaaatcacgcgcacgcttgcgcgctgagcctcccgct

SEQ ID NO: 441014 - DNA, 942 bp, Homo Sapiens
  misc_feature (204)..(204): n is a, c, g, or t
  misc_feature (253)..(255): n is a, c, g, or t
  misc_feature (292)..(295): n is a, c, g, or t
  misc_feature (297)..(297): n is a, c, g, or t
  misc_feature (348)..(348): n is a, c, g, or t
  misc_feature (361)..(361): n is a, c, g, or t
  misc_feature (363)..(364): n is a, c, g, or t
  misc_feature (369)..(369): n is a, c, g, or t
  misc_feature (372)..(372): n is a, c, g, or t
  misc_feature (380)..(380): n is a, c, g, or t
  misc_feature (394)..(414): n is a, c, g, or t
  misc_feature (422)..(424): n is a, c, g, or t
  misc_feature (457)..(457): n is a, c, g, or t
  misc_feature (474)..(474): n is a, c, g, or t
  misc_feature (499)..(499): n is a, c, g, or t
atattcacatcaagtacatagaactttttttgccttttatataatacagtttttaaataactttacacagaaataaatttcttcaatctgaatttcagctatctttttttattctccatgctttctatccaaactgaacaatattttctgttatacaaatttacatgagaaaaactccaaagtacaaatgaagggccctgagcnggaaagagaacccaagtatcaggaagtgggtatgggggagaattaaaannnataataaaagattcaagcgaacattgagaataggggnnnngngggggccctcctccctttggctggcaataaatgtcttttttatgaattganaaataagctttancnntagtnacnccattgtnatttttgcgaagcnnnnnnnnnnnnnnnnnnnnncaattacnnngtccccatcttttcactgggcgcgccccaggcnccacggggcccttttcnatgcgtgagtgggctggagtgtacnaaacccgcgacctttggcggtggccggcgagagggatgtgggtgtgggtgcgccataaggtttggggtggtgaaacaggaaccgtgaattcactgcagttcaaaacaggaagcatctccctttccctctcccttaccggagtcatgtcctcttaccaaggaatacatgaaaaggggggatttcctttttctatggtactaaaccacagagcaatgacaactactgaataaaattcagagtcacctgttgttgcatgatcaaattcaatcccctgatcagttgtatgatcctatcttaggtaaggcagcacttgccatgttgaggtaaggttcagatgtacaaccaacaaatgagcattacacaaatacatatcactgtgatacagtcctcaacaatcaggcgatatcctgacgggccaactgagtctatatatgtggaatggc

SEQ ID NO: 441015 - DNA, 941 bp, Homo Sapiens
ggggttcttattcctaccctccacagctccatgaacttctttcttcttttccatcctttctgttcaggcctgtcctgtcctagtcactcatccttcatgctctattttccttcagctcttatgccagaaccccctccatcgtctacgttatctgcatcacttccaggtccaccctttctttcggggtgtggccttcgacccagagctcctacagaagcagccagtgaactttgtcacggagacacaagctacccagcccagttcagcggagaccatgccctttgacgactttgactgtgatctggagtccttcttgctctaccctatccctgcttgagcctctctactgtaaattggggcccggctgggagcctgaagatctccatccctgcctactcagtatgaccaccttgataatccagtttgtttttattttgtagcctcttaccgttctgctctcctaggctttagaccagagttccaacctggacattctgctactggcagccacagctggccctattccttccctatcatacaacctacctctcaattcaacatgtcagatcagggtggtgaccttttccttttctttacttctccagtgctctttaccctcaggctgtcagccagagctgcttctgcttgtttctctgccatgtttcctttcttgagcaataataatactttggttctctttcctgctcaggtcccttcatttgtactttggagtttttctcatgtaaatttgtataacagaaaatattgttcagtttggatagaaagcatggagaataaaaaaagatagctgaaattcagattgaagaaatttatttctgtgtaaagttatttaaaaactgtattatataaaaggcaaaaaaagttctatgtacttgatgtgcatatgcgaatactgctataataaagattgactgcatgga

SEQ ID NO: 441016 - DNA, 684 bp, Homo Sapiens
  misc_feature (141)..(150): n is a, c, g, or t
  misc_feature (652)..(652): n is a, c, g, or t
ggctttgaggcacttgacagtcagtttgcatattcaacaagtctacgtgagttacaatattgtctactataatcattgccctttataagagcaaatgctaatggtaattaataacatataccactcaaagaaaatcacaannnnnnnnnnccttttgaacaagagtaacctatattttgggagttggtgtgcaataaggctaaaacaaccaaattataaaacagtatacctgacacagtatgttgaggaaatatgcatctgtttcatagtttttgtacttatgttaatgccttactaagctacacatatgtaaatagtatgttttcttgctaatatattaaatccaatagaatcattaagttctcattctcctttgtgacttgtaactttatcagataatttaatgatgaaagcatatgcccaaacctgcagatcatatgtactgtcatctattacaaccagaattctcctcacatttcatttttcctaaaagggaattgagaatacctgcaacatcgttaaagagaatgttgtagtgtgaataaaaactagaactcagtggtctaagaagtatgtattaatttggcaagtgatttttccctcctaagaataagatgaacatgtccaaatgttacctggggcaacttcacanatacaagagtatccaatcctcaattccccaaa

SEQ ID NO: 441017 - DNA, 1324 bp, Homo Sapiens
  misc_feature (124)..(136): n is a, c, g, or t
  misc_feature (146)..(230): n is a, c, g, or t
  misc_feature (241)..(260): n is a, c, g, or t
  misc_feature (262)..(262): n is a, c, g, or t
  misc_feature (264)..(264): n is a, c, g, or t
gggggggaaatccacccccttttttctggcccagggttttcttgggaaacacgttattgcccccgttccctttcctcttgggggccccccgccccaaaaaaaggtgtttaaaaaattttttgannnnnnnnnnnnncgccccaagnnnnnnnnnnnnnnnnnnnnnnnnnnnnnnnnnnnnnnnnnnnnnnnnnnnnnnnnnnnnnnnnnnnnnnnnnnnnnnnnnnnnntgttgttttgnnnnnnnnnnnnnnnnnnnntntngtatttctgtatttgattttatttggtatatgccactatgaccttattttagtagaaatccattacaggatttttaaattatcattagtcaactccacaaagacaataatactgctgtggaagaccgaaggggaaaaaaactgatatatttatttacaattccctatattgtaaacatttaatctatatattgttactaacttataatgagacaaggaaatgatgccctgtatttctattcatattcagcaatagcatattataatagaacatcagattttcttttccattagcattatgctttctttaaataattatctaaactttcaaaagaactaaatatgtaagtgctatacaactaaatctacttaagccaaatatttggcttataatttcatttttagaataacttaaagtgctataagcaacctggcaatcaacactttctgtaagaacaaaactacctttaaacattaatttacaagatatacaatgtttatctggaatagctgaaatttcagcacaaagtcactgtcacatgtataacagcaggattctttttctgcataacatgaagctttaaaaatcaactgatgaattattgccacaatggctattattggtttcctacaagaagaggatatgaactactagtgtattctatctttttcatttttttggaggtcactctgacagtaagtttgcctattcaacaagtctactgagttacaagtattgtctactataatctttgccttgaatagagccaaatgcttaatggtaattattaccgtttccatcaaagacacttccgactttttttcccttgtgaccagaagtaccccatattgggagctggtggtgcaggaagctaccacaaagtaatacagattcccgacatcgaattgggggaatgcacgttccactttgacaaggaagccccaacaaccaaattatttttgtcctcgaaatacccaaactgatctactggaacacctacgaataaggaaatcacacgtcatggtgttaaaaccctcatttaagaagagaatattcacag

SEQ ID NO: 441018 - DNA, 915 bp, Homo Sapiens
gcaaactgttttgtcactgtagtaaggctctagtgctggaaatttatctttgacagaggaagaatgcttttgaaaacagttcttacgtgattttatgtaacttaatttgccctggaaaggaaatgtctcgtctctggtatgggaaaaaagggagaagacatcaaccaattaatcataaatacactctgattactacaagggaagacataaattcaaagcaggttgctacagtgaaagcagacctggagtctgaatcttttcgaccaaacctaagtgatcccagtgaacttttactgccagatcaaattgaaaagcttaccaagcatcttccaccaagaacaattggctatccatggactcttgtttatggtactggaaaacatggcacaagcttgaaaactctttatcgaacaatgacaggtttagacaccccagtgctgatggtgattaaagacagtgatggacaggtttttggtgcgttagcatctgagccactgaaagtgagtgatggcttttatggtactggagagacctttgtttttacattctgtccggagtttgaggtctttaagtggacaggagataatatgttttttatcaaaggagacatggattcactagctttcggtggtggaggaggagaatttgcgctttggcttgatggagatctctaccatggaagaagccattcttgtaaaacgtttgggaatcgtacactttctaagaaggaagatttctttatccaagatattgaaatctggggttttgaataacttaaaatgctctctgtcttagcaggagaatggcccaaacctgacatgtacaagcattgtttggaaagttcaagaagcaatacagtgtaacatgtcacttgtgcctttaaaattagtctgtatcaccatttattacagttat

SEQ ID NO: 441019 - DNA, 1247 bp, Homo Sapiens
  misc_feature (24)..(24): n is a, c, g, or t
  misc_feature (54)..(54): n is a, c, g, or t
  misc_feature (83)..(83): n is a, c, g, or t
  misc_feature (110)..(110): n is a, c, g, or t
caaaggtccctgggtgggaaagangcctgggtaaaagcttttccaaattggganctgggcaagtaaaaagttccactgggganccacttaaggtttgggtcgaaaaagantcaagactcccaggtctgcctttcaactgtagcaacctgcctttgaaatttaatgtcttccccttgtaagtaatctggaggcgtctgcagagtgtgcgcagttcttcagtatttagagcatcgatctgcggtgatactcagccactgacactacctcccattctctggctgctgcttgattactagaatcctcgattgtttcaggactcctcgatcgtgtttttactacgtataaagtccaggttctctggtatattcgccagtatcttctgcagtatatttctggactccactgaatgaagaaggcatacaagtgatctgtcctttcttgtggcacagcatacctatattcatgtttcttatctctctgtgcatactgttgcattgtagcacttgcttgagataccaacgttttcctcattggttttccaactctgagacacaagaacttatgtaatcgatgcctttgcttttcttttaaaagtgcagaactttctatgtgtccatcagcagatgtaattttatgcttagcttctttttgtgacacttgttgaatattttccctttgctgtttagtttgttgcatagtatgggttttccaaagtttgcgtagctcttctgcctctgtctgtgagtcctgattttgctcctttccttgttttcctttgttaacactttgcttttgtttaaattctgctgtttccccacaaggcatattttctttttgactctcttcttggtgtaacgaattctcatgaagaaaagaatcctggtctgaattaccttttatacttgtgctgtcttctttaggacctgatattccttgaaagttatctgcaatctgatcttccttaatggccatttcaagattatttaaatcagttttatgacataaagtcccaacttcatttgtagaatgttcagtatcagatcttaagtgaccaggagtaccagtagattctgatttgactgtcagactttctacttcagcctgattgacagtttgcacagattctgatgacgcaccagaagatttatcttgtcgcagttcatctgaagatacaagctcctctcgtataggggaaagttctgattctgtgaacacatcttcagaaagagactcctcagtgctccgct

SEQ ID NO: 441020 - DNA, 847 bp, Homo Sapiens
  misc_feature (673)..(673): n is a, c, g, or t
  misc_feature (676)..(676): n is a, c, g, or t
  misc_feature (748)..(748): n is a, c, g, or t
  misc_feature (777)..(777): n is a, c, g, or t
  misc_feature (824)..(824): n is a, c, g, or t
  misc_feature (832)..(832): n is a, c, g, or t
  misc_feature (837)..(837): n is a, c, g, or t
aagttaaggctataggtttattcacatatatacacatttatatgtaagtggtctatcccatgtgaattttttgatgctgggtaagccttgagctacgattaaaagctttgccacagtcattgcatttataaggcttctccccggtgtgaattctctggtgtataattaggtgtgaacgccacctaaatatcttctcacagtcttcacactgatgcagtttctttatagtattaacctttttacggctcacaaaggtggacccttccagggcattcccatattcgtaaaaccactgggccctagtgtgtattctctggtgttcaataagatatgagctccggctgaaggcttttccacactcactgcactcatagggcttcacccctgcatgaattatctggtgttggaaaagggttgagttttgactgaaggctttcccacattcattacatttatagggcctctctccagtgtgaaccctttgatgtattgtaagctgtgtgctcatactgaaggcttttccgcattggaggcattcgtagggcttctctcctttatggattctctggtggtaaataaggctgggactctgactgaaggcttttccccagtcattacacacataggggttcgctccagtgtggattcgctgatgctgaataaggtgtgagcnctnaacaaagcctttgccacactcatcacatttaaatggtttttctccagtgtgagttctctgatggcgaaaaanccgtgaactacaaccaaaggcttttgtanacttgttgcatttataaggcttctctccagtgtgaatcagctgatgntgtctcangcganagatccacct

SEQ ID NO: 441021 - DNA, 1224 bp, Homo Sapiens
  misc_feature (28)..(29): n is a, c, g, or t
ttcaactttacatgccttcaatacatcnncaatatgccacattattattggtatctttggttaatatatgtctcttatcattaagaatgtggcactgaataatactagcaccccctttaataacctggtcaggttgtgtacaaagaggtgttataggatttgtacagtcattgtcataatctccagaggctctaaaattatgaattcctttcaaagtccatttatttactgtagacttagttgttgcaacccaaattgcaggaggaggatcagctgatctatcaagctccatcttgagaactggtgctttttcttcacaaattagcacccgaatgtcagggtttcttaggtctgtacaataaatcttcctgtcccttccaccagaatacacatgtgtgaaggcatcattgacttgcagcgcccaaacaccttcatcatggactcggtatgttgctatacatctctgctggccaagggaccaaaggcgaattgtcccatcagaactgcctgacaggcattgcgtgccatctctgtttaatagcaatgccttcacattatccgtgtgccctttaagcttcattagttttgcacatgttcttggatcccatacccgtaacaccttttcagtggaccctgatacaatgattgttcccagttgattcatggccaggctataaatggaatctttgtttccacttaaagaagaagttgtgacagtgttatttgaggcagtcaatgctgttagagtattcacatcccaaaggaatatttgtctgtccaacccagctgatgctactagttctttatccttggcatatgctaaggcctttacgtaatccttatgtgtccttaatgttgacatgcaaaatcccttgtgtgcattccatacttttactgtcgtgtcagaagaagcagatattaatgttttcccattacaacagagtacaatgtcgtttacccaatcagtatggtgttccatagatgctatatatggatcttgcttgtgctgattgacactccatattcttatgatagagtctcgaccggctgtgaaaagtctatttagtgctggatccagctgcagagcattgactccatttcggttgtacttctccacttcatctcgaataacataggaaacctgcactttcctccgccctgctgtgttctgccggtgatgggccgccatcttgcatgttgacactccgacgtcactcccccgct

SEQ ID NO: 441022 - DNA, 580 bp, Homo Sapiens
aggatccttaattaaattaatccctttctcccggcacttccgttcacgcaccgctttctgtttttcctgagcctttgcctgctaagagggagaccaggtcatggcagccatgcctctgaaagctcaataccaggactttccctcaagtccctacctgtcccctctgccccacactctggcccggagccagaggattggctctggggcagcaggaacctgttgttttaggagatggtgaccttcgaggatgtggctgtgcacttcaccaagacagaatggactggcctttctcctgcccagagggccctgtacagaagtgtgatgttggagaattttgggaacctgactgctttggggtacccagttcccaaacctgcactgatctcacttttggagagaggggacatggcttggggcctggaagcacaggatgatcccccagcagagaggaccaaaaacgtctgtaaagatgttgagaccaacattgacagtgagtccacattaatccagggaatttctgaagaaagagatgggatgatgtcacatggtcagctgaagagtgtccctcagagaactgact

SEQ ID NO: 441023 - DNA, 1041 bp, Homo Sapiens
  misc_feature (614)..(615): n is a, c, g, or t
  misc_feature (618)..(618): n is a, c, g, or t
  misc_feature (620)..(620): n is a, c, g, or t
  misc_feature (624)..(624): n is a, c, g, or t
  misc_feature (626)..(626): n is a, c, g, or t
  misc_feature (630)..(630): n is a, c, g, or t
  misc_feature (638)..(638): n is a, c, g, or t
  misc_feature (651)..(652): n is a, c, g, or t
  misc_feature (655)..(655): n is a, c, g, or t
  misc_feature (663)..(663): n is a, c, g, or t
  misc_feature (666)..(667): n is a, c, g, or t
  misc_feature (676)..(676): n is a, c, g, or t
  misc_feature (680)..(682): n is a, c, g, or t
  misc_feature (691)..(692): n is a, c, g, or t
  misc_feature (700)..(702): n is a, c, g, or t
  misc_feature (706)..(706): n is a, c, g, or t
  misc_feature (728)..(728): n is a, c, g, or t
  misc_feature (730)..(730): n is a, c, g, or t
  misc_feature (739)..(739): n is a, c, g, or t
  misc_feature (749)..(749): n is a, c, g, or t
  misc_feature (753)..(753): n is a, c, g, or t
  misc_feature (771)..(771): n is a, c, g, or t
  misc_feature (779)..(779): n is a, c, g, or t
  misc_feature (781)..(781): n is a, c, g, or t
  misc_feature (860)..(861): n is a, c, g, or t
  misc_feature (864)..(864): n is a, c, g, or t
  misc_feature (868)..(868): n is a, c, g, or t
  misc_feature (870)..(872): n is a, c, g, or t
  misc_feature (877)..(877): n is a, c, g, or t
  misc_feature (890)..(890): n is a, c, g, or t
  misc_feature (892)..(893): n is a, c, g, or t
  misc_feature (906)..(906): n is a, c, g, or t
  misc_feature (918)..(918): n is a, c, g, or t
  misc_feature (922)..(923): n is a, c, g, or t
  misc_feature (937)..(937): n is a, c, g, or t
  misc_feature (944)..(944): n is a, c, g, or t
  misc_feature (947)..(947): n is a, c, g, or t
  misc_feature (955)..(955): n is a, c, g, or t
  misc_feature (959)..(959): n is a, c, g, or t
  misc_feature (974)..(974): n is a, c, g, or t
  misc_feature (976)..(976): n is a, c, g, or t
  misc_feature (979)..(979): n is a, c, g, or t
  misc_feature (989)..(991): n is a, c, g, or t
  misc_feature (1001)..(1001): n is a, c, g, or t
  misc_feature (1005)..(1006): n is a, c, g, or t
  misc_feature (1008)..(1008): n is a, c, g, or t
  misc_feature (1011)..(1011): n is a, c, g, or t
  misc_feature (1017)..(1017): n is a, c, g, or t
  misc_feature (1022)..(1022): n is a, c, g, or t
  misc_feature (1025)..(1025): n is a, c, g, or t
  misc_feature (1028)..(1028): n is a, c, g, or t
  misc_feature (1032)..(1032): n is a, c, g, or t
  misc_feature (1039)..(1039): n is a, c, g, or t
tgcaaaattcaccaaaacaatttttatttccagtgtttaattgggtatgcacacaggcatgacacaggtttggattcattaagtcctcatgcagaattatattcttctcgataaagaagccagttccatccaggatccactatctacacacctatgttacaacattatatcaaatctggtatctgaagaaaagatacacatttaatatgttcatttaagttacgtattttacagaaagattaaaaattcaagtcacacaaaactcaaaaactgtattaaaagtttgaatataaaactcagatccacctggaatgactaaagaatggaagttctgtatccacctgtgttaaaactggtaaatgtaatgatatctgttaccaataaaacgcattcgtttattcaatgtaagtaagttatctaattttaacaatatggcaccctaaaaaccaactgtatttttatgatgaggcacttttgttagtgatgaaaccaaaagaacaaatttgctgcacactgatgccagcgattttcttcagtgattttgggtatatgctatgtagtaagttgcaacaaataccttgctcatttgtatacaactatccgatatatttttnngtntntatntntgtntgtgtgcntctggctgtggtnntgngctgtggngcnntttgcggcngtgnnnaatgatgtnnccagcccnnntganggctgcgtggtgacggttctgntncggcgagcntcttgtcagngttnctggaccgtgtaacagtngttttttncntgctagagtggacatacccccagtttaaagacagggatgaaactctgctttagtgcctggggtttcagacagtttatgnngtngggnannngctgnagaacttacaatntnnctcacgttctggnagctttctccgntttnntggtcaggtgtatntggtggntangctagaangggnatgtttgatgaaccnanggnctgggaaaannnactgttgttnctannanatnaaaggngagtnggncgngggnattctcntg

SEQ ID NO: 441024 - DNA, 997 bp, Homo Sapiens
  misc_feature (8)..(8): n is a, c, g, or t
  misc_feature (12)..(13): n is a, c, g, or t
  misc_feature (18)..(19): n is a, c, g, or t
  misc_feature (24)..(24): n is a, c, g, or t
  misc_feature (36)..(37): n is a, c, g, or t
  misc_feature (43)..(43): n is a, c, g, or t
  misc_feature (52)..(53): n is a, c, g, or t
  misc_feature (60)..(60): n is a, c, g, or t
  misc_feature (63)..(63): n is a, c, g, or t
  misc_feature (65)..(65): n is a, c, g, or t
  misc_feature (70)..(70): n is a, c, g, or t
  misc_feature (73)..(73): n is a, c, g, or t
  misc_feature (76)..(77): n is a, c, g, or t
  misc_feature (82)..(82): n is a, c, g, or t
  misc_feature (88)..(89): n is a, c, g, or t
  misc_feature (93)..(93): n is a, c, g, or t
  misc_feature (95)..(95): n is a, c, g, or t
  misc_feature (99)..(99): n is a, c, g, or t
  misc_feature (102)..(103): n is a, c, g, or t
  misc_feature (109)..(109): n is a, c, g, or t
  misc_feature (117)..(117): n is a, c, g, or t
  misc_feature (125)..(125): n is a, c, g, or t
  misc_feature (130)..(131): n is a, c, g, or t
  misc_feature (133)..(133): n is a, c, g, or t
  misc_feature (137)..(137): n is a, c, g, or t
  misc_feature (141)..(141): n is a, c, g, or t
  misc_feature (148)..(148): n is a, c, g, or t
  misc_feature (151)..(151): n is a, c, g, or t
  misc_feature (157)..(158): n is a, c, g, or t
  misc_feature (169)..(169): n is a, c, g, or t
  misc_feature (198)..(198): n is a, c, g, or t
  misc_feature (205)..(205): n is a, c, g, or t
  misc_feature (215)..(215): n is a, c, g, or t
  misc_feature (217)..(219): n is a, c, g, or t
  misc_feature (222)..(222): n is a, c, g, or t
  misc_feature (230)..(230): n is a, c, g, or t
  misc_feature (234)..(234): n is a, c, g, or t
  misc_feature (253)..(253): n is a, c, g, or t
  misc_feature (270)..(270): n is a, c, g, or t
  misc_feature (285)..(285): n is a, c, g, or t
  misc_feature (291)..(291): n is a, c, g, or t
  misc_feature (297)..(297): n is a, c, g, or t
  misc_feature (309)..(309): n is a, c, g, or t
  misc_feature (316)..(316): n is a, c, g, or t
  misc_feature (931)..(932): n is a, c, g, or t
  misc_feature (934)..(938): n is a, c, g, or t
  misc_feature (941)..(941): n is a, c, g, or t
  misc_feature (944)..(945): n is a, c, g, or t
  misc_feature (948)..(948): n is a, c, g, or t
  misc_feature (958)..(958): n is a, c, g, or t
tagagagntatnnaaagnnttttntatgggccttannaaagcnttaccccanncccaganaantncatantanagnntttcntgcacnnaagntncaanatnnacatgnaatagatnatgggganatgtnntntgangaantcctggnccnaatatnntcccagccttncgacctacgttatgcagccaagttctatnggagaanatattcctgnannnatnctctcgancttntaaaaaaggcctaggagtnacaccaacatattcatncctggcaccaccagntggacnttgctnccgggcaccaangagtcanaatcagagaaggccacacaacgacagacctaagggaaaggataacctaaaggttgatgagctggtttcatctgctatatttcatttcaaagcagccatggaacgagactctatgtttgcatttgcctacacagacctggccaacatgtatgctgaaggaggccagtatagcaatgctgaggacattttccggaaagctcttcgtctggagaacataaccgatgatcacaaacatcagatccattaccactatggccgctttcaggaatttcaccgtaaatcagaaaatactgccatccatcattatttagaagccttaaaggtcaaagacagatcaccccttcgcaccaaactgacaagtgctctgaagaaattgtctaccaagagactttgtcacaatgctttagatgtgcagagtttaagtgccctagggtttgtttacaagctggaaggagaaaagaggcaagctgctgagtactatgagaaggcacaaaagatagatccagaaaatgcagaattcctgactgctctctgtgagctccgactttccatttaaatacatactctaggaaattagctctaagtttttcccttcattttgggttctcctgtttgnncnnnnnatnatnnaancccttgttantatagagctaatattattaatagtattggtaccaagcat

SEQ ID NO: 441025 - DNA, 1047 bp, Homo Sapiens
  misc_feature (7)..(9): n is a, c, g, or t
  misc_feature (19)..(19): n is a, c, g, or t
  misc_feature (22)..(22): n is a, c, g, or t
  misc_feature (32)..(33): n is a, c, g, or t
  misc_feature (38)..(38): n is a, c, g, or t
  misc_feature (55)..(55): n is a, c, g, or t
  misc_feature (68)..(68): n is a, c, g, or t
  misc_feature (71)..(72): n is a, c, g, or t
  misc_feature (117)..(117): n is a, c, g, or t
  misc_feature (128)..(128): n is a, c, g, or t
  misc_feature (136)..(136): n is a, c, g, or t
  misc_feature (151)..(151): n is a, c, g, or t
  misc_feature (159)..(159): n is a, c, g, or t
  misc_feature (219)..(219): n is a, c, g, or t
aatcagnnntcacctttanttntccttccttnngtctntgtgtgggcctcttgantggatcatttgcnccnnagcatagtcccatctgtgatgcagaaagaagaagttgtgtcaccnccaaggccttntttaaaanttcgagagctttgtnctaggtantttttctcctatagaacttggctgcataacgaaggacgtaaggctgggatgatatttggnccaggatttcttccatatacttttccccctccagcttctgcatgtacatcttgaagcttcagtgccagaaaaaccttaatatagctgttatctgggttcagggtaacagcctttctcaaaggccccagagaaaagctctttacagacccttctctatcagaatcatccagccgatacactgtgatagcatagccgatgttaaattctggattgtcaggctccacttccagagccttctcaaaagccgctttagccttttgataatactttcctccaaatttcaagagtgcccagcctttctcacagtcagtctcaggacactccaacttgtagttagaaggactggacaatttcttacagacattccctatcttacctgtatacttctgagcttcttcaagctggtccatgtgataatacacccaggcatagtttccccaagtgaccaggcttcgtacttcttctttgtctgagtgttcttgctggattatttcttctgcttgttccaagcactcaagggcgtctttattttggccttttaggtgtttcacataggccaataggttataaagagcaagtctagattttgtggtaagaaattcaagctgttgcccaattgtatcttctacctcaaacagatcaatgtcttccttaagtaaattccatgtaaaatgacattctaactccaacagaatggccttcaaggtgtccttacgaatttcactcatgatggcagcgctctgcaggccgtccgggcggcgcagtccctcggatcgctctctcctcagcaccggggaccgcgggaagccgcgcggtgggcgtgcgcga

SEQ ID NO: 441026 - DNA, 1529 bp, Homo Sapiens
  misc_feature (11)..(11): n is a, c, g, or t
aaacgataggntcaccagcaattctctttaatcctctttcttttccttctaaaagcttttgcaaagtccaatttatttttacagtaaatagattatcttttaagaaaacgcactagcaagattgtagcaaagtgtgtttatgcaaacaggtggtgcagagacagaggggcggaccttgtgggcagctggaggaccatcccagctcatgggccacgcacagatgggagcacctcagtgttttcagccaagagaacacaagtctcgggatccatgtggctccctcaggccctggacccaggcaggcaggacacccttgaccatggggcaggggacatcccagcatcttgtctgtacccccaccacctgcgtggcacctggtcctcagacacctgcgtggcacctggccctcaggcacctgcgtggcagctccacgggccaggcccactgtccagttgctcctgccctggagttggggccgtggggagggaaagcgcagtaatagctgagtgttcagaggaggggctgggctgcaggcattgctggttcagattggtgctctccacctggctgagtgaggcggcaggaagcagcggccggaagattcctagagcttagcagagaaggatgcgaaatccggcagccctttgacaccgtttgggaacgtcaaccatgccccgccatcggccaccagcacggcccccgtcacgtaggaagccagagggctggccaggtagagcacgctgtgggcgatctcggtcttgttccccagcctctgcagcgggctggcagtgaccttggtgctcaggctggcctgagggccacccagtcgccggagcccctctgtgccactgatggggccaggggcgaggctgttgacgcggatgttttggggaccccactccacagccaagtgccgcgtcatcgcgtccacagcggccttggcggagcctgcatgcacctggagcgcctgcccccggttccccagggtggcagtgatgttcacgatcacccctccgtggtcccggaagaacttctcatagagcacacgagacacattgaaggtgccgctggtatcgatgtccatcacggtcttgaaggcgttgaaggacaaggcgccagcggggcacaggaagttcccggccgcacagttaatgagaatgtcgattctgccaaactccttcagagcctggtccacggcggccatgacagctgggggcgctcggacgtccatagagagagggaggcagcgccggccggtggccccagccagcttcctggcggccgtatggcagccgtgccgcatgaaaatctcagcaatccggaacccaatcccagagccgcctcctgtgatgaaggccactttgtcccgcagcaggtccgggcagaagaggtggcggtacgcggggagacagtcgtccccctccacgtcgggcggcggctgggccatggcgctcccgtcggggactgcggggacaacgggcgggagcggcctcggcctccaggacccggcgcgcagctgcgaactcgcc

SEQ ID NO: 441027 - DNA, 968 bp, Homo Sapiens
taatgccgctggatccggccggagattcttgactttcagagaggatcgaatctcggcgccctggacccgttgggacgtaaaccaagcgccgccttggccaccagcaggcccccggtacgttaggagccaggagggctgcccagttaggcacgctgtggcgattctcgggtcttgttccccagccttttgcagcgggctgcagtgaccttggtgctcaggctggctgaggccaccccagtcgccggagccctctgtgccactgatggggccaggggcgagcttgttgacgcggatgttttggggaccccactccacagccaagtgccgcgtcatcgcgtccacagcggccttggcggagcctgcatgcacctggagcgcctgcccccggttccccagggtggcagtgatgttcacgatcacccctccgtggtcccggaagaacttctcatagagcacacgagacacattgaaggtgccgctggtatcgatgtccatcacggtcttgaaggcgttgaaggacaaggcgccagcggggcacaggaagttcccggccgcacagttaatgagaatgtcgattctgccaaactccttcagagcctggtccacggcggccatgacagctgggggcgctcggacgtccatagagagagggaggcagcgccggccggtggccccagccagcttcctggcggccgtcagcactcgcggcaggctcctactggcaatcaccgtatggcagccgtgccgcatgaaaatctcagcaatccggaacccaatcccagagccgcctcctgtgatgaaggccactttgtcccgcagcaggtccgggcagaagaggtggcggtacgcggggagacagtcgtccccctccacgtcgggcggcggctgggccatggcgctcccgtcggggcctgcggggacaacgggcgggagcggcctcggcctccaggacccggcgcgcagctgcg

SEQ ID NO: 441028 - DNA, 1360 bp, Homo Sapiens
  misc_feature (380)..(389): n is a, c, g, or t
  misc_feature (1257)..(1257): n is a, c, g, or t
  misc_feature (1276)..(1276): n is a, c, g, or t
  misc_feature (1292)..(1292): n is a, c, g, or t
  misc_feature (1298)..(1298): n is a, c, g, or t
  misc_feature (1308)..(1308): n is a, c, g, or t
  misc_feature (1326)..(1326): n is a, c, g, or t
  misc_feature (1332)..(1332): n is a, c, g, or t
actgattacaagtgctttaatccaggaatgaaaaggaagaggagttctgattgggtggacccttctcttggagagaaggcaaagctgccaggcagaaggtgggagggggaggaagaggagagaggaagctcccttgacaggcataaaacgtccctgtgattgcggacaagtggctactctcaggccacattcagccgaggctgggtgaggctggtcgggaagagggagacggaggtggaagcgggttcaagttttgacgggtggtcacctcagaaagggctccttctgtttagcaaaactccccaatccttcgcctggcttgccaggagaacagcttgcttgaaaagcaaaggctgtcatcctgtaattaaatctgagannnnnnnnnnatgtgacgttgagatgaagccacttacataacgcgactaaaaataagctgatgaaggctgcacacttacactctctgcctccagccctcctctccccagcggcccatcgtgctggctgacccagggtccgcgtcaccggctgtggcgtcgggttcctgtctgaagtcactcttcctccgcgccccgctcggcgccctgtgtgcatgagggcccatcgctggtgcccgggttgcagacccctggctcagagctggggtgctgaggatcccccagcccgcccaggcgagggttgacgcttatgagaggagacctgctgggtaccagctccatctgcctccttctcagtgactcctgacgagctgctcattttacacacacctgctcccacccccaccccacagtctggattgcgaaacctaccgcaccccacccccagtgcaggaagaaggtgaccctggtctggggtggggacagagagtctgggagggggtggtggctggcagtctcggtggctgcgacgcctcttccgctcttccttccctgggaggaggcgggcaaagcgaagcctctccgctcagtcgatggtttccttcaggacgtctcatagaggtgtgggtgagatcccaggtctgggccgcaatttctagccacgctgcccaaccttcaggcaagcagtcaggttccacagctaccccaccacactctcagagtcgaggggaacaagaagagggagtggtctgtaaatgcgtcgggacaagagtgccctcctaactccacctggagctggcgtcagggcgatctctggatgcccagcccataagcctggcctgtctcttcctggggacccttggtactcagcacccccagncccccagcccccttaatancctttagaaaggcttncccatncagtgttganaagaccttcacaggacgntggtgnaaggcgaagtacagagttccttgggtga

SEQ ID NO: 441029 - DNA, 1845 bp, Homo Sapiens
ggggcagtggcgggcacgcgcagccgagaagatgtctccgacgccgccgctcttcagtttgcccgaagcgcggacgcggttttacgaagtctaccagagaggccttgaacaacaaaaacatcaagccattgttaagtaccttcagccaggtacctggcagtgaaaatgaaaaaaaatgtacccttgaccaagctttcagaggtattctagaagaagaaattataaatcattcatcatgtgaaaacgttttagctattatttctcttgctattgggggagtaactgaaggtatttgtaccgcatctacaccttttgtattgttgggagatgttttggattgtcttcctttggatcagtgtgacacaatattcacttttgtggaaaaaaatgttgctacttggaaatcaaatacattctattctgctgggaaaaattacttactacgtatgtgcaatgatctcctaagaagattgtctaaatcccagaatacagtcttctgtggacggattcagctctttttggccaggcttttccctctgtctgagaaatcaggtcttaacttgcagagtcagtttaatctggaaaatgtcactgttttcaatacaaatgagcaggaaagcaccctgggtcagaagcacactgaagatagagaagaaggaatggatgtagaagaaggcgaaatgggagatgaggaagctccaacaacgtgctctattccaattgattacaacctgtatcgaaaattctggtcacttcaggattacttcaggaaccctgtgcaatgctatgagaagatttcatggaaaacttttctcaagtattctgaagaagttttagctgtttttaagagttataaattagatgatactcaggcctcaagaaaaaagatggaagaattgaaaacaggaggagaacatgtatattttgccaaatttttaacaagtgaaaagctgatggatttacaactgagtgacagtaactttcgtcgacacatcctgttgcagtatctcattttattccaatatctcaagggggcaggtcaaattcaaaaagttcaaactatgtttttactgatgagcaatcactttggattgaagatactacaaaatcagtttatcaagtaagttcaacacgcaacaaacccatgattgaaaaaatggaaatttaggattttctttgtttcagccccaaatacgaaaataaggataaagttaagctcaggtacaagaccacaaacactccttggttctctgcctacaaaccactcctatgatgcagaaagttgttgaaagcttagtatattctttctaatcacagctactatctgaaaacccccccgatggagaaagattttcaaagatggtagagggatgtgtttttttatgcttacatcctcttcttagcaccaaatagaacttcagaggattcccctaaccaaaaagcactcgctttgtttttccccccctatatttaaccttgaagacaactggaaattttgggaaaaatgcacgttgccccactttttggaaagaaagaacctccgatatcgacctcacgagaataattccgaagaagaccaacccccccaggatttccttaggcgaaaggaacccctccaaaaatttctccggggaaaatgacgggccaaaaaaggcctttgaaaattttgtcccctcataccatcgaagccctggcaaaaccacaaaacaagggcaaccattgcccccttttggaagaaattcttttacaacacaccttttaaacggggcacacccgggaaaacaaggggggaaaaaaacactaatagggttggggacacctccccaatattgcgccgggagaacc

SEQ ID NO: 441030 - DNA, 985 bp, Homo Sapiens
tccgtcggaaattcaattttttgtttgtttccccaatagttgatttttccgggggaatccttccttagcattaggatttatggattttggaatttttaatttttcagaagttttgaaacaagaagccttttcttttgggaggtttggttacttcctttccccctccctttggggtgtacatccttcccctgtctagcagttttgcatctgcttctaccagggcccctgagtccctaagttctagaagaaagtcttatgatgccttcttggagcagctgtttcataagtatactgagcatatcacatatctggtcactgagcaagcaggatggacacaaagctggtctttgttatccctagggctcacaacttcctataaaaaccatagcccttggcaggaagactggcaatattttttcttagtttcttcccaaaactggataaaagtttccaccctagtccttggcttcaagaagtgaatctggctctggccccttgtcccacatggtgcacatttagtctctgttacttgtagccaaattcctggacaccaccacctgccttggatagagagtccagcaggcccaggctgcagttttgctcactacttggcatttctggtccatgaagatatttatcttgtttctggaagcccagccttgtctcttttgttttctcgtttatattttacccgtcattgcttttcacttgttaaaaattttgcaaaatatacatgttctcctcctgttttcaattcttccatcttttttcttgaggcctgagtatcatctaatttataactcttaaaaacagctaaaacttcttcagaatacttgagaaaagttttccatgaaatcttctcatagcattgcacagggttcctgaagtaatcctgaagtgaccagaattttcgatacaggttgtaatcaattggaatagagcacgttgtggagcttcccctcgtgccgaattcgccacccagccc

SEQ ID NO: 441031 - DNA, 543 bp, Homo Sapiens
tgacaccatcgagagaattatttttcataggctattctactctacagttttttaaacttttaaattgggtatgtgctccacattgaaggtatttgtaccgcatctacaccttttgtattgttgggagatgttttggattgttttcctttggagtcagtgtgacacaatattcacttttgtgggagaaaaaatgttgctactttgggaatcaaatacattctattctgctgggaaaaattacttactatgtatgtgcattgatctcctaggaagattgtctaaatcccagaatacagtcttctgtggacggattcagctctttttggccaggcttttccctctgtctgagaaatcaggtcttaacttgcagagtcagtttaatctggaaaatgtcactgttttcaatacaaatgagcaggaaagcaccctgggtcagaagcacactgaagatagagaagaaggaatggatgtagaagaaggcgaaatgggagatgaggaagctccaacaacgtgctctattccaattgattacaacctgtatcg

SEQ ID NO: 441032 - DNA, 1172 bp, Homo Sapiens
  misc_feature (512)..(577): n is a, c, g, or t
  misc_feature (643)..(643): n is a, c, g, or t
  misc_feature (704)..(704): n is a, c, g, or t
  misc_feature (707)..(707): n is a, c, g, or t
  misc_feature (755)..(755): n is a, c, g, or t
  misc_feature (772)..(772): n is a, c, g, or t
  misc_feature (780)..(780): n is a, c, g, or t
  misc_feature (844)..(844): n is a, c, g, or t
  misc_feature (848)..(892): n is a, c, g, or t
  misc_feature (938)..(938): n is a, c, g, or t
  misc_feature (942)..(942): n is a, c, g, or t
  misc_feature (948)..(948): n is a, c, g, or t
  misc_feature (953)..(953): n is a, c, g, or t
  misc_feature (981)..(981): n is a, c, g, or t
  misc_feature (1008)..(1008): n is a, c, g, or t
  misc_feature (1011)..(1011): n is a, c, g, or t
  misc_feature (1016)..(1016): n is a, c, g, or t
  misc_feature (1022)..(1022): n is a, c, g, or t
  misc_feature (1025)..(1025): n is a, c, g, or t
  misc_feature (1037)..(1037): n is a, c, g, or t
  misc_feature (1039)..(1039): n is a, c, g, or t
  misc_feature (1046)..(1046): n is a, c, g, or t
  misc_feature (1085)..(1085): n is a, c, g, or t
  misc_feature (1096)..(1096): n is a, c, g, or t
  misc_feature (1101)..(1101): n is a, c, g, or t
  misc_feature (1104)..(1104): n is a, c, g, or t
  misc_feature (1125)..(1125): n is a, c, g, or t
  misc_feature (1147)..(1147): n is a, c, g, or t
  misc_feature (1151)..(1151): n is a, c, g, or t
  misc_feature (1155)..(1155): n is a, c, g, or t
  misc_feature (1157)..(1157): n is a, c, g, or t
  misc_feature (1159)..(1159): n is a, c, g, or t
ctttgaatgagaatccctgggattcttatcccagcaaacctgtcttgttgctattaggagacgccgcctctggtgactgcgtgaaaatgtatcgctctgccgtgccggctgctgcacccacgattctgcccacccctcctgtaacccagcctgtttcacttctatggcactcaaggagttgcccctggtcctgtaattggacttcaggcaccatctactggtcttcttggcgcccggcccggtctcatcccactccagcgccctccaggaatgcccccacctcacttacagcggttccctttgatgccgccccgtcccatgccaccgcacatgatgcacagaggcccaccgccaggaccagggggctttgcgatgcctccacctcatggaatgaaaggtcccttcccaccgcatggcccctttgttaggcctggtggaatgccagggctcgggggcccagggccaggcccagggggtcctgaagacagagacggaaggcaacagccgccgcnnnnnnnnnnnnnnnnnnnnnnnnnnnnnnnnnnnnnnnnnnnnnnnnnnnnnnnnnnnnnnnnnncaccaccatcacaacagcctccaccaacacagcagcagccacagcagtttagaaatgataacaggnagcagttcaattcaggtagagaccaagaaaggtttggaagaagatcttttggaaatagggnggnaaatgaccgggaacggtatgggaaccgtaatgatgatagagataatantaaccgtgacaggaganagtggggnaggaggagccctgaccgggacaggcacagagacttggaagagagaaatagacgctctagtgggnatcnnnnnnnnnnnnnnnnnnnnnnnnnnnnnnnnnnnnnnnnnnnnnaggaagaagcccgaggaaaggaaaagcctgaggtgacagacagggnaggnggtaanaaaancgttgaacctcccattagccaagtgggnaatgtagacactgcttcagaacttganaanggggngtctgnggntgcagtctaaancntctgaanagttactgctgaggctactcatccgttgacccgaaaagnttctggctcanagcanagntctcgttaaaaatgggatttntgaaatgtgaagtgaacttccngggngtgngntnggggggtcagatg

SEQ ID NO: 441033 - DNA, 1020 bp, Homo Sapiens
  misc_feature (110)..(118): n is a, c, g, or t
  misc_feature (401)..(416): n is a, c, g, or t
  misc_feature (948)..(948): n is a, c, g, or t
  misc_feature (996)..(996): n is a, c, g, or t
  misc_feature (999)..(999): n is a, c, g, or t
agctaccagggccctagtttagaattcgccggggatttctctgtggggaaacaaaattgcgacccccgtgttgtgttataccataaaggggggcgacgggcccccgaaannnnnnnnntttaaaagagaaattttccaaggagcggcgggggacacccgccgaggggatatttactgaggaggtagcgtttattgtgcacgagcgcatagtggtggctgaggttggcaagggagtggtttggagaggttgataagggggagggtgaggaagaggggggatgcgctttaggaattacgtggggggggtggttttattttttaaagtttgttacgaaaatggagtttattaaaaacatccctattgttttgaggagctttcaccgttaccttgtcttaaattnnnnnnnnnnnnnnnntagagagcacttctaattacgatttgtaaactttttaaagtcaaaacttttaaaaagttacagcaaaaagggtaatatttattcatatttcagtattttttgttattttgtggctatttttaaatagaagggaagcaatcaaattgcttacagttccccaccagctggcgcggggctgcagtacagcgggagcggatataatacagcatctgtacacctcaagctctacactccaggaagtgtcactgtcacattttcacaaattccagtctctaacgaggagcctctgctgctgagccagaatccttttcgggttcaacggatgaggtagcctcagcaggtaactcttcagaaggctttaggactgcagcctcagacacccccttctcaagttctgaagcagtgtctacatttcccacttggctaatgggaggttcaacggttttgttaccacctgccctgtctgtcacctcaggcttttcctttcctcgggcttcttccttctctctacgagactctctatctctagaanctctctctctgcttgatgcccactaaagcgctatttctctcttccaanctntgggcctgtcccggcaaggct

SEQ ID NO: 441034 - DNA, 988 bp, Homo Sapiens
  misc_feature (893)..(893): n is a, c, g, or t
  misc_feature (896)..(896): n is a, c, g, or t
  misc_feature (909)..(909): n is a, c, g, or t
  misc_feature (915)..(915): n is a, c, g, or t
  misc_feature (942)..(942): n is a, c, g, or t
  misc_feature (947)..(947): n is a, c, g, or t
  misc_feature (964)..(964): n is a, c, g, or t
  misc_feature (967)..(967): n is a, c, g, or t
  misc_feature (976)..(976): n is a, c, g, or t
  misc_feature (984)..(984): n is a, c, g, or t
  misc_feature (986)..(986): n is a, c, g, or t
gcggtcgaccgggcctgggaacgtggctggttggaggaggtagatcaccctttctgcgggggacgatttcgtcggtggtaggctgctaccatgaggttgaatcagaacaccttgctgctggggaagaaggtggtccttgtaccctacacctcggagcatgtgcccagcaggtaccacgagtggatgaaatcagaggagctgcagcgtttgacagcctcggagccgctgaccctggagcaggagtatgccatgcagtgcagctggcaggaagatgcagacaagtgtaccttcattgtgctggatgccgagaagtggcaggcccagccaggcgccaccgaagagagctgcatggtgggagatgtgaacctcttcctcacagatctagaagacctcaccttgggggagatcgaggtcatgattgcagagcccagctgcaggggtaagggccttggcactgaggccgttctcgcgatgctgtcttacggagtgaccacgctaggtctgaccaagtttgaggctaaaattgggcaaggaaatgaaccaagcatccggatgttccagaaacttcactttgagcaggtggctacgagcagtgtttttcaggaggtgaccctcagactgacagtgagtgagtccgagcatcagtggcttctggagcagaccagccacgtggaagagaagccttacagagatgggtcggcagagccctgctgatggctgggccttgtgggcagccactctgtgtgagcagggtgttgggcccatacacttcaaagaccagagccctgcactgggagagtgctcctggcccaggctgggaatcacctttcgaggcccttcagactctggcggggcttgctgtggcctccctccagctagtgggtgtggctgancanactccagggccanggccanttccttcctccctcccggccaaaccanaccanactctaggaactggganggngggcagggntcatgggngngt

SEQ ID NO: 441035 - DNA, 1037 bp, Homo Sapiens
ggggtcctttggtcacgtgtgcattgtcgttttgggtctttctgtttttctgtttggtgcctcttgctttctctttgcgtgctgcgcctggttttgtgcttgtctcctccttggcgcccttggcctcttctgcgccggggttctgtcccgtaggcccagtcgtcctgtgtagggggctttcgttgttttcctcgcttggcttgtgtacgtgtcttccctggatgctctccgttatgtcgtggagctcactgccctgtcgggtgtgagggtctccctctctggctatctcctgctccggtagccaccctgcttcctaacgtgaactcttctggaacatccggatgcttggttcatttccttgcccaattttagcctctaccttcggtcagacctagtcgtggtcactcctcgcagaggagatgagatcaggggcaagtaaggagggcgcctgcctcccaccctcctgtcccaagctgcagaggaggaaccttcacctgccccctaccctcacacctgtacaaagttcacctggggcctgcccacttcctcgcattgtctgctcacactttcttaccgtaagacagcatcgcgagattcggcctcagtgccaaggcccttacccctgcagctgggctcttgcaatcatgacctcgatctcccccaaggtgaggtcttctagatctgtgaggaagaggttcacatctcccaccatgcagctctcttcggtggcgcctggctgggcctgccacttctcggcatccagcacaatgaaggtacacttgtctgcatcttcctgccagctgcactgcatggcatactcctgctccagggtcagcggctccgaggctgtcaaacgctgcagctcctctgatttcatccactcgtggtacctgctgggcacatgctccgaggtgtagggtacaaggaccaccttcttccccagcagcaaggtgttctgattcaacctcatggtagcacgcctaccaccgacgaaatcgtcccccgcagaaagggtgatctacctcctccaaccagcc

SEQ ID NO: 441036 - DNA, 814 bp, Homo Sapiens
gcctcttacttcatggagtcagtatctgcctcatgggatagtcagtagccacttgggggaaactgaggaccatgaaggagcagaaacaggagggcctcctcctgtaatatgacaacatgctccagagacctttttctgagggtccccagcccaccccaactatgggactaaccatacttgaatctaccccaaaccaagggttaagttcacgcctaagcataaggactaaagtgatgagctgagggtgtaccacaggctgagggggctaggtgggcagctgcccagccaggacctggactcaccacatggagcctcccagtgaaccctgtgagtgcccaccctttgcagcctcagcaggctcagtcagcagatctgagagccgggagtcagcggaaggcagggctaggtgaaacaaacctgcaatcatgacctcgatctcccccaaggtgaggtcttctagatctgtgaggaagaggttcacatctcccaccatgcagctctcttcggtggcgcctggctgggcctgccacttctcggcatccagcacaatgaaggtacacttgtctgcatcttcctgccagctgcactgcatggcatactcctgctccagggtcagcggctccgaggctgtcaaacgctgcagctcctctgatttcatccactcgtggtacctgggcacatgctccgaggtgtagggtacaaggaccaccttcttccccagcagcaaggtgttctgattcaacctcatggtagcagcctaccaccgacgaaatcgtcccccgcagaaagggtgatctacctcctccaaccagcc

SEQ ID NO: 441037 - DNA, 970 bp, Homo Sapiens
  misc_feature (894)..(930): n is a, c, g, or t
catccacttcctagagtctggttctggtttgccgggagggagaaggaactggcctggctctggagtctgctccagccacaccactagctggagggaggccacaggcaagccccagccaagagtctgaagggcctcgaaaggtgattccccagcctgggccaggagcactctcccagtgcagggctctggtctttgaagtgtatgggcccaacaccctgctcacacagagtggctgcccacaaggcccagccatcagcagggctctgccgacccatctctgtaaggcttctcttccacgtggctggtctgctccagaagccactgatgctcggactcactcactgtcagtctgagggtcacctccgtaagacagcatcgcgagaacggcctcagtgccaaggcccttacccctgcagctgggctctgcaatcatgacctcgatctcccccaaggtgaggtcttctagatctgtgaggaagaggttcacatctcccaccatgcagctctcttcggtggcgcctggctgggcctgccacttctcggcatccagcacaatgaaggtacacttgtctgcatcttcctgccagctgcactgcatggcatactcctgctccagggtcagcggctcctaggctgtcaaacgctgcagctcctctgatttcatccactcgtggtaccccatgtcaagcgggaaagatacctgggcacatgctccgaggtgtagggtacaaggaccaccttcttccccagcagcaaggtgttctgattcaacctcatggtagcagcctaccaccgacgaaatcgtcccccgcagaaagggtgatctacctcctccaaccagccacgttccccgccgctctcgacgaattcgagctcggccgatttggcctgatnnnnnnnnnnnnnnnnnnnnnnnnnnnnnnnnnnnnncgccgccaccgcggtaacccggtccctatatatctatcat

SEQ ID NO: 441038 - DNA, 1865 bp, Homo Sapiens
ttttttttcgttttataatgtttgttttatactgaggcatgttttcggttccagttgttcacatgcagtctgctgtgagactccaagatcaagggtgctgggaggccttaggcaagtcaccttacttatctaagactgtttccccacctggaagatgccctacaagcctcctgtggctgtgtttagaaagcatgcccggcctttcttgacagccagccaccccagatgatggcagggcaaggaagactgttaggagtcagagtgctcccctcaggtggaaggaaactgggccaactctactttgtaagccatagggtgccaggtagcccggccaccctgagcctgtgcctccactgcccccgcgtggccagtcaggtgcagctgctcccagagatggagggtgaggaacagacgtgggagcaccagagggacagagctgatggcctgacgctctcttcaggagggcacccccaaggggcctctgcttcctcagtgccccctgagctttatcagcagaggggtgttttccagccacaaggagctgtatctaacactaatgcctttaaactcaagactggctccaggagagaggaggacggacactaggttgaggggccaggccacactcactctggaccacctgttgttcccgggtcaagttcccagggtcacaccagcctgcctctgcaggacaagaggaccaagctgcccttgagtggacactgtgaggctggggctcgtggtagctcttcacacggaccaaacgggaaaatcaggaaagctggtagtgcctggagcttcactcccagccagggcagcacctctggcctctaaggagaaaggcctgtccactcccatccatgttccaggtccccctgcacctccggctcccaccttcatcccgacatctcccatggatccctgccctccattccagcttcctagagtctgggtctgggtttggccgggaggggagaagggaactggccctggccctggagtctgctcagccacaccactagctggagggaggccacagcaagccccgccagagtctgaagggcctcgaaaggtgattcccagcctgggccaggagcactctcccagtgcagggctctggtctttgaagtgtatgggcccaacaccctgctcacacagagtggctgcccacaaggcccagccatcagcagggctctgccgacccatctctgtaaggcttctcttccacgtggctggtctgctccagaagccactgatgctcggactcactcactgtcagtctgagggtcacctcctgaaaaacactgctcgtagccacctgctcaaagtgaagtttctggaacatccggatgcttggttcatttccttgcccaattttagcctcaaacttggtcagacctagcgtggtcactccgtaagacagcatcgcgagaacggcctcagtgccaaggcccttacccctgcagctgggctctgcaatcatgacctcgatctcccccaaggtgaggtcttctagatctgtgaggaagaggttcacatctcccaccatgcagctctcttcggtggcgcctggctgggcctgccacttctcggcatccagcacaatgaaggtacacttgtctgcatcttcctgccagctgcactgcatggcatactcctgctccagggtcagcggctccgaggctgtcaaacgctgcagctcctctgatttcatccactcgtggtacctgggcacatgctccgaggtgtagggtacaaggaccaccttcttccccagcagcaaggtgttctgattcaacctcatggtagccctcgtgcgaattcgccacccagcctcgctaccttaaaccgtagagttactgcct

SEQ ID NO: 441039 - DNA, 513 bp, Homo Sapiens
aataacgaaaaagctttactagtgttttaaccgtgtacaaaacactgtagcaataagagaaaggcccgtgctatctgtgtttaaacaaaatgcagtggctgcggggcttccaggcagggctggggaacaggccgggcgcccgccttgggcgcactctccgcctcttaggggtaagaggctcagagcctaccccttaggcctagttggatgcgggtcggtcctgcccaaggccccagtgaggggagccgaggctaggaaggggcaagttttatgtgtttgggagggggtgtctcttcccggcctctgcgtcttccccctggagcgtcagtatggtcaggctctggtgacccagccgctttgcctcccgactttgggaagagtagcaaggagaggtcctggcaagtacaccctgggtgacaaacggctatgagagttcccaggtgatttctcgagcagcttcagtttaccggagcccagccaggagagagaattttagcacaggaaacgcaatcc

SEQ ID NO: 441040 - DNA, 995 bp, Homo Sapiens
  misc_feature (6)..(6): n is a, c, g, or t
  misc_feature (9)..(9): n is a, c, g, or t
  misc_feature (14)..(14): n is a, c, g, or t
  misc_feature (17)..(17): n is a, c, g, or t
  misc_feature (30)..(30): n is a, c, g, or t
  misc_feature (57)..(58): n is a, c, g, or t
  misc_feature (63)..(63): n is a, c, g, or t
  misc_feature (65)..(65): n is a, c, g, or t
  misc_feature (74)..(74): n is a, c, g, or t
  misc_feature (78)..(78): n is a, c, g, or t
  misc_feature (87)..(87): n is a, c, g, or t
  misc_feature (104)..(104): n is a, c, g, or t
  misc_feature (159)..(159): n is a, c, g, or t
  misc_feature (957)..(957): n is a, c, g, or t
atactnganaaaanctnttattctcaacanagcagagtcccacaatctgccccacgnngcttncngtgagacgnctcncctcatttnccatagccgtcatcttngtcatcagcgactgaatacgctgctcttcagctgctcgaagctcatcttcctcgngggcatcagctttttctgtagctgacagcccctgctggaagttccgttttgcttgtcctcagccttctccaattttgctctggcggcctaaatccatatctcctgccatattccaaaagtgtagcatggattcgagattcttcatcaagtagctcctctgctccctggtggcgtttgtatttccgacggggcttgtacacttctgagaggtccacaactgtcttgatggccttttcttttctctttatgaagtcatcatcctcagggagactgtaattcttctggaactgggatacagagtaggagcgtatatattcacccatctcttcttttttttctatagctcgtttcaccagccactgaacaacagtaaatattttaataaaatccatccccttgatctggtggggctccagctggtgtgggcatttcatcctttgcaggaccgagacaattttttcttacagagctatttttttacctatcgtagagttttctttaaagagcaaatcaacatctacatcaaagttgcaagtgtttatacaccaattcattcctcctactaccttttcaaaggtttataagcctttaattcttgcccttaaatacccagctgcaaccaagagctccagaatttcagtcaactttacatttttttcttcatcttctcttttttccacctccgggagaccctggccctccggccccctgtgcaaccccatgatcctaccgtgctttcttaatgcgaaagcaaagccccccaagcttccggagaaagctttcccttccgcggagctnctaccggggtggagttcaaagcggaaactccctctgcc

SEQ ID NO: 441041 - DNA, 1699 bp, Homo Sapiens
ttattcaaaaggatcacaagcttcacatcaatttggcttcaaaaagacctcatgtcttaaaactaagtaccgtgacatttattttgccatctgtgacagtttcacgtcgaaaaagcctcaacataaaaaaattaccttcaaaacccactgagacattctcacataaactaggatactgcacaaacaataaagttctttcttcaatagtcaatcttttcaatttcatccatgtcttcagcgttgagttgcttaatactgctgttaaagtggtcctggattttcatgagcgagggcagctcatctacttcaatcatgttgaaggcaaggccttttttcccaaagcgccccgtccgccctatgcggtggaggtaggtctcatagtccggctcctctccttgttttacagggagatcaaagttcacaacaattgtgacctgcttcacatcaatccctcgggcgcaaacattagttgttatgagaaccttctctttcccatcccgaaacctctgaatgatggaagctcgctgctccacggtcagctccccgcttaacaaagacacctggtggccatcctgtatcatctccacggtcaaccacttagcgtttcgacgagtctggcagaagatgatggcctgaccaatggtgatgctgccataaatgttgcacagagcttggtatttgtctttcctgtgctcacacagcacgtaatattgccggatgttgttcagtgtgagctcctctttgcgtaacttgataacattagggtcagggatgattcgctcagcaaagtgccacacagagtcctcaaaggttgctgaaaagaggagcatttggcattcggagggtagagctctttgaatacgaatactatgatctgagaatccttgagtgtcaatcatcacatctgcttcatccaggacaaacacacgaatcttagtcaaatcaatcaattttagtttaaaacaccaatctaggacagtcccaggagtgccaattataatctgtttagtgatgtcggtgcctctgggaattcgattccctcgaatggcatacatcacttgaacatccacacagaattttcccatctgctcaaccacacggccagtttgcagagccaattcataagtaggagctaggcagaggcactgtgggaacaattccaaggcattaactctgcttaacattgccaacacaaatgccgctgtctttcctgttccagactggctctgtgctatgaggttctggggtggatgtgccagcatcatagggagagccatctcttggattttagatggcctattaaatcccattgcatagattccttttagtaactcttcctttagccgcagctcttcaaatgtctttactgagtaaagtggagagctgggatccttctgtaaaacttccacacggtgactggattctactaaggattgatggattaacttgtttaagagtgaattagctgccaaatccactacatcttcttcatcatcttcattgatgttattaatagaaccatctatgtttcggactgcagtactcttaataccccaaaggttcttccggggttggctgaggtttgaaaagtggctgttcagccgctcgctctccgccgcccctgcgtcgcctccccacagtaacgacgccatggctgcgattgctgctcccgccatcccggaaattccggaccggtccc

SEQ ID NO: 441042 - DNA, 993 bp, Homo Sapiens
  misc_feature (5)..(5): n is a, c, g, or t
  misc_feature (11)..(11): n is a, c, g, or t
  misc_feature (13)..(13): n is a, c, g, or t
  misc_feature (15)..(15): n is a, c, g, or t
  misc_feature (18)..(18): n is a, c, g, or t
  misc_feature (27)..(27): n is a, c, g, or t
  misc_feature (40)..(40): n is a, c, g, or t
  misc_feature (47)..(48): n is a, c, g, or t
  misc_feature (52)..(52): n is a, c, g, or t
  misc_feature (65)..(65): n is a, c, g, or t
  misc_feature (69)..(69): n is a, c, g, or t
  misc_feature (78)..(78): n is a, c, g, or t
  misc_feature (90)..(90): n is a, c, g, or t
  misc_feature (94)..(94): n is a, c, g, or t
  misc_feature (98)..(98): n is a, c, g, or t
  misc_feature (101)..(101): n is a, c, g, or t
  misc_feature (107)..(107): n is a, c, g, or t
  misc_feature (146)..(146): n is a, c, g, or t
  misc_feature (187)..(187): n is a, c, g, or t
  misc_feature (265)..(265): n is a, c, g, or t
cctgnaaaaangnantcntgtgcgttnttttgaatacacnccccccnnctgnttcccctcaagtncaangattaaaantctctcgagganagcncaanaanatgtgnttcctttttgaaggcaggtatgccaactgaaggcaatcnttgagagttatgaattcagcactaggtttctcttgagtgantaaaatttttactttatttagagctttcttggcacctgtggctgtggccagcttgttatgagctgggctagagtgtgngctggatatgtaaacttttttcccagggcctgagggaggcttggatggggagaagtctgagatgaaaacaataccctcgctggtaagcaaagttaaatgtgagggatcaaaagggtcaaaagaaaaagaaagaatgttatctgcatagctcttcttccatagtttggtgccagtgtcggcattccagagcacaatgtaatttggcgggtggatagcaagcagtaaatcgcgggaagcatcttgattccacaaccactgaacatcctggataggcttggcatgctcttggatctcacactgagctattcctgctgctacatcccagacgatgatcttcccattgacatcagcagaagctaaccgtaagcaatatggtgagccaatgttatggtgatagttttccctggcccatttaacctttacaacatcagctttatgcttttttaaaacttgaagagtttgggcagtaatggaatcaatcactaccacaagtgaatgacatccataagcaattaaaccttgccagccccagtccaccgccgccttgttgtgggcgttgagggcccccgtgagggtgcgcgccgacaccttgaagttcactgtgtagggcaacatcccggcggccagcccaggacctgggcgctgacccgcaaccaggaagcggcggacactgtgcttccgttccaaacagagtccgggtggccccctcggcgccgctgtcaggttcc

SEQ ID NO: 441043 - DNA, 1570 bp, Homo Sapiens
  misc_feature (1100)..(1102): n is a, c, g, or t
  misc_feature (1104)..(1104): n is a, c, g, or t
  misc_feature (1114)..(1117): n is a, c, g, or t
  misc_feature (1122)..(1122): n is a, c, g, or t
  misc_feature (1125)..(1125): n is a, c, g, or t
  misc_feature (1128)..(1128): n is a, c, g, or t
  misc_feature (1138)..(1138): n is a, c, g, or t
  misc_feature (1141)..(1141): n is a, c, g, or t
  misc_feature (1146)..(1146): n is a, c, g, or t
  misc_feature (1177)..(1177): n is a, c, g, or t
  misc_feature (1181)..(1181): n is a, c, g, or t
  misc_feature (1196)..(1214): n is a, c, g, or t
  misc_feature (1222)..(1222): n is a, c, g, or t
  misc_feature (1226)..(1226): n is a, c, g, or t
  misc_feature (1230)..(1230): n is a, c, g, or t
  misc_feature (1233)..(1233): n is a, c, g, or t
  misc_feature (1238)..(1238): n is a, c, g, or t
  misc_feature (1240)..(1240): n is a, c, g, or t
  misc_feature (1250)..(1250): n is a, c, g, or t
  misc_feature (1252)..(1252): n is a, c, g, or t
  misc_feature (1256)..(1256): n is a, c, g, or t
  misc_feature (1261)..(1261): n is a, c, g, or t
  misc_feature (1272)..(1272): n is a, c, g, or t
  misc_feature (1283)..(1283): n is a, c, g, or t
  misc_feature (1287)..(1287): n is a, c, g, or t
  misc_feature (1301)..(1301): n is a, c, g, or t
  misc_feature (1303)..(1303): n is a, c, g, or t
  misc_feature (1314)..(1314): n is a, c, g, or t
  misc_feature (1327)..(1327): n is a, c, g, or t
  misc_feature (1336)..(1336): n is a, c, g, or t
  misc_feature (1344)..(1344): n is a, c, g, or t
  misc_feature (1346)..(1346): n is a, c, g, or t
  misc_feature (1357)..(1357): n is a, c, g, or t
  misc_feature (1359)..(1359): n is a, c, g, or t
  misc_feature (1374)..(1374): n is a, c, g, or t
  misc_feature (1391)..(1391): n is a, c, g, or t
  misc_feature (1395)..(1395): n is a, c, g, or t
  misc_feature (1399)..(1399): n is a, c, g, or t
  misc_feature (1426)..(1426): n is a, c, g, or t
  misc_feature (1431)..(1431): n is a, c, g, or t
  misc_feature (1472)..(1472): n is a, c, g, or t
  misc_feature (1482)..(1482): n is a, c, g, or t
cagttgttcaagtttatttatgttgttttgatacactgacagatcacaccacattttgtttgtaactttttctccttcaagagtcaccttagcttaagccagaagattctcttaaagaacacatacacacatgtgcacacacaagaggcaagtacaaaaatgtaaccccaccaaagtgcatgtgaatgaaagtgcaaaaaaggcttcatttgcaaactctgagatcattctctctgcttcagaaaataaacagaaaggtcctaactgccctaggcctgggctgatcaggggctgggcgaggctgccaggggccaaaatataagtgggcatctgttgctaggagggcagagggcaccagaagtctctgccaactccctcccctctctggcgctcccaggtcaaggtgcaataatatcatttggggacagagtgggggtaaaggggcagtagggcagacaagaggcagatttctttctactttttaatgatttggtttctttccaaagagtttgacgataatgcagaaagtgctgaggcctcaaagttcagaagcctgggagcccttttctccaaggcccttggtccatcttgccttcaccacaggcaagcattaggtgcttggcagatctgatggcaaaggccctcccagcccctctccttagaagctgtgaggtcccacagcaccagccgtgagtacttgctgccttctcactgcacaaagtcagtgaacatctctcatcttttatagaggaacagactgaggataaggagctgatgagttctgctaccacccagacaactaagataaaagcaaggcttagacttgttcttctttactcttggccaagggggtaccaatgtcacccttgtaaacccaaccttcgctgtgtggcaggtcttgcctagcttccttccaggaaggctgtgctcaaagctgcctctaagcagttgagagggaatggacacctaaagccctgtgggagctcaactgtgggagctgaatggcttcctcaaaaagctgtccagcccatggcagagagaggcccctactgggttgtggtaggaaatcaacagagctctgggtttcccacttctaaggnnnanataaagcttnnnnttttnatnatnatagcccttngtnttttnccaacactgagccttacatctgcaccctttnaaanacttttgagagtgcnnnnnnnnnnnnnnnnnnnacatgtanatanacanacnttatntnattgaagggntntggntgaangcaccagcccnacactctgcangccnacatcagcacctgnanacgggaggttngcagtggctcctnacctccatntggggctngntcctaccagtngntttcccccttcccanccaggctgggaggcagntttngcantgattcagtggaagctgggttcctatntggantgagaagtggaagtcccagagccccagcagggacccagctngcagtgcaanacagatggagagcggcaaggagggcttcagggacccggagaattcagatagaaaagttcaccttcctaactcccaacttcaagtcgtc

SEQ ID NO: 441044 - DNA, 839 bp, Homo Sapiens
  misc_feature (787)..(798): n is a, c, g, or t
acacttttaaaagattttaaatttattaatttaagtaagcatactgcatctcctttatggataaatcatgtgccccacagagccccaaagcttgatgacattctgtaaagttacacaaatgtatctgaagaagttatctgttcttgtcctaattttgattctaaataaaaatccaatttcaaaatcaattaagattttaatctaggaaatcttgggattgttacacatgtaaaaaaccttatctctgagagccttttctattcttcttaccacaggtccactcacaaatcgcagctggtatggactggtactgccccaaataagaggaacctaagagcttggctccaagaccccccaccatcccggtgggtttgcttggcctttaggacgtgtgactacagcttttgggtaggtacagggcaatcaagattgaggaagaacacttcagcaaagcaaccattatttgtccacaaaaacagtgaaaaacagtgatataaaattaacaaaccaaatataaatctaacgccattctgcatttccagaactttttttatatttgtgcagtgttcttggtcaaccactcaccaattttctgcgtctatctgaagtacttttaaagttattaaaactgctcttttgaccataagtcacatagaattgtgattaggaaatcaatttacttattactctgtgcagggcacttgctagggtggtgagtgtaaaggaactaaaaatggaagtctctcacttctaaactggacacaggagttctcaaattaaaataatnnnnnnnnnnnngggagagaggtgcttactggcaacattaatactagacaccc

SEQ ID NO: 441045 - DNA, 1075 bp, Homo Sapiens
  misc_feature (5)..(5): n is a, c, g, or t
  misc_feature (12)..(12): n is a, c, g, or t
  misc_feature (14)..(14): n is a, c, g, or t
  misc_feature (18)..(18): n is a, c, g, or t
  misc_feature (21)..(21): n is a, c, g, or t
  misc_feature (25)..(26): n is a, c, g, or t
  misc_feature (28)..(28): n is a, c, g, or t
  misc_feature (51)..(51): n is a, c, g, or t
  misc_feature (69)..(69): n is a, c, g, or t
  misc_feature (144)..(144): n is a, c, g, or t
  misc_feature (878)..(878): n is a, c, g, or t
ccccnccctccncntttnttnatgnncnccctccacaaaacccacattctngtcagcatcaaaagagcngcagctttgttatctcttggtatctgaggcatctgctggcacgcaccccagacactgttgtaggaaataaggtcnttgttctcagggctctgagttggagtgacggaaagtacttccatgagctgagccatgccatccacgatgtccagggtggcgccccgtaccagctttctcagggtgatcccctgatcctttggaagcaaagtagtacactgcaataaatgccttgatggcagcatggacttgttcacagaacttctgggtttcctgtggagacggcagtggaagctgagagaagactatggtcagagtcgtggcttcccttgacacagtcacagctgcctcatctggggggtggccgaagaggaggcaggtgccaatacgttagtgctgcacggacttggaagacttcccttaccgaccgagacttctcaaaaacacttcccgaatgtcgaggttagaattctatttcaccctctcaggtgctgaggtgggtaaggtacctcacagaaaggatgcagcgggggagagcagtcccctccgtgggggacagcgggaggaaaaggggtcgggacgctggaggaagtgaggcaaggggagcccggaaggaggcgcactcactgagtcttctccagaacatctctcgattaaactcctcggtggtctcctggttcgccgacccgcactcgaggcaggagcaaccgcagctcctccgccaagtgccggagctgctccaaaggcgaagccagggtggggactgcggctgcaggtgcagttgcgctcgccatctcagtcgcttgccgaaggcngcaaacacaggcctccgctgccactgccggagccgcactgcgacagccgctccacttccgggccacagcgtcaagggctcgtttccgtcaacaagccgtccagccccgtcccagaggccctgccctgcctcctcccgccacgaggcccggccccgcccgaggtccagcaccacccatcccgttatcagagatcccgg

SEQ ID NO: 441046 - DNA, 1304 bp, Homo Sapiens
gtgtgagctaccgcgcccagccttaaagcatcattttctaaggcctttgggcttttctgaatgattacccaggtgattttgggagagagaactaccaaagctcatggctattataattcaacttcagtgaatttttatcaaccccaaacgcatgcaagaactgtgacattactgttgtacttccatccaaatgtgactaataaatatgtaccctatagcttacaggaaatactagtgattagtggaattctgcccatttgttctgtagctattccctcaaagccagtacttacattgtttcgcacggtcaggtggcacataggtgggtatatgctcagagccaaatcatccacactagggctgatttcatccgaaatatccccaatgtcatccagctgtgccacctggtccttcttcccattctctgccactaacatccgaagttttcttcaggcaggctttggatgctctcaccagcgcaaggcatgggattatgagctcttgatcgtcctctgaccaatacaagtcctgattgcttgggaaacccccacacatcatcctcatgattgtggttgtcagagttgttctcctcagtatcattcaagaggccagagtaagggtcacattcttccacagcctgctccatttcttcatgtgcatccttcacaaaatccacattcttggtcagcatcaaaagagctgcagctttgttatctcttggtatctgaggcatctgctggcacgcaacccagacactgttgtaggaaataaggtcattgttctcagggctctgagttggagtgacggaaagtacttccatgagctgagccatgccatccacgatgtccagggtggcgccccgtaccagctttctcagggtgatcccctgatcctttggaagcaaatagtacactgcaataaatgccttgatggcagcatggacttgttcacagaacttctgggtttcctgtggagacggcagtggaagctgagagaagactatggtcagagtcgtggcttcccttgacacagtcacagctgcctcattgagtcttctccagaacatctctcgattaaactcctcggtggtctcctgggcttcgccgacccgcactcgaggcaggagcaaccgcagctcctccgccaagtgccggagctgctccaaaggcgaagccagggtggggactgcggctgcaggtgcagttgcgctcgccatctcagtcgcttgccgaaggccgcaaacacagcctcgtgccgaattcgccacccaggcctcgctaccttaaacccgctaggagtactgc

SEQ ID NO: 441047 - DNA, 848 bp, Homo Sapiens
gcatcacactaggcgtgatttcatcagaagaatccccaatgtcatccactgtgccacctgatccttcttcccattctctgccactaacatccgaattttcttcaggcaggcttttggatgctctcaccagcggcaaggcatagggattatgagctcttgatcgtcctctgaccaatacaagtcctgattgctgggcaaccccaacacatcatcctcatgatcgtggcttgtcagattgttctcctcagtatcattcaagaggccagagtaagggtcacattcttccacagcctgctccatttcttcatgtgcatccttcacgaaatccacattcttggtcagcatcaaaagagctgcagctttgttatctcttggtatctgaggcatctgctggcacgcaacccagacactgttgtaggaaataaggtcattgttctcagggcctgatcctcttggaagcaaatagtacactgcaatataatgccttgatcggcagcatggacttgttcacagaacttctgggtttcctgtggagacggcagtggaagctgagagaagactatggtcagagtcgtggcttcccttgacacagtcacagctgcctcatctggggggtggccgaagaggaggcaggtgccaatacgttagtgctgcacggacttggaagacttcccttaccgaccgagacttctcaaaaacacttcccgaatgtcgaggttagaattctatttcaccctctcaggtgctgaggtgggtaaggtacctccacagaaaggatgcagcgggggagagcagtcccctccgtgcgacgcgtgggtcgacgatatcccgtactgcgggccggacca

SEQ ID NO: 441048 - DNA, 1035 bp, Homo Sapiens
  misc_feature (194)..(194): n is a, c, g, or t
agggccggcttgggatgttccccccaggccaaggcactgggattaggagctctggattggtcctcgggcccaaatacaagtcccgggtggctggggaacccccaacccaaataatcttcatgattgtggtgtcagagttgtcctcctcagtatcattcaagaggccagagtaggggtcacattcttccacagcntgctccatttcttcatgtgcatccttcacaaaatccacattcttggtcagcatcaaaagagctgcagctttgttatctcttggtatctgaggcatctgctggcacgcaaccccagacactgttgtaggaaataaggtcattgttctcagggctctgagttggagtgacggaaagtacttccatgagctgagccatgccatccacgatgtccagggtggcgccccgtaccagctttctcagggtgatcccctgatcctttggaagcaaatagtacactgcaataaatgccttgatggcagcatggacttgttcacagaacttctgggtttcctgtggagacggcagtggaagctgagagaagactatggtcagagtcgtggcttcccttgacacagtcacagctgcctcattgagtcttctccagaacatctctcgattaaactcctcggtggtctcctgggcttcgccgacccgcactcgaggcaggagcaaccgcagctcctccgccaagtgccggagctgctccaaaggcgaagccagggtggggactgcggctgcaggtgcagttgcgctcgccatctcagtcgcttgccgaaggccgcaaacacaggcctccgctgccactgccggagccgcactgcgacagccgctccacttccgggccacagcgtcaagggctcgtttccgtcaacaagccgtccagccccgtcccagaggccctgccctgcctcctcccgccacgaggcccggccccgcccgaggtccagcaccacccatcccgttatcagagaccaggcctggccccgcctcctcccgccccgatccggagaattccggaccg

SEQ ID NO: 441049 - DNA, 1471 bp, Homo Sapiens
  misc_feature (1388)..(1424): n is a, c, g, or t
tctctccacactggcagttagcattttattgagaccatcaacatctttacaatgaaaacaacatactttactgcaaaaagagaataaggcagctttcctaggaatctctgagaaatgactcaggaatgagaaatcatgcaattatttttcatatatagcacagaaaaatatacgcatatggtttataaataggtgtcaatctggcctaaccaacaatctttggtaatagtgtctcttgctaaatatagataggcactccctttcaatccagcaagcattctagctccattttaaaagcaggtatcagagcctgaccatgacgatgagaggggaagagagtacaaatgagcctgaaaagtcataattcaagttcactctgagtgagctccttgattctattcatgcaatgatcaatggcattaataagtaaagggatccaactatcttctggctgaggggtcacatgacttgcttttgtaatttcaagtgccttctttaaaacagatacaagtttcgcagaattgattcgcacggtcaggtgacacataggtggatatatgctcagagccaaatcatccacactagggctgatttcatcagaaatatccacaatgtcatccagctgtgccacctgatccttcttcccattctctgccactaacatccgaattttcttcaggcaggctttggatgctctcaccagcgcaaggcatgggattatgagctcttgatcgtcctctgaccaatacaagtcctgattgctgggaaaccccaacacatcatcctcatgattgtggttgtcagagttgttctcctcagtatcattcaagaggccagagtaagggtcacattcttccacagcctgctccatttcttcatgtgcatccttcacaaaatccacattcttggtcagcatcaaaagagctgcagctttgttatctcttggtatctgaggcatctgctggcacgcaacccagacactgttgtaggaaataaggtcattgttctcagggcctgatcctttggaagcaaatagtacactgcaataaatgccttgatggcagcatggacttgttcacagaacttctgggtttcctgtggagacggcagtggaagctgagagaagactatggtcagagtcgtggcttcccttgacacagtcacagctgcctcattgagtcttctccagaacatctctcgattaaactcctcggtggtctcctgggcttcgccgacttgtgggtgtggcgtgtgggggccgaacggtggcgaatggaaaagctgaggtaagcggagccacctccctcgcccaagtccggctccccgccgccgccccagcccgccctcccgctctcgacgaattcgagctcggccgatttggcctgatnnnnnnnnnnnnnnnnnnnnnnnnnnnnnnnnnnnnncggccgccaccgcgatgaactccggtcgccctatagtgagtctatca

SEQ ID NO: 441050 - DNA, 1572 bp, Homo Sapiens
  misc_feature (82)..(82): n is a, c, g, or t
gactgagaggtagttcataattcatttttcttttattttggtccttttctctaaaaaggtacaatttgatcaagctattacnatgctataaaaatattaccagtttggtggtcttctaatgagaaatctaaagcacacctccccacccactcggatatctgtttctggtgatcacgtggcatctagcatatacgtctgtagggaaaggggaaaggcaaacccatttcacaaatggctaaagtcaatgtcttcaattgtaaattgttcatctcaggttatttttttgggtgtctgacaggcacaaacactttcctcatatctattatatagctgaggtttatccatgggattaaatacctaatgagggctaaattattacagtttttttcacatccattacatttattacatctctctcaaggatgtattcttcgatgagctttggtttaaggctttcacacatacaaatctactttctaggggtcctcttcgatatgaattttataatgattagtaagggatgacctatggttgaaaagtttcccacatgtattacattcatagggtttctctccagtatgaattctctgatgtgcaatacgtgatgagctttgtctaaaagtttttccacatgtattacatttaaagggtttttctcctgtatgaatccttcgatgctgaataagagctgaactttggccaaaagatatcccacattcctcacatcgatatggtttctctccagtatgaattctctggtgattactaagtgatgagttacacctgaatgttttcccacactcgttacatttatagggtctttctccagtatgcattctctgatgttgaatgagagctgaactctgtctgaaggcttttccacatactttacatttacatggtttttctccagtatgaattcgctcgtgaataataagtgttgagtgggagcttaaggctttaccacattcattacaattataaaacttctctccagtatgaatgattcggtgtctattaagtcgtgaaatagaagtaaagcctttcccacattcattgcatctatagggcttttctccggtgtgaattctttcatgttgaataagagaggcactctggctgaaggctctcccacattcactacatttaaaaggcttctctccagtgtgaattctctgatgataacgaagggatgagctagacttaaaggtgttgccacattcattacataagtaggacttctttctagaatgaattctttgacatccagaaagggatgtgctgcaactagatgccttcctacccggattatacttacaagggttttcttcagcatgaattttttgatgtataaaaaggcctgacttcggctgaaggatttaccacattctttacatctgtaggatttctccacagtatgggttcttagatgtttataaagggatgtactgagagtaaaggctttcccacattctttacatatgtagggtttctctccagtatgcgttatttgatgttgaataagagctgaactttggctaaaggcttttgaacattctttacacttaaata

SEQ ID NO: 441051 - DNA, 1083 bp, Homo Sapiens
  misc_feature (5)..(5): n is a, c, g, or t
  misc_feature (37)..(37): n is a, c, g, or t
  misc_feature (49)..(167): n is a, c, g, or t
  misc_feature (200)..(201): n is a, c, g, or t
  misc_feature (223)..(224): n is a, c, g, or t
  misc_feature (238)..(238): n is a, c, g, or t
  misc_feature (263)..(365): n is a, c, g, or t
  misc_feature (402)..(482): n is a, c, g, or t
  misc_feature (1027)..(1027): n is a, c, g, or t
atttnagtgaatgaaacattggttaacaacaaaattnaaacaattatcnnnnnnnnnnnnnnnnnnnnnnnnnnnnnnnnnnnnnnnnnnnnnnnnnnnnnnnnnnnnnnnnnnnnnnnnnnnnnnnnnnnnnnnnnnnnnnnnnnnnnnnnnnnnnnnnnnnnnnntgtccttattctgataacagggatccacaaacnntttttctggcaggggcaggggnnggggggcgcatgtnggggaggcagagtcttgctctttcnnnnnnnnnnnnnnnnnnnnnnnnnnnnnnnnnnnnnnnnnnnnnnnnnnnnnnnnnnnnnnnnnnnnnnnnnnnnnnnnnnnnnnnnnnnnnnnnnnnnnnnatgtgcaccactatgcctggctaattttgttgttgtnnnnnnnnnnnnnnnnnnnnnnnnnnnnnnnnnnnnnnnnnnnnnnnnnnnnnnnnnnnnnnnnnnnnnnnnnnnnnnnnngtgtgagccaccatgcccagcctggaaagaaagtattcttccaaaactgggctcagacatcatggtctctgggacactattgctggtctctcctggtctgcttggttagtcttccatatttctgcatcccatgcaaatctctccatttgtattcttttatcttacaaatggccaatttcaatgtctgcaacagtgaactgtctcgggatattttaaacagtgagtgacaagtataaaagcttttcccataagttattacatagctaaagtttattcttaaaacttagtatctgatgagaactaagagttttctcatattcattatatttaataaatcactctcaagcatgtattctctgatgagttttggtttaaggctttcacacatgcaaatcggcttttaaggagtcctcttcaatgtgaattttataatgattagtaagggatgacctctggctaaagagtttcccacatgcattacattcatagggtttctctccagtatgaattctttgatgtgcagtaaggtgatgaggctttgtctnaaaagttttttccacatgtattacatttaaaggggtttttctcccgtatggaatcc

SEQ ID NO: 441052 - DNA, 827 bp, Homo Sapiens
  misc_feature (793)..(793): n is a, c, g, or t
tgctgtaatttttggttgattaagtaattgtgaattctgtttgaggctgtttccttgtatttcacattttggtggtgttttttctctgggaagtatctgttgcctaataagcactgactttgggctgaagttttggctcaattcagtatttttatggcttctttctatagtggggatttttttgtgggtggctgaaactatctgaaaacttccctttttatcctgctttttctctaatctgccttcatatatgtaaggcttttctaatttcaaatcccaaggtacattcctgttggatcttttcagtatcagtccctgaaatgaagagtcttgtgtttgcgttgactttgtggttttatgactgctcttcgatcctagagaggagacgccagaaccgtctttctccacctcccagggatcttctccttgctgcaacagggagatcacttttggtttggtaaatgggagccccagtgagaccaggttcctatagttctccagcatcacatcccggtacaagtttctctgagaaggggccagctttctccactcatctcgggtaaacagcacagccacatcctcaaacgtcagtgacacctggggcctcgcttcccgctgcccagcagccatgtcctctttctggctctcccgggaggacggcgcagtctccagaaggcagatctccctaagctcgagcgtcccgggccgcgcctccccagccgcgaggctccggaaccgccggccgggatgcagcctcgcgacccggctccgccccgacggcgtctgggcgacntcaggcccggcgccgctcaccccgcggcgcgccg

SEQ ID NO: 441053 - DNA, 1019 bp, Homo Sapiens
  misc_feature (11)..(11): n is a, c, g, or t
  misc_feature (86)..(86): n is a, c, g, or t
  misc_feature (124)..(124): n is a, c, g, or t
  misc_feature (142)..(142): n is a, c, g, or t
tatgagtcttngatgtgaataagagcagaactttggctgaaagcttttaaacattctttacatttaaataattttctccagtgtgnttttctgatgtttacgaagggatgaattgtgaatgaangctttttcacatgtactncatttatagcgtttctctgctgttttgatttttgattggttaagtaaatttgaattctgcttgaaactatttctttgtatttcacattttgatggagttttttctttagcaaatctctgttgcttaatgaagactgatttcaggtagaagttttggccaaattcaacatttttatggcttctatctacagtaaggatttttgtatgggcaactgaaattatttgtaaattttcatttttgtcctgctgtttctttaagtgttctcgttcatatatgcaggatctttctgatatgaagttccagggttcatcccgttttcaatcttttccgttatctgctcctgaaatgaatcctgagtttgagttgactttgtcattttaggtgtgctcttacatcctagagaggagacaccagaactgtctttctccacctcccagggatcttctccttgctgcaacagggagatgacttttggtttggtaaatgagagtcccagtgagaccaggttcctatagttctccagcatcacatcccggtacaagtttctctgagaaggagccagctttctccactcatcccaggtaaagagcacagccacgtcctcgaatgtcagtgacacctggggcctcgcttcccgctgcccagcagccatgtcctctttctggctctcccgggaggacggcgcagtctccagaaggcagatctccccaggatcccgcgttcccgggccgcgcctccccgccgcactctgcaagcaggaagctccagcctcgtgacccggctcctccgacgtctgggcgacctcaagcccggcgccgctcaccgggcagcgaaagctccgcagagcgcctgggacctagaggagcaaggcccgctc

SEQ ID NO: 441054 - DNA, 786 bp, Homo Sapiens
tcgagtatagtggattgagtgctgtggagccgagattgccaagtgcagtggatcgagtccactgcactccagtctgggcaactagagctaaactcagtctcaagaaaaataataaaggaaaacagtaagtcagaggcgcaaaatcaatccttatttcctttaacctaggaataatagcatatttcactttcatagaaattgaactcttagagaaccagatccttctatacctttcgttctgtaaactgctatttatttacttatttttgcctcacatattgtgcatatccttcttcattaacttaaaaagaactcctgagctcaggtgatacacacacctcagcaaatcttttaaattatacattctgtgatatttccttgactttcttatccagcacttgtattgattatttttcattttgataatgttgggtttttaaaaactcctttatgatggaaaatttcaaacatacacaaaagtagagagagaatggtataataaacccactcagttttaagggttgtcaactaataccagttttatttcatgtatgactccaacaacttccccaaccagccttcagattatttgaaagcaaatttcagacatcgtattttactcatacattttctagtatctaaatctgaaagagactcttttttaacagttctgtagcattaattatactcatactgttgtgcttttaatatccagaaatcttttgtcttgcgaaactgaacctcttacccattaaacactaactcccctttttttcaccctgatcc

SEQ ID NO: 441055 - DNA, 1157 bp, Homo Sapiens
tttggggcacacggtcgtgccccaggggaccaggggggctccacagtggtccaacgcccgtaagctaagggggttgcaccggggggacccgggtgtggggatatccgcggagggaggccttggccttttgtgtcccaggggacaggggggtttacccccaagccggaccggttgcttgtggaaaggacccccgggggttgctcatttcccctggcccgggggcccgccaagtcccccaggtgcgttcagggttggccgggaaggttccccggtgctggctggaggctgctccaatccagggaaaggtgggcttcttcggggtcccagcggggttcgggaacgggaggggaaagtggatgcttggtcagttcgggcaggggaccccccttttttgtggtggcgggggatcagggctgtagtgttttcctggtcggcagacgggaagatgttgattcccggggacctcacaggacttgggcctggaccccgtcttcttggtgtcccatgcttgcttggaaaggtttttgtctgcctctgatgtggtctcttccattcctgggactgttaacagtaagactcttttctggtgcacgtcctgggacccactgctaaaggattctggctgcgtgggcgtcattgtgctctggtgcagggcggagtcagaattggtccttctccagctggtgtccgcgggtggtgagaggtacatggtgccataggggcagctgtcggcctgccgtccgtgtttgtccactgacaggggccggcggtgtggggagccgagccggccacgctcccggtacaccctgtccaccagcccatggtgccgggtggtccggctggtgtccaggcccgaggattggaagggggtctggaagggcaggtccatggtgccactcccgatctggttcacgttgggcagggacccgccatagtactggcctcggctggggcccagttgcaggtactgggatttctggagctggagccgcgcggcccgcgtcaggctcaggtccttcatgacctcctcgaaggccgccgtctcctccgcctgcttctgattgtgcagcgcgatcttctcgctgaatttccgcggattgttcgaagtcgccatcttctcgccgccaccctcgtgccgaattcgccacccaggcctc

SEQ ID NO: 441056 - DNA, 1231 bp, Homo Sapiens
  misc_feature (305)..(305): n is a, c, g, or t
  misc_feature (1068)..(1068): n is a, c, g, or t
  misc_feature (1169)..(1169): n is a, c, g, or t
  misc_feature (1176)..(1176): n is a, c, g, or t
  misc_feature (1198)..(1198): n is a, c, g, or t
  misc_feature (1212)..(1212): n is a, c, g, or t
cattaaagaatgttttggaactttactcgctggcctggcctttcttctctctcctccctataccttgaacagggaacccaggtgtctgggtgccctactctggtaaggaagggagtgggaactttctgatgccatggaatattcctgtgggagcagtggacaagggtctggatttgtcttctgggaaggggaggggaggacagacgtggggcatgcccgccctgcctctctcccccattcttgttgcatgcatatcctctcatttccctcatttttcctgcaagaatgttctctctcattcctgnaccgcccctccactccaattaatagtgcatgcctgctgccctacaagcttgctcccgttctctcttcttttcctcttaagctcagagtagctagaacagagtcagagtcactgctctggttctctgtccccaagtcttcctgagccttctccccttttatgtcttccctctcctcctccgggcccctagcctcccaaacccccattgcccgctggctccttgggcacagaaccacaccttcctgcctggcggctgggagcctgcaggagcctggagcctggttgggcctgagtggtcagtcccagactcgccgtcccgcctgagccttgtctcccttcccagggctcccactgcagcagctcgggggaccccgctgagtacaacctgcgctcgcgcaccgtgctgtgcgggacctgcgggcagcctgccgacaaggcatctgccagcggctcaggagcccaggtgggcggacccatctcctctggctcttctgcctccagtgtcacggtcactcgcagctaccgcagtgtggggggcagtgggggtggcagcttcggggacaatctggtcacccgctcctacctcctgggcaactccagcccccgaacccaggtgagttgtctctgctttgtctccaaatcctgcaggcgggtccctggtcatcgaggggtaggacgaggtggccttgcaggggggagagcctgccttctcttccgcagcccgggggagtgggagcctcctccccacagcctgagtcctaganagcccacctctgcatcctgcccctcttgtctgagccccagactggagggcaggggcagggctggagtgtgagggatgggggagatgctacctcccttctangggccangggagggagggtctgggtccangccctgctgctcanacctctctcctctgttttc

SEQ ID NO: 441057 - DNA, 501 bp, Homo Sapiens
  misc_feature (53)..(77): n is a, c, g, or t
gcttgtgtttttccttcagtataaaaccactgtagaaaataacttctcttagnnnnnnnnnnnnnnnnnnnnnnnnnccaaagggttatttttctttggcttcaagccccctcccatgacgtgcagggcagggggtgggcatgaggtgaggaggacgcaggaagcctccacccccacccctgcctggcaggtcccagattacatgatgctgcagttctgggggctctgggttcgggggctggagttgcccaggaggtaggagcgggtgaccagattgtccccgaagctgccacccccactgccccccacactgcggtagctgcgagtgaccgtgacactggaggcagaagagccagaggagattgggtccgcccacctgggctcctgagccgctggcagatgcccttgtcggcaggctgcccggcaggtcccgcacagcacggtgcgcgagcgcaggttgtactcagcggggtcccccgagctgctgcagtgggagccgtg

SEQ ID NO: 441058 - DNA, 1054 bp, Homo Sapiens
  misc_feature (15)..(16): n is a, c, g, or t
  misc_feature (19)..(20): n is a, c, g, or t
  misc_feature (26)..(26): n is a, c, g, or t
  misc_feature (31)..(31): n is a, c, g, or t
  misc_feature (38)..(38): n is a, c, g, or t
  misc_feature (44)..(44): n is a, c, g, or t
  misc_feature (46)..(47): n is a, c, g, or t
  misc_feature (60)..(60): n is a, c, g, or t
  misc_feature (66)..(66): n is a, c, g, or t
  misc_feature (70)..(70): n is a, c, g, or t
  misc_feature (73)..(74): n is a, c, g, or t
  misc_feature (105)..(105): n is a, c, g, or t
  misc_feature (145)..(145): n is a, c, g, or t
  misc_feature (155)..(155): n is a, c, g, or t
  misc_feature (172)..(172): n is a, c, g, or t
  misc_feature (196)..(196): n is a, c, g, or t
  misc_feature (380)..(380): n is a, c, g, or t
  misc_feature (425)..(425): n is a, c, g, or t
tttttggacctgtgnnaannaatgtnttaangttacanaaaagnanntttttaggggcgntgacantctntannaatgtctgccgacaacataaccccattgtgnccaagataactctcttgtacatgaaggagaattggtagcngcattagcanttacagattcatttggnttatttttcaccactatttcaccntttgataacactgcagctggttttactacttctcttagaagagaaatgtcggtagagacagagtggacaggtccccacttgggttgcttctgtatctctgacatattgttctctgcaccttgcagttcaggaaagtccagtgtggtaaattcaaactcaggtttggaggtagatacattttttncaatgattctggatttcctgtctgttcgcttatggtaaccatctnatttcaaactattctcagcgtaaatggacaaatgatgtgaacctctagctgattttatctcagatgatatagttccatcagccctttcactgtcaaacttttgctgatcatacgttttttgtctcatcataggttttcttcttaaaccagagctttcatttcttggtgggagagggcatgtgttctcatgttcgatgcttcactgtttgaaaacctcggtcacaactgggttggttataaagatactgggagccaggcactgagtaaacattctgtgtggagtcaagggtataaggagaataggcatatggatgaagagttatctcagaagataaatactgaggtggaaaagttgaagctccaaaggccatgtcttcagtatatattttctgctctttcactggtggttcctgaactaacggatagtatgtggctgcagagctggggaagacacatgcttctgaggactttaaccatgccacattgagcccggcaaatctggggacaaatggtttgacatctgctgataacttgatgccctcgctttcgggctcccgcggcccctccgacgccattgccgcgaggcgcggaggaggccgcgtcacggaggccagcatgcgggccgtcgg

SEQ ID NO: 441059 - DNA, 1150 bp, Homo Sapiens
  misc_feature (4)..(4): n is a, c, g, or t
  misc_feature (9)..(9): n is a, c, g, or t
tttntttgnggtttgggtgaaaataatcttgtgggtggtggtaggccgacagatggggacaggaagctgtggacgaaagccccaggtcccgtgggagaggtgacagcagcaggggcacgcagccacgtgggtccccaggggaatgtgaaggcggagggctccaggcgaactggggattaaacaaatatttacaggcagcagggaagtgcccagcgcacgtgacgggggcggggcgggactttggggagggcggggcctaacggtatcgagcgagccggttgtagacgtggtccaggtttctgcacaggaatatcgagagcgtcatgaacccgagctatagagaaaggagatgaggtcagagaagtcgaaggggtgctggcgagacgggggtgatgcccacccgggcgagaaaggtcaggggtggggccgtgaattgggcgggaaggggctggagaaggggataggtagaaaagggcggggctcgacgggaactgccgcagggctggctgatgaggcgggaatagctgctacaagtgggggtagaggctgagaaggagtaaggtcggaagcaagcccagggtcctttattttggaggctcatctgtcttccccctctgcctcagcctctaattgtgcctcctctaattctgcgcccgcacttccagtgtcaggctggtcctcgtcttgaacccacagcggccagagccccagggccatgggcagcttgccctgcggtgccttgtctccccagttggggcaggcacccgccatgccccagccaccccacagactgccgctgtgcccgccgccgccgtcagcgatcaggctgggcccggggctcgaatccccagcgcccggcacgtgcggctcgcatttccggcggagtgccctgcgctgtagctgtacgctcagcaccatgacagtcatctgcggagaaaggggagggagatcgcagccaatagcaggaggctttccctgcgtacacccaatcagggctccctgaagctgggccgcccctaccctccggtgctgggtggagcggcgggagggccggggtgggtgcgtccgccctgagctcgtccttcccaggcaaccgaaggacgcgaaatgaagggcagggccatctagggatttagggccgaatcccggg

SEQ ID NO: 441060 - DNA, 1231 bp, Homo Sapiens
ttttttttaccaaaaacgcaggggatttatttgaggtttgggtgaaaaataatcttgtgggtggtggtaggccgacagatggggacaggaagctgtggacgaaagccccaggtcccgtgggagaggtgacagcagcaggggcacgcagccacgtgggtccccaggggaatgtgaaggcggagggctccaggcgaactggggattaaacaaatatttacaggcagcagggaagtgcccagcgcacgtgacgggggcggggcgggactttggggagggcggggcctaacggtatcgagcgagccggttgtagacgtggtccaggtttctgcacaggaatatcgagagcgtcatgaacccgagctcgagtaggccgacgcccaggcaaatgcccactatggaaataaggttgttgtgcagccacttctggaggccctgcgcgcagcctcgcggtagatgtggctctctgcagggacagcgcagatgtctgcactgtgtctggaccgcgccaggtgtccaagcctgctgagctggggcaagatcacctttatctaggattgtggagtcgttggtcgccgacaagttgtagcaggagcagggcacgcggtgcgcctccgacccgttacctctcaggatgaggacttggaaccagtcctgcgggtagtgccagccgcagcagcgcagctggaactgcacatagtcccagctctcctcggccgcggtctcctcggggttggtgccgtacttttggatggttttctctacgacgtcccgcaagcttcgctccagctgggcccgctgagtggagatgaggattcccagggtgatctgtgtggcaaacaggagcagcagcatcccaaaatacaggcccaggaggcagcggagctccttgagggcccccacacaacccaggagggcgatgcccatggtgaagattcctgagatggccaggactttggaccagatctgcagaggcacgaaggccaagcccacaaaggacacgaagctggtcttgtcgatgaggatccagatgccgaagcagaagatcaggctgccgaggacgaagaagaagaggttgaaaacgaagaggaagtacttgatgaggctgaggcagctctcctgggctgacatcttcacctagtggggtaagcggtccactcaccacacagaagaggtgctgacagtgggggagacagggagaaagaaagaggctgagagagaaagagagacggag

SEQ ID NO: 441061 - DNA, 1289 bp, Homo Sapiens
ttttttttctggttataaaagattttaatatcaaataaaatgtacatgatcaaaaggctttgattgccatgtaaagcatagtttccaggttacatcaagtgattttatcttctcccatttcaaatgaaatgttgaaagcacaaacaatctgccatgaatgataagaagcaaaggcagcacatatcatctgcaagtttcttcccaagctataaaatatcatgttcatatttttcctgtttgtgatcccaaaacaggcaatattttcatttcatccactctattcttatgtatttgaaaagcaggtgttatccacctaccacaagagcactgttcaccataccagttgaaggaacccaacttggcactgcattttgggcaaagaagctgtccatccatcactcccaacaaagcagattccatccactgtacaggttcaatgaaataagatgtacattgagcttgcctccctgtggtaagcatggaagatggtgtcattctcttgtgggcaaaggctataggtccacttccttcacggtgatccagaatactagaacttcgaaataatgatcgcctgcactttctacacttgtagagaacctcatctttcaatccttgtgaaacggtagttgggtcaacagcaaagagttcttgaggtaaattctgcaattctggatacttctctgtaaccttttgtaaacgatattgcttataaattgcactagaggtatccacttcgtatcccattgcctggtataatttcagttgccactcaaacccctcattcatcttagcctctggtttgagaatctggagcttttcataggctttttcaaagggaagttggtcagtcttcatgagaaaagcagttattatggccacacttcgactgactcctgcatgactgaaaaagagaccagtgcaccaacaccgcacggccctcagcgcgggcctgaccgatgaaggccacgcaccggtccagatggctgagtaggtccgtctcgggtttgtccagcgctggcacgaagaggcgccatagatcctcgaccccaggccccgccttgaagctgggctcctccgagtccactgttagcacggccgtgatgcccgcttccctcaggtgatctggctccgcgacggccgcggccccaccgaaatacaatcctggctgcacttccagcatctgcccggcacagctgactctgctggcgctggggttgctgagctcgcagccatcactcgggcccggagcctccaacatggcctcgtgccgaattcgccacccaggcctc

SEQ ID NO: 441062 - DNA, 1074 bp, Homo Sapiens
  misc_feature (6)..(6): n is a, c, g, or t
  misc_feature (26)..(26): n is a, c, g, or t
  misc_feature (29)..(29): n is a, c, g, or t
  misc_feature (32)..(32): n is a, c, g, or t
  misc_feature (39)..(39): n is a, c, g, or t
  misc_feature (45)..(45): n is a, c, g, or t
  misc_feature (61)..(61): n is a, c, g, or t
  misc_feature (69)..(69): n is a, c, g, or t
  misc_feature (74)..(74): n is a, c, g, or t
  misc_feature (117)..(117): n is a, c, g, or t
  misc_feature (247)..(247): n is a, c, g, or t
aaaatntaaagttataaaaaacaatntcntcntattganttttcngctagaacctccattnaaaaattnccttngattattccatttagcacttcaagtttctattctgcaactctnaataataactggctcagatttgttaggttatatcaatcacatcgttcaaaatttgctactgtgtgttaaatgtgtacaataataaagtaaatgggaggaatgcatcaaatttcaaaagcaacataatganaaattcaaaaataatattacaaaaagataaagtacaacagggattctctttcaccgttacattagtgaaacatcttttttacacctttaaagctaatgtcataactttcattttttaacttatcaagatgatgaagtttttagaagccctacctttattttcaatcaaaaactaaaatgactgaattacttttattaatatacacatcaagttactgtaacggtgacttcatgtagtttcccccttaaagatggcacttgcaggtacaaagatgcagagatgtctacagccttcagatgtttacttgaaaagattcttcaacagcagtttggtattgggtttcttcatctagctgaagattcacaaattctccataatcaaattgatgtctctgatttagatgactaacgaaatttctggtaatctggctaggatctccccaaggaagagacacacaaataggacatgtcacaggaactatctgaaataggtgattactgttacagtgatccagtaaacgctgtctggtaaaatttgattcttgacacaggggacacttaaaagtaggatgaccagaagaacttgtattctcttggtaagtttctgtgttatcagatgtggatgtttcactcctattgacgtgctgacaggccgtggtccgcacgggcgttttgagcacctcctgacagacggggcagtagaaatcatcttcggtgtaggacgtggccgcagagaggtcctcggccatggcgggggatggggaaacaaggcgatggcgacagcggcagcggccgaggtgacggtggcggcccggggcccgacatccc

SEQ ID NO: 441063 - DNA, 1640 bp, Homo Sapiens
  misc_feature (46)..(55): n is a, c, g, or t
  misc_feature (82)..(142): n is a, c, g, or t
  misc_feature (180)..(188): n is a, c, g, or t
  misc_feature (238)..(256): n is a, c, g, or t
  misc_feature (258)..(258): n is a, c, g, or t
  misc_feature (260)..(352): n is a, c, g, or t
  misc_feature (354)..(358): n is a, c, g, or t
cccccgagggggctaaaattctgttgggggtgtgtccccaaatggnnnnnnnnnnaaaaaaaggtgtttttctccaaaattnnnnnnnnnnnnnnnnnnnnnnnnnnnnnnnnnnnnnnnnnnnnnnnnnnnnnnnnnnnnnttataaatagcccccccatagggggcccccctttctcnnnnnnnnngggggtggcggtataattggcgccccctctgggggatttttttagggcgnnnnnnnnnnnnnnnnnnntntnnnnnnnnnnnnnnnnnnnnnnnnnnnnnnnnnnnnnnnnnnnnnnnnnnnnnnnnnnnnnnnnnnnnnnnnnnnnnnnnnnnnnnnnnnnnntnnnnngactgaattacttttattaatatacacatcaagttactgtaacggtgacttcatgtagtttcccccttaaagatggcacttgcaggtacaaagatgcagagatgtctacagccttcagatgtttacttgaaaagattcttcaacagcagtttggtattgggtttcttcatctagctgaagattcacaaattctccataatcaaattgatgtctctgatttagatgactaacgaaatttctggtaatctggctaggatctccccaaggaagagacacacaaataggacatgtcacaggaactatctgaaataggtgattactgttacagtgatccagtaaacgctgtctggtaaaatttgattcttgacacaggggacacttaaaagtaggatgaccagaagaacttgtattctcttggtaagtttctgtgttatcagatgtggatgtttcactcctattgctgttccctactgaatcttgagagatctgaaagtttggaatgatagaagaaacaccatattcatcctgatacttcttacaagatttgtaatgatgtctcatgcgatagaatttaatctgttttgcacagcatctgcagctaccagaaaacttcctcattatattttcaaggtctaaggcccgttcaggacatgctctctctcttctagtcacatttccacgacataggggacaatgtgctccgctttccctcattgcagtcaggaaacattttctacagaaaacgtgctgacaggccgtggtccgcacgggcgttttgagcacctcctgacagacggggcagtagaaatcatcttcggtgtaggacgtggccgcagagaggtcctcggccatggcgggggatggggaaacaaggcgatggcgacagcggcagcggccgaggtgacggtggcggcccggggcccgactccctaggagccccgaagcggcgttgtggacggagctgcttttccttcacgtgttcgtagagacccggcccagcgctttcctcgagcttcctgtccggccgccgctatcttcgcagccgaggccccggggcaaatggagggcggcgtgcgctgtgcttatcggcccctaacggggccggagccgaggctcatggtgcagggagattcgcccgccgccgccagcagctctgtcttggcattgcgctgcctacagcctacccggccgtcaccgaacgcgggagcgccggggatctgggcggaggagccaggagaggcggggaggcacggggtgtgaagtgcggcctgtctcgcccgct

SEQ ID NO: 441064 - DNA, 1696 bp, Homo Sapiens
  misc_feature (3)..(3): n is a, c, g, or t
  misc_feature (8)..(8): n is a, c, g, or t
  misc_feature (10)..(10): n is a, c, g, or t
  misc_feature (12)..(12): n is a, c, g, or t
  misc_feature (27)..(27): n is a, c, g, or t
  misc_feature (256)..(370): n is a, c, g, or t
  misc_feature (384)..(527): n is a, c, g, or t
  misc_feature (617)..(617): n is a, c, g, or t
  misc_feature (621)..(621): n is a, c, g, or t
  misc_feature (626)..(626): n is a, c, g, or t
ctnttttnantntattgacaatgaaangtttccctcaaattggaatactttactaaaactgggaaggagtaatcacataaagaacaacccaatagttctatactcatacaccaactgaagctatactagtagatagcaatatacaagtatatcaatatactacttttttatctttctgaaggtaaatcagtgtttctctctgcacttatctgcttccattcattcagttttttgtttgtttttgtgacagagtctnnnnnnnnnnnnnnnnnnnnnnnnnnnnnnnnnnnnnnnnnnnnnnnnnnnnnnnnnnnnnnnnnnnnnnnnnnnnnnnnnnnnnnnnnnnnnnnnnnnnnnnnnnnnnnnnnnnatttgccaccacannnnnnnnnnnnnnnnnnnnnnnnnnnnnnnnnnnnnnnnnnnnnnnnnnnnnnnnnnnnnnnnnnnnnnnnnnnnnnnnnnnnnnnnnnnnnnnnnnnnnnnnnnnnnnnnnnnnnnnnnnnnnnnnnnnnnnnnnnnnnnnntcattctggttttgttgtgtgctttgttctgtcttggaatatttgagggttaagaaattaggtcaaaagtctgccagcgtacaccaagcngtgngggtngtgaaaggagggctggcaaaatgtctaccacggcatctgctttagaaaggtgaagcgatcactgcaggtgtacacatcactaatgccatcctttcttatcactgggtgctggaaactcaggtaaaccagggaggagaaagtatcttcatttctcccaagagtgttatttctccatcatcatgttcaaagccttctctcaattctttgagttcttctctttatcttgtttcctactgccaacacaacttgcttctgctgtggcacatccttgctctgtgcctcagtttctgcatctcagggagcctcagtcctgtctgcttctttctttcattttgacttcctcggtcagcttttccctctgccagaagagttgacatagaactttctctcccacccaatgcattccagaggaactttaggatgcccttgggataagagtgtttagagaagaaaattttctttgaaatcatcatgaagtaattccaacgctctgtgtgagataatcatgcttccagccaacactttgtgcagcagaaagtcctcgaactggctccaaaacttttcaattcctgacaaatgcactggcccctctccaaggagctgggcagcaatctgtgctttatgctggtgtgtggtggtggcaataccactggtgggagagccaggaggcggaggcgttcttctcaagtaagaaagatctgaagaccagtggccttggggacgcacccaggcaccaagaactccaactcacggcaccaagaactccacggtagggggcaggttcttacctgctttcaattttcctgtaaagaagtatttagagttgataatttcgaaggtccctttcatcacttaattccaagcttaagataatcttttcaccatctcttacttgcttcatatcctgccattcacattgcagctactctttggtgaagatctttttcaattattttggggagcttgttgttttttaatgtagggttcaagtcctgtagtgaaatctgtttcatatttgcaatcagttttcagctcctggaagaatcccaaattggtaagtcccttaagtg

SEQ ID NO: 441065 - DNA, 776 bp, Homo Sapiens
tggtccctgtgcccaaagcctccaagccctctaagatctttgttgcatagctatcagcattctccatgaactcctttgtgaccagctcctgagcacaagattctttaacattgtcctgtccataagtgaccatcacaccctgcaggcagccaggctttaggacagtggagagacgcggggttccaggaaccctgcttaagcacggcatgctcaggagagactttcttaccaaacagctcaatgtagacctcttgaagcgtgtgcacactgcagaactggttcagttcgtggtggatcttgttgaagatgagggccttgtcatagtcagcagtatagttcttcactatatcatacactgcgttcgggaccaggaagttcaccacttcaattctgtcaaagtagatcatcacaccaccactagtcccacaaggtacattcttcacctcatctgtctggagtgtggtctgcacagacttatatgatgtgatgaaagggagcatgagatggaaaccagggccgctggtcgaagtcagcagggcaccgcctctgtaatataccccaatatgtccctcttctatcttgtgcacagctgagaagagagatgcacaaaagaaactggaagccacagccacaactgctcccaactgagccatcagtgagcctttatctgcaaagttcagctgtgcgtgcgtgggcccgtgagcgcagggcgtggattctgcctcccaggtctaacgtaaccggggcgcgggacatctgcgaggcgcttattttac

SEQ ID NO: 441066 - DNA, 862 bp, Homo Sapiens
gtcgtgagccaagatcatgccatcccactctagcttgggcaatagagcaaggctccgtctcaagaaaagaaggtcatttcccaagactagcatagggagtatccatttaaaatacattcatcttcctcccattttcgtgctattaatcacttgttagagcaacatgacatgcccagcatcccacttcccgaaaatgtctactccttctactctgagctcttgttgcctagacctcagaaaacaccaattcaccacagtagaaccgggagcagggatagctcagcttctctgaatagcacactttgctcaggtcttaacttgagggcctctccggtactaacatcctgcgatagcttgtcccatgagcacagaagagctctcagtagagtcaagtcctgctgcagctgccccaccccaagtttctatcatttcctctttaaacaaaaaaatatgttatcctacacattagtgtcaatccaatggttgtctcttatctgtctaaatagcaaaatcatgaaaatcagctgttttatttgcataggacaactaacctgtctgtgtaactttgtttttattttaactcttactagaaaatctaatcttaaaacatttgaattcaaaacatgtaaaatgtgacagcctgcaattttgtagacagtgaagtaaagggctgctatttataaatgggaacatctatcaaaaataagttaactggtttataaaaattcagttttttggtagggggtttttcccaagggaaaaaaatcaacccttgggtttggaatggttttcctccacctccatttaaaaaccttttggccaggaaagtggaatatccattaattgtcagcgtaacctggga

SEQ ID NO: 441067 - DNA, 1280 bp, Homo Sapiens
agtaaattcagggaataacctttctcccacggggtggcaggtcttttccaccattggtttccaggcaagggggcttccccaggcaagaaccccggctggaatccccttgctggttaggcctgctcgaaggggtagttcatggcccatatggcccctgggtaatcggggacttccagggccaaatggtaatgataggttccaggagccatgtggggaaaagattggggaggcaggcatcggtccacatgctggatacctctgaggtttcaaactggagggaaactccctggacctgagagttctggggaggtcctggggggtaacacacggaggtgaggggcaggggcctttccagctgcctgatgcccaggacatcctggggctgggaatcatatcccgtgtctatggttggcagatccaggcctgctcggttcctgtgaggctggggccgttgcaccatctcctggctaccgcccaaggagtctgctgaggcattaggtaaactttggtctgatttgtctgagtcatggccagtgtcaggagaagccgctgaaagctgagataccagccattgattacgtttttccataaatgaaaactgatgctctgcagggagggctccaaccacagactcagacgcaggctcgctgactgcagagcacccagaagggaaagctttgcccaggcctgggtgtctcctgcagaaactgtcttcactgtcctccagaacttgagtgcgcaggcaggtgacctgccgggatacaggccgctggtgatttgcaagtttcagggttgagtgagcttgagaaaagtctccggaggaattgtgaagcattgtgggtgcagacaagctgttgggtgccatgttccttatatttggagcaggtggttctgattcctcttccggggaatattctgggattggtttcagcaactgacttgggtatggttctgattcatcaacctccacaggaatgcttcggttcattctagtttcttagatccaccacggacagacagactgggcccggagggtagtcggctctcggcggcttctcgtctccctccaccttctccgggcccaggtaagtagaagaacaggctctgaagcaggaagtggaagctgtatgcaaatttctacggagcctaggaagcctctgctcaaaatctccctgtgggcagtgaatcaacggctgaggagtcactttatttcttaaaacagaaacctccttcattcatgagaaagggccagtgaccaattaggcggcatttttgttttc

SEQ ID NO: 441068 - DNA, 2833 bp, Homo Sapiens
  misc_feature (1131)..(1131): n is a, c, g, or t
  misc_feature (2747)..(2779): n is a, c, g, or t
ttaagggttccaactttatttaaaaccagacagccctgctaccatgcccccgctcctcagcattgctctaggggaggagctggatgaactatggcccttctgccaagcccaggtgctaggggaggaaccccttgcttgagatgtacaggatggactcctcacttcttctgggcttgtgccctggcccgttgaatcttgtcagctgtggccccatctgtggctcccgtgcagtgggacaatacgaggctcagctcagcctcattccggtgttcgatggccacatctgcagcctgagccacatcgccaacaagaagcaaagccttgaccttctgctcgggacccacgcgggaagcatacttcttggcttcgtatttgttatgttgtttcatgcagatctccacaaaaggcaggtagccaatgggtgatttcttgctcttggaaaacttctctagctcttcccaatcttccaaatctgccagggcagtcagcttcagccaccagagcctcttgtcagggatgcggaagtcacgtgccagctgctctgcacgcttgttgtgaccgccaagaatgagggtggtaactgtgtcatgtagagacaggtctaggaactggccccccagctcgtcttctaggcgccgctgcagccgtaggagccgcatttgatcctctgtagccttggctgcaaactcattcttggccttgtagaaggcatcggcggctgtctgcagagctgctactcgcccctcaatacgctcttctgcagcatagctggctcggatgtggaagctgcccaattcctggtgattgtcatcctgattgtaaaggtccttcagcgtctctagctcctgatgcttacagaactgtcggtacaaactgagggccatgggctgattccgaagggtcatgaaaaaatctcctcggttcagctcgttcttcaggtgcagcaacaccgtgaacaccaggtcagtgtccccgctctcgatggccttgcttagtgccagtttgctcctcttcatctttaggagaaggggtacctgctcccctgagcgtggctcatactccagcagcttgatggccagctccgtgcggccacaaccataggctcgtgcagcaatgtcggagtaagagacnccaggcgtgtcccccagcttctggttaatggctcgagccacatcctcatctgagacatccttctgttgcaccttgtagcatgcccagtgggccaggatcctgctgacgccctgtacttcaggaaggcgcaagtactcgcatatctggatggccagggggtaaagtctccgcaacacgagcttgtccagcagcacctggatggtgagctgcttatattggctataggtgagcgggatcccgatgtgatagtcccgaacagcattgagcacacgcaggtcctgacacatgtgcacgaagctgtcgggtggaaatctgtccaggaaacactttccgaaggaggcggccctgagcagactcttctgcatgtctggctggtgctcatgtcctgcagcctcaatgcactgctgcacggcctgggtcagctggcccagctcctggatctcccgcaggtactcgtccgccttctggctctctttctcatactccttctgagcctccaggagcagcgccccgggggccattgaggcaattttgaagatttcctcgctggccgctggaacctcatgcaggaactcgtgggtgctgcgggagaagatgcggaccccatcgagctcaggcaccaggtaggagtcctcatccagcacaaactggatgctctcgggtgcatcgcccaccaccatcagccgcctttcccaggccaccaccacggccttctccttgctacgaggacggctgcaccagaccatctgctttggaggtgcccggatgttgcagttgaactcacatagcttctccttgagtgatgctgtccccatccagatgtagcctgtgtctgtgaagagtgccaggtttcggtaggtgaaggagacagccatctgtaggaagctgcttactcctgggccaggccagggggcgtcactgcggagcagggctgcatggtccaagaggtaaaggtcaggccccacagccagaagaatgtgtgccactcggtcctggcacagcacagtccagcaggagggtgcactttgcagacctggcacctctggcatccggcggagtttgaggtcacccacattggcactgagggtgaagcggtgggcccctgtgaggatggccactccggaaccaaactcagtgtgaaagatccgggcatccagaacccggttctggagcacttcattgcccatgctgaagtgtctccggaagtcaccatgaagcccataaaccagtacagcaccatcttcctgcacacagagcagctcctcctcagctgaccagcccagggacaccacgggtccactcttccacagcaggctggccagaggcatgccggaagcagagtatatatcgagcactggcctcacactagcagctttctccttccgccaggggttcctcagcagtgcaatggggcccccatagggtgcagcagccaccaggcaatccctgagttcctccttcaggtcccagtccatgctgtacagctcatatttccggtaaaaggcagagtccccgagtgggttccagttcgccgtgtagcagtccatggctggtgcagacggcagctgggaagcccgctcatcgacgaattcgagctcggccgatttggcctgatnnnnnnnnnnnnnnnnnnnnnnnnnnnnnnnnnatgcgccgccaccgcgatacgcgggcccaagagtcatcattcggggggggtggt

SEQ ID NO: 441069 - DNA, 533 bp, Homo Sapiens
  misc_feature (88)..(88): n is a, c, g, or t
gtagagacaggtctaggaactggccccccagctcgtcttctaggcgccgctgcagccgtaggagccgcatttgatcctctgtagcctnggctgcaaactcattcttggccttgtagaaggcatcggcggctgtctgcagagctgctactcgcccctcaatacgctcttcttgcagcatagctggctcggatgtggaagctgcccaattcctggtgattgtcatcctgattgtaaaggtccttcagcgtctctagctcctgatgcttacagaactgtcggtacaaactgagggccatgggctgattccgaagggtcatgaaaaaatctcctcggttcagctcgttcttcaggtgcagcaacaccgtgaacaccaggtcagtgtccccgctctcgatggccttgcttagtgccagtttgctcctcttcatctttaggagaaggggtacctgctcccctgagcgtggctcatactccagcagcttgatggccagctccgcctcgtgccgaattcgccacccaggcctcgctaccta

SEQ ID NO: 441070 - DNA, 935 bp, Homo Sapiens
  misc_feature (32)..(32): n is a, c, g, or t
acatgccctcccagcccctcccatctttggangaggcctccttcctcaggttcctcctgctcctgacctcccagtgtgatgtccgggtcctttatcatcctattcatcctggagaggaaaagtgtcgggcaaagggggatctggggggagctcagcagtgactggggagctggtctgcctcagagacagagtagggggtgggagcagagcctcggtgagggttttggccacagggcagtgccttcctgaacgtggcaggctttactaccaggaacgcactcggtggtggaggccccatgttcccaggagccaagatttgtagcatccttgaggccatcctgataaaattcggcgctattgcccccgtagctctggagctctaaaccgtctatctgcttctgtgctgaacgcctttcccatctgctgacgtaggcccagggctgccctgcccctgctgccagtgtaccgtgagcggggctccagccagttcaagctcagagccagagctggacgggccagaactgcgctgcacacttcctggactgaggcggggactttgggtcccacccggtttctcctgattatggctgctgtggggtgaggggagggaggggcagccccgaggcagtctcttccctttgagaagatattttcccacaaaggggtgggaagccaggagtgagaaggaattcagggagagcaaaggagccagtgctgagatgctgctgtgttggttgaggaaaacctcgggcctgagggccaggccggagcccaggtctctgctgacaatgggggttcaaggaagacgtcgttaatctcccctccccacttactcgaggagagaggtgagggggggatgacttgcgggttctgatcaggccccagggccaggctgggccccccggagtcccatcaagcgacgctcgggggctctt

SEQ ID NO: 441071 - DNA, 1161 bp, Homo Sapiens
  misc_feature (749)..(749): n is a, c, g, or t
  misc_feature (1021)..(1021): n is a, c, g, or t
  misc_feature (1040)..(1040): n is a, c, g, or t
  misc_feature (1070)..(1070): n is a, c, g, or t
  misc_feature (1072)..(1072): n is a, c, g, or t
  misc_feature (1080)..(1080): n is a, c, g, or t
  misc_feature (1082)..(1082): n is a, c, g, or t
  misc_feature (1102)..(1102): n is a, c, g, or t
  misc_feature (1105)..(1106): n is a, c, g, or t
  misc_feature (1122)..(1122): n is a, c, g, or t
  misc_feature (1131)..(1132): n is a, c, g, or t
  misc_feature (1138)..(1139): n is a, c, g, or t
  misc_feature (1144)..(1144): n is a, c, g, or t
  misc_feature (1151)..(1151): n is a, c, g, or t
ccaaaaggaatgctttattttgaattttaaaaatacatacatcttacactgtaatcgaaacagagcttaagagagtgaattcccgcttcctttagccctgacttacactgggtacccgtttctgtggccgccgggggtgacgggcctttgcaggggctcatccccgctccactgcacattagccagccccttccgccttgtcttccccgtgttggtcatgatccccaggtactctgtggtcagaagcttctctcctgagagttctccgagctggggctggatcagttcgtctttgtccagatcggcttccatgatgtcatggtcctcttcatcatcttcatcttcatcatcatcagattcaagaacaccatctggtagctcttcggaatttagctgcttgatgatgaattctatctggcggatcatttcagcattgccttctttgatgaagcagcgtaggatgtcttccattcccattgctcttgcttcctcacgaatggatggaacagaaaggatgctgtacagagctccattcacatacggctgtatctcatggttttcatggccaagaagatccgaaaggactttgggcacgaggcctgccaccttggcacacatgttcttccctgtgctgcggaggcagaggttcatgagcaaagccaccgagtactccagcgtgtagtcagacaggcagtcagggtccttcagaacatcaaccagccagaagatgaggccgtctttgaatcatncgctgtctgcagcgggcgcctgagactgaacttctgcagggccccaagaacattctccctggtgatgatatccttgtcctcctccttcagccttccctccagcatctgcagcacctttgtgttctgggcaaggtagaggcgaccttctgccagtgacgcaaaagcattgatgagcctggccatgtactgccgcaccacgtcgctcgtggagtgcagcaactgaagcacactcctctggttgtggctataaaagtccaagaggtcattgctgntgtaggcttgcagaacggnctccctctgctctccaggatggggtgtggncnagcgccananagagcctgcaacaaaaaggnttnnagcgggggctcccccnaaaaaaatnnttcttnngtttntcttatnccaggggggg

SEQ ID NO: 441072 - DNA, 1036 bp, Homo Sapiens
  misc_feature (9)..(9): n is a, c, g, or t
  misc_feature (24)..(25): n is a, c, g, or t
  misc_feature (43)..(43): n is a, c, g, or t
catctaacnggctgtcatcattgnnggtgccattaatcaaatnttttccttctggacacacacaagtgcccccagaaggatttagcaagcaaagaaattcgcatgctaaatccaagcatggattgggtaaatctagttgtttataacgatgagatatcaaaacaccttttgttttatcaatatttaaagctaagtactctactgaaccatggccaaatttttgaactcgaaatacaccatttttaggtcctgctccatatatataatcttcaaagatatcgatcctatgtggatgtaataaaccttgtttgctgctgacagagactactgaattagagccatcatacagaacactgccaatgatggagagctcaaagtcagcccaatatatgcgttcactaaaataatccacagccaaacctgtgggtctctgtaagttcttttgtactaaaatccttctcagtgtaccatccatggctgcttcttctatatgggaatgatccccaacaacagtccagtacatcatccctcttttaggatttactgcaatagcatagggttctccagccatatttgttaagagtctggtgcagttggggccattcagctgccctacgttgatagagtacctcagactggtccagtgagtagtgtagtaactgaacccatgcattctagaatgatcagtccagtaaatgtttccagccacccagtcaactgcaatgtccctgggccttttaaattcaggacaaatcaagccactgtttgcttgccttttttctctgccatggatccttttgtagaaaattccgcctggattaaactgagtactccaaataatcatatctctttgataatatacatccatccctgttattcttgaattatgttcactatgagaaatttgttgatgatcgcctctgtagttgaactggatatataaaacccaggatatcagtgtcattagcaatgtagagaacttgatcttcagagccttctgctatgcaggtgttatttcttatcccgggaattccgg

SEQ ID NO: 441073 - DNA, 718 bp, Homo Sapiens
  misc_feature (98)..(98): n is a, c, g, or t
  misc_feature (109)..(109): n is a, c, g, or t
  misc_feature (114)..(114): n is a, c, g, or t
  misc_feature (159)..(159): n is a, c, g, or t
  misc_feature (170)..(170): n is a, c, g, or t
  misc_feature (192)..(192): n is a, c, g, or t
  misc_feature (237)..(237): n is a, c, g, or t
  misc_feature (276)..(276): n is a, c, g, or t
  misc_feature (356)..(356): n is a, c, g, or t
  misc_feature (382)..(382): n is a, c, g, or t
  misc_feature (387)..(389): n is a, c, g, or t
  misc_feature (431)..(470): n is a, c, g, or t
  misc_feature (695)..(695): n is a, c, g, or t
ttgcatgctgtttgtatttgtgtttttactggtgagacactagttgttcagggcctggctttggttcaccccctttagtgctttcccacacttcactnaaccctctccntttcntcgctgctaatagtctttttattttaaagcaattcctggaactgntttaggggctnaccatggttgctgggtgtcccncctcagataggaatgctgctgggcgattgttttatagtcttgttntcacaggccggactaccaggtggcccattactccagttnaccttctctactggctttgctgacctgctaccctacccctcacattgtttgccttgcccagcctgtgtacactctacttntgctgtcagttctcgtactttgcctnataannnagtccttcctgttcttttataggtggggtctgtctggggatnnnnnnnnnnnnnnnnnnnnnnnnnnnnnnnnnnnnnnnnttctcgtgctcgttctgcctcccttatggctggacggtagctccggtgaagctttgagaaaactcttttggcctcatgtcaatgttctattgcattgagagcccaagaacccatggtcagttgacacgggcatggcagtttcaactcgattttcctgtcacacgtttaacagtggtttcaaatttatatccagtgtgttttcaatatacccaaacatttaactgnagcttttggtagatgtatagttc

SEQ ID NO: 441074 - DNA, 1194 bp, Homo Sapiens
  misc_feature (4)..(4): n is a, c, g, or t
  misc_feature (9)..(9): n is a, c, g, or t
  misc_feature (22)..(22): n is a, c, g, or t
  misc_feature (28)..(28): n is a, c, g, or t
  misc_feature (31)..(33): n is a, c, g, or t
  misc_feature (36)..(36): n is a, c, g, or t
  misc_feature (40)..(40): n is a, c, g, or t
  misc_feature (50)..(50): n is a, c, g, or t
  misc_feature (52)..(52): n is a, c, g, or t
  misc_feature (59)..(60): n is a, c, g, or t
  misc_feature (71)..(72): n is a, c, g, or t
  misc_feature (74)..(74): n is a, c, g, or t
  misc_feature (93)..(93): n is a, c, g, or t
  misc_feature (96)..(96): n is a, c, g, or t
  misc_feature (101)..(101): n is a, c, g, or t
  misc_feature (103)..(103): n is a, c, g, or t
  misc_feature (111)..(112): n is a, c, g, or t
  misc_feature (131)..(131): n is a, c, g, or t
  misc_feature (136)..(136): n is a, c, g, or t
  misc_feature (141)..(141): n is a, c, g, or t
  misc_feature (151)..(152): n is a, c, g, or t
  misc_feature (154)..(154): n is a, c, g, or t
  misc_feature (157)..(157): n is a, c, g, or t
  misc_feature (164)..(164): n is a, c, g, or t
  misc_feature (636)..(693): n is a, c, g, or t
ccancactntcgctctcatttngaaccncannncantttngtaagaaatnantgtgganncactcttctcnnantagtgccgtgtgcccgctnttntttcnanaaggctannccttttgttcagtactccnaatgnccccnatccccgggnnanctntgctggnagaaaatgggcgggtgctggccgggcagaccctggacatcaaacatggctggagagcctaagcctgacagaccccaagggctaaagagagcagcatctgccatatacagtggctacatctttgactatgattactaccgggacgacttctacgacaggctcttcgactaccggggccgtctgtcgcccgtgccagtgcccagggcggtccctgtgaagcgaccccgggtcacagtccctttggtccggcgtgtcaaaactaacgtacctgtcaagctctttgcccgctccacagctgtcaccaccagctcagccaagatcaagttaaagagcagtgagctgcaggccatcaagacggagctgacacagatcaagtccaatatcgatgccctgctgagccgcttggagcagatcgctgcggagcaaaaggccaatccagatggcaagaagaagggtgatggaggtggcgccannnnnnnnnnnnnnnnnnnnnnnnnnnnnnnnnnnnnnnnnnnnnnnnnnnnnnnnnncggtggcagcagccggccaccagccccccaagagaacacaacttctgaggcaggcctgccccagggggaagcacggacccgagacgacggcgatgaggaagggctcctgacacacagcgaggaagagctggaacacagccaggacacagacgcggatgatggggccttgcagtaagcagcctgacaggagcaatggccaccagcaggtgaagggcatcgctgccccaggcctcaagccgggcacccaaccctggatgccaccccccagcgggtaccagaggaaagctggcagcaggcgcctcctcccccaacgcatcccagccagtgccatgtcctctgcaggtggagttactggcctactccttccccatgagccctccctgtctgcactgcccaggccagagggtagagcacaggggtttccccatactacctcccctccccaggacactcccaggcttgggttttttctataggtttggcggggggccacagggaggg

SEQ ID NO: 441075 - DNA, 1491 bp, Homo Sapiens
  misc_feature (264)..(336): n is a, c, g, or t
gacccttggggtggcatcccaggttttgtgtccggcttgagcctggccacgatgccctttcacctgctcggtgccattggtccctgtcaggctgcttactcagagcgcccatcatccgcgtctgtgtcctgctgtgttccagctcttcctcgctgtggtatcaggagcccttcctcatcgcccgtcgtctcgggtccgtgcttccccctgggggcaggcctgcctcagaattgttgttctcttgggggctggtgcccgctgctnnnnnnnnnnnnnnnnnnnnnnnnnnnnnnnnnnnnnnnnnnnnnnnnnnnnnnnnnnnnnnnnnnnnnnnnntccatcacccttcttcttgccatctggattggccttttgctccgcagcgatctgctccaagcggctcagcagggcatcgatattggacttgatctgtgtcagctccgtcttgatggcctgcagctcactgctctttaacttgatcttggctgagctggtggtgacagctgtggagcgggcaaagagcttgacaggtacgttagttttgacacgccggaccaaagggactgtgacccggggtcgctttcacagggacccgccctgggcccctggcacgggcgacagacggtccccggtagtcgaagagcctgtcgtagaagtcgtcccggtagtaatcatagtcaaagatgtagccactgtatatggcagatgctgctctctttagccccttgggtctgtcaggcttaggctctccagccatgttgatgtccagggtctgcccggccagcacccgcccattctctcccagcacagctgcccgggcatggcgctcattggagtactgaacaaaggcatagcccttgtgcacagaacagccggccacacggccatacttagagaagatggtctccacatctgatttcttcaccagagctgtgttgaggtttccaatgaagactcgagagttgatggacttggggtcattcttgttggttacattgcttgcctgaagcttcaaggacatggtgcccactttaccaacatttcttgagtgtcctcctctgtgctggcactgtggagatgctgggaaacaccgtgctcaccagtcttctgctctacttgcttttcaagaagccccctctctgggaaccagtaacaatgatgagcttagccagctgtttcctcctttgggttacagggtcagcaccacctgcctctgggaatagggctcacccgcgccgagaggtctggaggaagccgcgcggctgggaaggaggcggtactgccgcactcggggacgtaagggagggaggaaaagggcggctgcggcgggaagaggctgggcacacgcgcgggagtcgtcgtcgtcgccgtcgccgccgctaccgccccctcagcttctctgggttccgctgccccgagctggcgccgctcgcgcgccccgccgcactgacagcggcgcgagccccgcaaccgcgagccctgccctcggcc

SEQ ID NO: 441076 - DNA, 1202 bp, Homo Sapiens
  misc_feature (1057)..(1119): n is a, c, g, or t
aaggctaggtacgaggctgggtggttaatcggccgaggggcgggcggagccgagctgcggggagccgctccgggtgcccccacccccgcgcgcctcagtggtgccggccgagggcagggctcgcggttgcggggctcgcgccgctgtcagtgcggcggggcgcgcgagcggcgccagctcggggcagcggaacccagagaagctgagggggcggtagcggcggcgacggcgacgacgacgactcccgcgcgtgtgcccagcctcttcccgccgctagccgcccttttcctccctcccttacgtccccgagtgcggcagtaccgcctccttcccagccgcgcggcttcctccagacctctcggcgcgggtgggcaccatgtccttgaagcttcaggcaagcaatgtaaccaacaagaatgaccccaagtccatcaactctcgagtcttcattggaaacctcaacacagctctggtgaagaaatcagatgtggagaccatcttctctaagtatggccgtgtggccggctgttctgtgcacaagggctatgcctttgttcagtactccaatgagcgccatgcccgggcagctgtgctgggagagaatgggcgggtgctggccgggcagaccctggacatcaacatggctggagagcctaagcctgacagacccaaggggctaaagagagcagcatctgccatatacagtggctacatctttgactatgattactaccgggacgacttctacgacaggctcttcgactaccggggccgtctgtcgcccgtgccagtgcccagggcggtccctgtgaagcgaccccgggtcacagtccctttggtccggcgtgtcaaaactaacgtacctgtcaagctctttgcccgctccacagctgtcaccaccagctcagccaagatcaagttaaagagcagtgagctgcaggccatcaagacggagctgacacagatcaagtccaatatcgatgccctgctgagccgcttggagcagatcgctgcggagcaaaaggccaatccagatggcaagaagaagggtgatggnnnnnnnnnnnnnnnnnnnnnnnnnnnnnnnnnnnnnnnnnnnnnnnnnnnnnnnnnnnnnnntggcggtggcagcagccggcaccagccccccaagagaacacaatttctgaggcaggcctgcccaggggggaagcccggaccca

SEQ ID NO: 441077 - DNA, 1777 bp, Homo Sapiens
  misc_feature (161)..(245): n is a, c, g, or t
attgtgggggggagattccaagcccctagttcatggcccaggatctttccctaggaaacaagcttatggccactgttcccttttccttctggggcccggcgcgccacaacgaataggttttgaaaaagctttttcgaggggccgaagcgcgcccgacaagnnnnnnnnnnnnnnnnnnnnnnnnnnnnnnnnnnnnnnnnnnnnnnnnnnnnnnnnnnnnnnnnnnnnnnnnnnnnnnnnnnnnngggatccaatctctttattgtcagggtcccctccctgtggccccccgccaaacctatagaaaaaacccaagcctgggagtgtcctggggaggggaggtagtatggggaaacccctgtgctctaccctctggcctgggcagtgcagacagggagggctcatggggaaggagtaggccagtaactccacctgcagaggacatggcactggctgggatgcgttgggggaggaggcgcctgctgccagctttcctctggtacccgctggggggtggcatccagggttgggtgcccggcttgaggcctggggcagcgatgcccttcacctgctggtggccattgctcctgtcaggctgcttactgcaaggccccatcatccgcgtctgtgtcctggctgtgttccagctcttcctcgctgtgtgtcaggagcccttcctcatcgccgtcgtctcgggtccgtgcttccccctggggcaggcctgcctcagaagttgtgttctcttggggggctggtggccggctgctgccaccgccaccgtcaccaccactgtcaccggcaccggtggcaccaccaccgtcgcggccgtcgtttgcgccacctccatcacctttttttttgccattttggttggcctttttgctccgcagcgatctgctccaagcggctcagcagggcatcgatattggacttgatctgtgtcagctccgtcttgatggcctgcagctcactgctctttaacttgatcttggctgagctggtggtgacagctgtggagcgggcaaagagcttgacaggtacgttagttttgacacgccggaccaaagggactgtgacccggggtcgcttcacagggaccgccctgggcactggcacgggcgacagacggccccggtagtcgaagagcctgtatatggcagatgctgctctctttagccccttgggtctgtcaggcttaggctctccagccatgttgatgtccagggtctgcccggccagcacccgcccattctctcccagcacagctgcccgggcatggcgctcattggagtactgaacaaaggcatagcccttgtgcacagaacagccggccacacggccatacttagagaagatggtctccacatctgatttcttcaccagagctgtgttgaggtttccaatgaagactcgagagttgatggacttggggtcattcttgttggttacattgcttgcctgaagcttcaaggacatggtgcccaccagtaacaatgatgagcttagccagctgtttcctcctttgggttacagggtcagcaccacctgcctctgggaatagggctcacccgcgccgagaggtctggaggaagccgcgcggctgggaaggaggcggtactgccgcactcggggacgtaagggagggaggaaaagggcggctgcggcgggaagaggctgggcacacgcgcgggagtcgtcgtcgtcgccgtcgccgccgctaccgccccctcagcttctctgggttccgctgccccgagctggcgccgctcgcgcgccc

SEQ ID NO: 441078 - DNA, 1378 bp, Homo Sapiens
  misc_feature (49)..(49): n is a, c, g, or t
  misc_feature (64)..(64): n is a, c, g, or t
  misc_feature (121)..(122): n is a, c, g, or t
tgggacgggaaatgtctcccctttgaattgggggaagaggtttaagcgnggggccccacccaanatattccccgccacaggtgccaccaaccaccgccgccgccgccggtgggcgccactnnccatcaccctttttcttgccatctggattggccttttgctccgcagcgatctgctccaagcggctcagcagggcatcgatattggacttgatctgtgtcagctccgtcttgatggcctgcagctcactgctctttaacttgatcttggctgagctggtggtgacagctgtggagcgggcaaagagcttgacaggtacgttagttttgacacgccggaccaaagggactgtgacccggggtcgcttcacagggaccgccctgggcactggcacgggcgacagacggccccggtagtcgaagagcctgtcgtagaagtcgtcccggtagtaatcatagtcaaagatgtagccactgtatatggcagatgctgctctctttagccccttgggtctgtcaggcttaggctctccagccatgttgatgtccagggtctgcccggccagcacccgcccattctctcccagcacagctgcccgggcatggcgctcattggagtactgaacaaaggcatagcccttgtgcacagaacagccggccacacggccatacttagagaagatggtctccacatctgatttcttcaccagagctgtgttgaggtttccaatgaagactcgagagttgatggacttggggtcattcttgttggttacattgcttgcctgaagcttcaaggacatggtgcccaccagtaacaatgatgagcttagccagctgtttcctcctttgggttacagggtcagcaccacctgcctctgggaatagggctcacccgcgccgagaggtctggaggaagccgcgcggctgggaaggaggcggtactgccgcactcggggacgtaagggagggaggaaaagggcggctgcggcgggaagaggctgggcacacgcgcgggagtcgtcgtcgtcgccgtcgccgccgctaccgccccctcagcttctctgggttccgctgccccgagctggcgccgctcgcgcgccccgccgcactgacagcggcgcgagccccgcaaccgcgagccctgccctcggccggcaccactgaggcgcgcgggggtgggggcacccggagcggctccccgcagctcggctccgcccgccgctccggccctggttccgggctctcctccttctctgtctcctgggaaggacacggtgacacgagcacgaggagtctgcagccccgcccagaaacagcccggcttcccaggcgcatgggctctccccaccctcgtccgaattcgccacccaggcctc

SEQ ID NO: 441079 - DNA, 629 bp, Homo Sapiens
  misc_feature (117)..(117): n is a, c, g, or t
tcaaaaaaaatcttgcagagagtggcagactcaggatttgagttcaggttctctgggctaccttccaccttcccgcctcaggtatatggctctttgtttttgtggtgcatttttctnttttatgcccagtcccctccaagtcccacacacagactgaccttctgggctagacagaaggcagcgatgccaacgggccagaaacaacacagcatggagaagacagccaagccgaggtggtcgtggggtagaaatgttgaaagacggctgcctccatcccagtccgagtcactgtcactggatgacatgtcctcaacatcagggggccttggttcccccaggccagcgctcacggagggaagaggcggtgacaggaactgcaaacccctcagggactcggcaaaggctatctctcttaagggggaccccagctcatgcctgccaggcttctgggcaggggtctcacattctgtgccctccagcagaggctgttgaagctcacgaagactagggctgtccatggctttggggaaactccaggaggggtttccgctcacgatcacaggccggggcttcctgaaccctcgcaatgacacttgcccggaccctgccaccgaggatccaaggggcgc

SEQ ID NO: 441080 - DNA, 430 bp, Homo Sapiens
  misc_feature (34)..(34): n is a, c, g, or t
  misc_feature (50)..(50): n is a, c, g, or t
  misc_feature (218)..(218): n is a, c, g, or t
  misc_feature (223)..(223): n is a, c, g, or t
  misc_feature (301)..(301): n is a, c, g, or t
  misc_feature (349)..(349): n is a, c, g, or t
  misc_feature (370)..(370): n is a, c, g, or t
  misc_feature (388)..(388): n is a, c, g, or t
  misc_feature (409)..(409): n is a, c, g, or t
  misc_feature (416)..(416): n is a, c, g, or t
acaagggtgtctggtgtttaacctcaggttcctnccgcccgacgagcgtnggccaggatggggaagggttccagtccagctcgctcccgtttctagatgctcctgccgccgccgcagcctcatccaccaagattctccactctctgcccacagatttgctgggctgccggcctcagggttcacagtgagggctgtaggggcaactagggcgggtcttntgggntagacagaaggcagcgatgcaaacgggccagaaacaacacagcatggagaagacagccaagccgaggtggtcgtgggntagaaatgggtgaaagacggttgcctccatcccagttccgagtcattnttcattgggatgacatgttcntttaacattcaggggggntttgtttcccccaggggcagnctttaangaggggaagaaggt

SEQ ID NO: 441081 - DNA, 1506 bp, Homo Sapiens
tttttgttatccagtggatttattggggtaagccccccaatttttaaaccaccagcaaggcccccatgcatgccatcttccaccaggaataaaataagggcggcaattcaatgaaacccattctgtctttttccttaaggagctctggggagggttctgcttctgcccacctaggggctgggatcctttcagctcttgaggaagggttgggaaaggtggggggtgcaggctgcaggccccacccttttctggcctggcccttgcagcctgtgagcttggcactgcattcacaatctctgaggtctgtcccagagagacctgtccccagcagaccccagcccctggcccctaccccaggagtcccatcatgggttccttctcccctctctaactgtgcagccagggtgaccagctcctcctcctcagccaagaggaccgtttgtgcaaaaaggaagcttgtgttaggtactttttcttcttgttcccccttggctcaggggctgaggggctggcccctgcctgacactggtcagcgggtggtcagctccatggtcttcttccgctcttcccgctgctcctcccagtcctcgtcaggctcatacgtgcctttgatgatggccacacgctcactcaggctcagggagttggggaagagcaggtagaagtaaaggatggcagccaggaccgcccccacgatgggccctacccagaaaacccagtgagcggggctgaaccgattcatgaccaccgcagggccaaaagagcgggctgggttcatggagcagccagtgaagtagattccgacaaggtggcccagggtgacagacaggccaatggacagggctggggagcccacagggctggtgcggcgggagtcagtggaggcgaagatgcagagtgccagctggaaggtcagaatcagctccaccaccatggcctggccctgcgttgtgttgttgttgagcgcgttgacggccagattgccccgggcattgagcggtgccacaccgtagaggatgccagccccggcaatggcgcccaccagctgggccgccacgtagaagaaagcccggagcagcgagatctggttgcccaccaagagggccagggtgatggcggggttgatgtggccgccgctcacgggtcccagggcctgggccagcgtgcctatggccaggccaaacgccagcgcgatctgcaggatggtaggcagcgccgacggccacttgagggccgagcccaggccaaagaagacgaagatgagggtggccaagaactctgcgaacacggccttgaggaaggccacggagcacacctccttcttcatggtggccgcgggggcccggcggcagctgccgcggcggggggcgcccgttgggtcgcaggcggcggaggaggtggatgcggcgggggcgggggcctggctgcggggcgccgcgcatcccgggaatcccggaccggtgcgggatgataggaaaggtaacacaggaaataggaacagtgtaa

SEQ ID NO: 441082 - DNA, 596 bp, Homo Sapiens
tgctgcagttcaaacatgtcctaaggcatcacaaaggagagttgttcacaccaagctcatttacttgtgatggtattttatagcaaacatgtttaagttgtattatcaatggttggactctgccttactggaatagtaaatttttgtggatttgtagctatttttgtttggccaaggaaatgcaatactcaagctgttaaatagaagtcagtcagacattccaagtctctctggtttcagatatcatcttgtttacacataaaggaaacaaaataaacagctttcatccatggagtttgtgttcagaagtttgtgagtgagtcttttgatgctttgtgggtttgctgcttcagtttgcattttggagtttcatactactgttgctggtctgcggtccatctcggcttccaatttcaccatctgctgcatctccttcgccttgcgtttgggacactgcatgacaggatttcaaaagctgtttgtacaaaaatagtaatgtcaaaattgagtcatacatacaaaacgaagaaaataaatgaatattgaagtgaatttgaaaaatgaatgcaaaaccatatacagaaaagcaaaaagcc

SEQ ID NO: 441083 - DNA, 916 bp, Homo Sapiens
cgggcacctcagtagatgtcctgtggccccgggccagcaggtgtcgcgagagtccgtactctcctgctccgcttgggcgcctcgtatacatagccctgccccacgcgggttggcaccaccacctttgccgggggcttcgtgccctcccagctgcgtgtgtccatggacggggggacctggtagatgtcatgccccatcccggcagaaggtggcacctggtaaatatcctgggcaggcctccaggccctgggggcacctggtacaggtctgtggccgggctgggaaacgggtgatggggtgtctgcttcgagaaggtggatgtctgcttggctgggggagactggaactgagggctgggacccgggacttggtagaggccttgctgagccttgctgggagtgggcaccaggtagacgctgtctggctggggctggtaggtgttggggagcatgggcgtgtactgggaggccggaggcgctggggcatggaggccaggctgaggctgggccggggtggcgggagggccggagccaggccctgctggcttcttatcatacatgcccaccaagatcttgaggcggttcccaggcacgatgccctggcgcccatgcagcgagcagagccaccagccgtccaggccctgcgtgtcctgctccagcaccgtcatgatgtcacccttgcggaaggagagctcatccggggactcggccacattgtcatagagcgctttggccagcacgttaggcacggacatcttggccgccgcccccggggcctggcgggcagcggcgccagcgggctgggggctcgggtccgcccgcgccgctcagaggccccgcgaggggtcccggcgctttccggctcctccggctcctgagcgttcccggatcccgggaattccggaccggtaccagcc

SEQ ID NO: 441084 - DNA, 2437 bp, Homo Sapiens
  misc_feature (1913)..(1965): n is a, c, g, or t
  misc_feature (2310)..(2310): n is a, c, g, or t
taggggtttttcaaaaggttttgtttttccaggggccacactaacggtccttcatgggtcagggggccactggttccgcctgacatggtaggttcaccaagtccccaccccatgccccagagtgtggtgacatggatttgaggtgacactagggttgtcagtaccacaccctgtgtctgactctagggtagcctctgcgtgttgtcttgcaatcattattcagggcgccctcccacttgcccccaaagtcacacggccatgggcagtccaccatagtgctgccgtgactgcaaggctgaggagcagagcaaggggtcctgggtgagacctcggcccatggtggccaccctaccctgaacacaggcatgtgcgcccctccagcccacctgcccctgtgccatcatttgggccccccagacactggaggacagcgtgagataagatctcagcatatacctggggctctaagatgctgctggtgccacacaggctctggggctgtgtttgccgcactgaggcctctgccgcctgctccggacacttgggacacgcgtttccatcctggctcactgaagcctcgatctcccaggctttctttgacggtgttccctcaaagaaagaggcccaaagccctcccccgcaaaaaaagccagaaaggaatggaggtgcctccgcagaaatccagagcatctgcaagacatcctcacagccctcccagaacaggcagacaggccagtgttgctggagtcagcccctggctcccagggttccccccaggccagcccctgagctgggagcctgctgaggcccctcccacctgagcccttctccggccccccgctagactgcatctacacaatccaaggggaccctgaaggctggctggggactcaggacccacacagcccctcaggatgacacacacagggtggtccgcgggcagtgccaggcctcaggcggcccagggcagagtaagcagctttgtggcagtgtggtgtgtcagcgaggggagccttccgtgtcccgttggctggggctggggccagggcacgcagaaggggctgtgcagccaggagggcccccctccggaattgctcctgggcacacagccctctgtgtccaggggcctcccagggtgatgtctaaagtccctggcagctgtggtcctggagagaggcccacagagaggcggaacggagggcccaccccgcagtacgacccgaagacatgtgagcaggagccaccggcaggtgggcgctgcccctgagagtgcatacggggagggtgggtccaggaagccagcctaggggtggtgtccgcgcccccatcacagaagtctcagccctttcttttctctccgtgggcgccgggcagcagcgactgcctgggggatgggcgaagggaaggcgctggccgaccccacccatggagagaacacagccacaggccgggacgatacatcaagctcgcacccacggccctcacatgtccacgaagaccatgaagcaccagcccaggcccccgaccagcagcatggtgacgtggatgccatagacgagcagctcgttcaccaggcggaagtccacgcgccggcggcccagcagcagcagcagcaccgacagcttgcgctggaagcgcagcaggacgcgaacgcccaggtactgtaggcagaagagggcggccagcgcaccccagagcgccgcagtgaacaggctgcagctaaagtagagtaggaagcggatgaagccgtacagccagcgcgtcttgatgtacacgtcgaagttgttgtacttggtgcgggccaggtgggaggcgcgcacgggcccgcaggccgcatgcaggcaggtggtgtgcgggccgtggaaggagcgcacccgccgcggaatgggcatgaccggcattgggccccggcnnnnnnnnnnnnnnnnnnnnnnnnnnnnnnnnnnnnnnnnnnnnnnnnnnnnntaggggtcatgggcgcctaggcctgggagcccgcagctgaccctggggggaggcgtcggcccggtgccctctccgcggcggcgccggcgtcccggacctcggggccggccggcggtgctaggggccgggcctgcgggtgcccctgtccctcggggctccgtgcgcagggcggccgcatggtggtggggcgcgcggttgggggcgctggcaaggcggctgagggcgtggttcacgcgtcgccggctggggtcgccctgcaggtgaaggggctctcgggcgcggccgccggaggcgtttggcctagcgtgggagccgtagcgccgtccctcgacggccaccgtaggngcggcctcacgccccctccagacaaaaccgaccgagccgcacttcccttccccctgctccgggcccgcgctgggcggcaaagactcgtcgcttccctcgtctttgaacgccacccaggcctcgctcc

SEQ ID NO: 441085 - DNA, 1107 bp, Homo Sapiens
  misc_feature (196)..(196): n is a, c, g, or t
  misc_feature (265)..(265): n is a, c, g, or t
  misc_feature (1045)..(1063): n is a, c, g, or t
gggggttttccaggttggagccccagggatgggaaaaacggccgggttcccccaaaagtttcccggaaagcagggcggccaagaggcccttaagtggggggcaaaaccccaacccccccaaagaaacccctgttggcacccagcagcattttttagagcccccaagtaatatgctggagatcttaatctccaacgncgttccttcccagtgttttggggggcccaaaatgattgccacaggggccaggtgggctggagggggcgncagatgcctgttttcagggaggggtgggcacccatgggcccgagttctcacccagggaccccttgctctgctcctcagccttgcagtcacggcagcactatggtggactgcccatggccgtgtgactttgggggcaagtgggagggcgccctgaataatgattgcaaggacaacaggcagaggctaccctagagcaggacacagggtgtggtactgacaaccctagtgtcacctcaaatccatgtccccacactctgggcatgggtgggacttgtgaccctaccctgtcaggcggaccagtggcccaggagccatgaggacagttgtgtgccactggaagagaaactttttgaaaaaccctaaatcaggtagagaaagcaaaaaatctctggccgtaaaccgtgctctctaatttatcggcagcttctgtggatgacctctgatgagcccgggctgcgtccacgccctgggcaggtaggcgggagcttccctgcgtgggcctcatttcttgctgcagagaatcttttgcactaagtcatgctgtttcctcaaagaagctttgttttttgttaacgtattactcagagtcacccaagcctcttggctgagggtgaaggtgggacgggaggcgggagggggctggtggtgccgctcgtgcggtgtcaacgctgcagggagttgtggcaccttggtgccctctgagcacctggccgcctgctgtccccggtgcctgtgaaattcgtcatgccatgacccacctgcattaaacctatttttttnnnnnnnnnnnnnnnnnnnctcgagactattctctccctcgtgccgaattcgccacccaggcc

SEQ ID NO: 441086 - DNA, 763 bp, Homo Sapiens
tcggtacccccgtgccggaagttgtggaaggggttttttctgtagttgtcgtggacgcagaacagccacctcctgagggtgacagggttgatgctgaagtccctgaccagcccgaggtcgtggtacatgtgctccaggcagctcagcatctcattgggctcccaaagccagacgtcaaaggtcggcttccgcagggcctcgatggtctctggagagagcaggtacttggggtaagtgggaacatcgcgtcgaggagtcaacttcttgtggttatccaaaaaactgtacttacaggggcagttggtcctgctgcttctggccgccagctcctccctcatcttcttaatgtcactcttgcatttctcaatctccaccacttttagtccttccaattccacgcgtttctctaggacagccaagtgatttgcaacttcagctttcagttcattgattttgaatgctcttgagaactctctgcaacctgcgccagcacgctctggattaattcttctctctcggagagttgcttgatggccacaggtctcactttgtacggagtgcgttctgaattcgcgggcatggtggggtcgatggagaccatggcgtcgtcggtggtcagcagggagatggtcgtgttccgaggcaggccggtggcgatgcagaacaggtccatgatgtcgctggagttgcagtacttgctgaagattaccttctgaatgcgtccatcgatgtccagtcaaccacccgcctcgctacctagccg

SEQ ID NO: 441087 - DNA, 1152 bp, Homo Sapiens
  misc_feature (11)..(11): n is a, c, g, or t
  misc_feature (27)..(27): n is a, c, g, or t
  misc_feature (58)..(59): n is a, c, g, or t
  misc_feature (1067)..(1067): n is a, c, g, or t
  misc_feature (1071)..(1071): n is a, c, g, or t
  misc_feature (1074)..(1074): n is a, c, g, or t
  misc_feature (1081)..(1082): n is a, c, g, or t
  misc_feature (1086)..(1086): n is a, c, g, or t
  misc_feature (1140)..(1140): n is a, c, g, or t
catgggtagtncctgtggaataagcancaggcacagttcccaaagacgtccctcagannacctggacccaaaggcacctccagtgctgaccctggtgatccgagctagtctccctctaagctggcctggaaggcactggacatgatttggtcgtggggcccagagcggaagactagaatcaagtggacgtagaagaacagtaagtacaggacgaccgggatgaccagcaaagccactgctcgggcgagcaagtgacagaacacacagacattggacaaagtctggtctccaagcaggtgccaggcatggacagctgcaacacccagcacgagcacgtacgtgaacacacccatgtacttgatgcccactgcacaggaacaagcgacccctgtcagtgttagccagaaccaccagctcagagaaaaagggctgtgcttttggcagttgaagaacttcaggtaggacaacacggccaatagattgaaaaatattaacactgattccaaaagcattagccttgactgagtgatgagagcattctcgataagcatcaacagagcagctcccatggcggcacaatgagaaaagtggagctccaacactatctggtaggccatggggaccgacaaggcccccgcgagtgctggcagcaggcgcagggaccacacaggcacgttgctactgtattctgctccaattctgttccacaaaaaattgccatcgaatcctcctaaataacctcccaaggccagcaccatgtggccaaatggcggcccactgtcatccaagaagaagatttgtttcatgtaaaaagagatgtactgcccataatatacttcgtcaaaaaccacagcccgcgggtaggtgagtcgccacagccggctcagtaaccccatcccagtcagggccacaaggctcaagattgatgtcagccgtcaccactacagggcgcttcaaaaatccccacatcttgtagaaaagcgggctcaggcagacgccccgcgtttctccgagtccacacagagccgcgcccggctcccggcaacgcctcggaaccgtccgactgngccnacngttgggnntgangccgctcagcactccgcaccacccacccgccctgctcaacgttcgatatcccgngaattccggacc

SEQ ID NO: 441088 - DNA, 3421 bp, Homo Sapiens
  misc_feature (544)..(554): n is a, c, g, or t
cgtgtctcgcgggctggggccctggggtttgaggtcgctcttggtggtctcttgctcgtcgctgcgctgggggcgcgccgcactgttcttttagcctctgcgccgctccgtcctcgccggttggtcggttttctgcccccgtgtgtgttccctgcgtcgtcctgtgcgtggtgtggtggcttgtgcccttgtcgggcgccgtttgtagaatttcttgctgttgggtacctgttggtccggcacttcatggtcatcactccactcatcgcatgttatacaggtttcccgcgctgtccacatgaattttcccccacttgattctcacgtgctttttcgcaccaatcgaggtccacctgacggtgtgtgtagtagcatctctctcgcgcgtccaccgttcgccttgcgtgatctgtacggtctcctgtttttgggctcctgtgggtcactacgcgtgcccggtgtatgtcgtgtatgtcctgtggctcccttgatgggtgacttttttgatggcgtgtccgctcccctgtttttgtgtgtgtgctgnnnnnnnnnnncccagttggttccttttttaattacatttaaaaaagacaaaggcatggagctgtatggatgacacaccttgaccactgacgaggaagatttcactcagccacgtctcagtggagtctcagaggggagggtttccacacagcacggtgccaagggccagtcttgacgctgtcatagacaatgacatgcaagccccagccctggctcgtggttcaggtggccctccaacactgagctgtcccgggacgcctgccgggctcgctgagggcagggccgggacttgctcaggttgctgggtgttcatgaaggaggatcgggtctgccagatcaaactccaccctgcagcaattagcaaggaccaggccctggtctgctgaggctccactgctggccctgggttctcggcttttcgttgtcgatgactcctacgctggcctctgaaatactccctgtgtcttagttcaggggtgaagacacggaatatctttattgtcgagaaaaaattaactttgcacaaaaggaggtgctcatcagagagcttttcaatgagacccccatgtgttccactagaggccctgctcagcccagcccgtgtcctcccagcgtggggcccaccctgctcattacgtacattgaccaagacccttcaacctcgtcccgaccccagcacgggtgttctttgccacactcttgttctagtgttttcggatcaagatgtcccagctgtctttccagcgaagggccttgagttcatgtggcgagagtgacttgtccccgtaggtgagtgggcgcagcgtgttggacacgtggcacgcggaggagtaccaggccaccaccagggcgctgaagatgctcctctggagctgggacctgcacaggtggtcgctgatgtgctgcaggaccacagggagcagaaggatttggaaggtgagtgcgggcaggtagtggtagaggaagagtgtcttctccatcaggaagaacgggaggtagttcactgcccagccaccggcacacagcgccccagccagcacccagcgcagccaggcatcctgagggaggtcatggacatttcttcgccgtcggagcaggtaccacaaggacagcagggcgtagatggccagagcgaggctgcccgaaacccagatcactatgtttccaagtaggtggatctgagcgctggtcctggggtgcagccagtaggcaatattggtgtccagggtgacccactccagtgggctggagctgtacttgtgttccgagtcatcacttctcagcgccagcatcctccactgcagctccgagaatctcgccatgaagctgaggttcctgctgacgtccacctgcgcaggtgagtgcagctcccgttcccgctccctctgctcctggctcgcgccgtatcggtgctcctccacgttccacaccgtgctcccgtggtagccccgggacagcttctccccgacgatctccagttgccgatacccccagtcagggaggtgagccccgctcagctttaagacagcggaagtgttcacgtgcacaaagcggacctctgagaggatggtcttccagacgtctgtgtcagatcctctgttcacaatttccagtctccagaggttctgggcgggcatggagatgttatagtcaatgtagcaggagacctcctgtgaatgggggctcaggggggctgcaacatcatgcgtgttcagggagcgggtggtcatgccgtggaccagctgcaccatgtccccgtgcctcacaggtctcggagggctgctcaccaccagctggtgcctcctgggatcctttacaatccaccagttattgacgtctttgaaggggtaacaggtcacctgttgctgggtgggagctgcttcggccgttcttcatatcttacatcatggggtaggtgtcctggtgggaatgaagccagcagggcacagttttcccaaagacgttcctcagagtgacctgggacccaaagggccacttccagtggctgaccctgggtgatccgagctagtcctccctctaagctggcctggaaggcactggacatgatttggtcgtggggcccagagcggaagactagaatcaagtggacgtagaagaacagtaagtacaggacgaccgggatgaccagcaaagccactgttcgggcgagcaagtgacagaacacacagaccccctgtgacatccgcatctgccccatacaggccggcctcatgcagcactggacatcagcacctacattggacaaagtctggtctccaagcaggtgccaggcatggacagctgcaacacccagcacgagcacgtacgtgaacacacccatgtacttgatgcccactgcacaggaacaagcgacccctgtcagtgttagccagaaccaccagctcagagaaaaagggctgtgcttttggcagttgaagaacttcaggtaggacaacacggccaatagattgaaaaatattaacactgattccaaaagcattagccttgactgagtgatgagagcattctcgataagcatcaacagagcagctcccatggcggcacaatgagaaaagtggagctccaacactatctggtaggccatggggaccgacaaggcccccgcgagtgctggcagcaggcgcagggaccacacaggcacgttgctactgtattctgctccaattctgttccacaaaaaattgccatcgaatcctcctaaataacccgcgtttctccgagtccacacagagccgcgcccggctcccggcaacgcctcggaaccgtccgactgggccgacggttgggggtgaggccgctcggcactccgcaccacccaccgccctgctcaacgttcgattcaccgagcccgcccgct

SEQ ID NO: 441089 - DNA, 313 bp, Homo Sapiens
tcggtaccctcgctcgcaaaagtaatgccttttttcatgagtgtttttcatcctcatacgttttcccttgctaccttaaaattgacacgtgtttcctctttgaaacagagaatgctctcatcacttagtcaaggctaatgcttttggaatcagtgttaatatttttcaatctattggccgtgttgtcctacctgaagttcttcaactgccaaaagcacaggtatggaaaatggagtgtcttcctagttaacgagaacagagattctgggtggtttgttgatctgagatggtccagtaccttaataatgttttg

SEQ ID NO: 441090 - DNA, 1177 bp, Homo Sapiens
  misc_feature (1107)..(1107): n is a, c, g, or t
  misc_feature (1110)..(1110): n is a, c, g, or t
  misc_feature (1113)..(1113): n is a, c, g, or t
  misc_feature (1123)..(1123): n is a, c, g, or t
  misc_feature (1130)..(1130): n is a, c, g, or t
  misc_feature (1140)..(1141): n is a, c, g, or t
  misc_feature (1145)..(1145): n is a, c, g, or t
  misc_feature (1151)..(1151): n is a, c, g, or t
  misc_feature (1154)..(1154): n is a, c, g, or t
  misc_feature (1161)..(1161): n is a, c, g, or t
  misc_feature (1167)..(1167): n is a, c, g, or t
  misc_feature (1169)..(1170): n is a, c, g, or t
  misc_feature (1172)..(1172): n is a, c, g, or t
  misc_feature (1176)..(1176): n is a, c, g, or t
gatggtaccgggtccgggaatccctgcgacatttattaaggactctctgctccagcctctcactctcactctcctccgctcaaactcagctcacttgagagtctcctcccgccagctgtggaaagaactttgcgtctctccagcaatgcatctccttgcgattctgttttgtgctctctggtctgcagtgttggccgagaactcggatgattatgatctcatgtatgtgaatttggacaacgaaatagacaatggactccatcccactgaggaccccacgccgtgcgactgcggtcaggagcactcggaatgggacaagctcttcatcatgctggagaactcgcagatgagagagcgcatgctgctgcaagccacggacgacgtcctgcggggcgagctgcagaggctgcgggaggagctgggccggctcgcggaaagcctggcgaggccgtgcgcgccgggggctcccgcagaggccaggctgaccagtgctctggacgagctgctgcaggcgacccgcgacgcgggccgcaggctggcgcgtatggagggcgcggaggcgcagcgcccagaggaggcggggcgcgccctggccgcggtgctagaggagctgcggcagacgcgagccgacctgcacgcggtgcagggctgggctgcccggagctggctgccggcaggttgtgaaacagctattttattcccaatgcgttccaagaagattttggaagcgtgcatccagtgagaccaatgaggcttgagtcttttagtgcctgcatttgggtcaaagccacagatgtattaaacaaaaccatcctgttttcctatggcacaaagaggaatccatatgaaatccagctgtatctcagctaccaatccaatagtgtttgtggtggggtggagacggggaaccaactggttgctgaagccatggtttccctgggaaggtggacccacctgtgcggcacctggaattcagaggaagggctcacattcttgtgggtaaatggtgaactggcggctaccactgttgagatggccacaggtcacattgttcctgagggaggaatcctgcagattggccaagaaaagaatggctgctgtgtgggnggnggntttgatgaanattagcntctctggggnntccnagcttnatntctgggntagttntnntnacang

SEQ ID NO: 441091 - DNA, 771 bp, Homo Sapiens
  misc_feature (434)..(434): n is a, c, g, or t
  misc_feature (437)..(437): n is a, c, g, or t
  misc_feature (447)..(447): n is a, c, g, or t
  misc_feature (451)..(451): n is a, c, g, or t
  misc_feature (455)..(455): n is a, c, g, or t
  misc_feature (459)..(459): n is a, c, g, or t
  misc_feature (463)..(463): n is a, c, g, or t
  misc_feature (467)..(467): n is a, c, g, or t
  misc_feature (479)..(513): n is a, c, g, or t
  misc_feature (531)..(531): n is a, c, g, or t
  misc_feature (537)..(537): n is a, c, g, or t
  misc_feature (543)..(543): n is a, c, g, or t
  misc_feature (558)..(558): n is a, c, g, or t
  misc_feature (578)..(578): n is a, c, g, or t
  misc_feature (627)..(628): n is a, c, g, or t
  misc_feature (631)..(632): n is a, c, g, or t
  misc_feature (641)..(641): n is a, c, g, or t
  misc_feature (654)..(655): n is a, c, g, or t
  misc_feature (667)..(667): n is a, c, g, or t
  misc_feature (675)..(675): n is a, c, g, or t
  misc_feature (693)..(695): n is a, c, g, or t
  misc_feature (699)..(699): n is a, c, g, or t
  misc_feature (703)..(703): n is a, c, g, or t
  misc_feature (719)..(719): n is a, c, g, or t
  misc_feature (730)..(730): n is a, c, g, or t
  misc_feature (744)..(744): n is a, c, g, or t
acgttttgtatgtttttttatttgctccaggtggggttttgactgtcactttcccacactctggattagttctgatcccaccacaaggagccctcgaattggctaaagtgagaaactgggcctgaagactccgtaccctctgccatcttgccgagggagtctccttttagaaaacaatcaaagggttattgcatgagtctggatgaatcccactctcagctgtccacgggcccgaccacctcatctagccccctttttggcagggagaacctggctcccaagttctcctccttcacttcgttacaaaccaaggggaagagcccaccgtgagaacgcgccatctgcaagctgtctccctttctccatccttggtgaaaccctttgcgcagaaggcaacgtggaagctgatgtttttactcatctcgctgtttganagnacgattatgnagtngggntgtntagnagtnaaaagtaccttnnnnnnnnnnnnnnnnnnnnnnnnnnnnnnnnnnnaaaatgtaaaaaagaggnaatagnggcttntagaaaatgattttntttaaggtttcctgtgtggnaggcacctgaaatactgtagaaaaatgttttgtgtggtgtttttgtttnnttnntgttaactnggttcttttttgnntgatcaggaatngtgctggnacgatatctcagtggctnnnaggnaatnctgccgcctgattttntctttctttcngtcccctgcttgtnctcctatctgatcaggctagagacaac

SEQ ID NO: 441092 - DNA, 1158 bp, Homo Sapiens
  misc_feature (3)..(3): n is a, c, g, or t
  misc_feature (96)..(97): n is a, c, g, or t
  misc_feature (129)..(129): n is a, c, g, or t
  misc_feature (143)..(249): n is a, c, g, or t
  misc_feature (264)..(264): n is a, c, g, or t
  misc_feature (282)..(282): n is a, c, g, or t
  misc_feature (294)..(382): n is a, c, g, or t
  misc_feature (418)..(418): n is a, c, g, or t
  misc_feature (433)..(433): n is a, c, g, or t
  misc_feature (549)..(549): n is a, c, g, or t
  misc_feature (1065)..(1065): n is a, c, g, or t
  misc_feature (1070)..(1070): n is a, c, g, or t
  misc_feature (1085)..(1085): n is a, c, g, or t
  misc_feature (1088)..(1088): n is a, c, g, or t
  misc_feature (1091)..(1091): n is a, c, g, or t
  misc_feature (1102)..(1103): n is a, c, g, or t
  misc_feature (1115)..(1116): n is a, c, g, or t
  misc_feature (1121)..(1121): n is a, c, g, or t
  misc_feature (1124)..(1124): n is a, c, g, or t
  misc_feature (1128)..(1128): n is a, c, g, or t
  misc_feature (1130)..(1131): n is a, c, g, or t
  misc_feature (1139)..(1140): n is a, c, g, or t
  misc_feature (1142)..(1142): n is a, c, g, or t
  misc_feature (1147)..(1147): n is a, c, g, or t
tanatttctgcataagacaagcacagttgagatgctggcttctggcttcatacctgtgctaaagcaaggcttcttttttccttatgttactttttnnagacaaggtctcactctgtgacccaggatggngtgtggccacacannnnnnnnnnnnnnnnnnnnnnnnnnnnnnnnnnnnnnnnnnnnnnnnnnnnnnnnnnnnnnnnnnnnnnnnnnnnnnnnnnnnnnnnnnnnnnnnnnnnnnnnnnntttcctccggtaganatggggtctccccatgtngtccagactggnnnnnnnnnnnnnnnnnnnnnnnnnnnnnnnnnnnnnnnnnnnnnnnnnnnnnnnnnnnnnnnnnnnnnnnnnnnnnnnnnnnnnnnnnttttcaaaacatacataaaaatggaaatgaataggnccagccagtggctgngatgcagccaaaacgccctgtctggaaagcatgcgtctaggtaattttcctccgctttgccaggcggtctgaggtctgggctggaggcagcgggagggacagggtgcccagtttgngatctttttcactgccggcggccacagacaccctttcttttggagatcttcagcctcatggctttggctatctccatcatccttttctcactgagcttcaagtccctctgtaacactgtcaggtcaatttggaagtcatgtatgtgcaaggcaagtgtgatcacatatgcagtaatcttcgccttcatagaatccgaaattaagttccgtaatctgccattgttgtaggtcaagcaggtaaagtgcttcagcagtttggtgttgatgatgtggggaactccaggtcccagagcacttttccgcttaactaccctatgagctcgaaatttgatgagggtatccagaaaccatatgcatcgggcctggcggtctcggctctccacatctgatggcaaagacttcaacgcttctatgacaaaggtgcaatggctgttctcctcaatcatcttcagtatttcttctgacgtgacgttcctgaaagcttcagatgggctctgaagagcttcatactccgcnggggnaagaagatcttcaanttntanacgtcttaggnntggctgctcatnnaacanggnggangnngaggggtnntntgcantcatttgggta

SEQ ID NO: 441093 - DNA, 1867 bp, Homo Sapiens
  misc_feature (171)..(271): n is a, c, g, or t
  misc_feature (273)..(282): n is a, c, g, or t
  misc_feature (324)..(412): n is a, c, g, or t
tttttgaagtccaacctggccatcgctttatatttctgcataagacaagcacagttgagatgctggcttctggcttcatacctgtgctaaagcaaggcttcttttttccttatgttacttttttgagacaaggtctcactctgtgacccaggatggagtgtggccacacannnnnnnnnnnnnnnnnnnnnnnnnnnnnnnnnnnnnnnnnnnnnnnnnnnnnnnnnnnnnnnnnnnnnnnnnnnnnnnnnnnnnnnnnnnnnnnnnnnnncnnnnnnnnnncctccggtagagatggggtctccctatgttgtccagactggnnnnnnnnnnnnnnnnnnnnnnnnnnnnnnnnnnnnnnnnnnnnnnnnnnnnnnnnnnnnnnnnnnnnnnnnnnnnnnnnnnnnnnnnnttttcaaaacatacataaaaatggaaatgaataggaccagccagtggctgtgatgcagcccaaaacgccctgtctggaaagcatgcgtctaggtaatcttccttccgctttgccaggcggtctgaggtctgggctggaggcaagcgggagggacagggtgcccagtttgtgatcttcttcactgcccggcggccacaagacacctttcttttggagatcttcagcctcatggctttggctatctccatcatccttttctcactgagcttcaagtccctctgtaacactgtcaggtcaatttggaagtcatgtatgtgcaaggcaagtatgatcacatatgcagtaatcttcgccttcatagaatccgaaattaagttccgtaatctgccattgttgtaggtcaagcaggtaaagtgcttcagcagtttggtgttgatgatgtggggaactccaggtcccagagcacttttccgcttaactaccctatgagctcgaaatttgatgagggtatccagaaaccatatgcatcgggcctggcggtctcggctctccacatctgatggcaaagacttcaacgcttctatgacaaaggtgcaatggctgttctcctcaatcatcttcagtatttcttctgacgtgacgttcctgaaagcttcagatgggctctgaagagcttcatactccgcaggggaaagaagatcttcaaatttatacacgtcttcaggcttggctgcatcatcatagcagggaggaaggtagagggagtcatcttgcaagtcattgtggatagcatcgctgaccagagcagtcacacccttcgtatcaatgatagtctctgcagctttagccactgcacgattcaaagattcattgccaactctgttcattctcctggtgttcagagctcgcttctgtttggtggtaccaaaggcttcaatacaagaatccatcttttctctgtaagttttggtctgactctctagcgccagttcactctcaactgatacatctgaaaatagtggctgcatgttgaacaattcagcatcatatacttccatttggccagaggtcttgttcaaaattcccacaaagtgcctgcacaaagtgttgcatttgagggctccagtcccaaaattgtttcccacataggagagcctatctgtttcagctgccaggatccgttgattcctcttcctggggttggtggaatctttgttctcatacaaggtaaagcgcatgttgcctggactctgtagcttcccgttggagaactggaccagtacagctctctggctcccgtcgggcgccccacaatactgccacctcgcactcggcaacacctccgccgccatctcgcctgtctgtccgccaagcacaggagttaagacagcagcagccacaagcgcacttttaaacacgcgggagcccaggccgcgctgcgggccggaaaaggcg

SEQ ID NO: 441094 - DNA, 1023 bp, Homo Sapiens
  misc_feature (881)..(881): n is a, c, g, or t
  misc_feature (937)..(937): n is a, c, g, or t
  misc_feature (963)..(963): n is a, c, g, or t
  misc_feature (971)..(971): n is a, c, g, or t
  misc_feature (986)..(986): n is a, c, g, or t
  misc_feature (999)..(999): n is a, c, g, or t
  misc_feature (1016)..(1017): n is a, c, g, or t
aacttaccttgctatactaaccgcagtttttacgcgcggctggtaccgggtccggattcccgggatcctcgggccgtcgggagcggagcctcctcgggaccaggacttcagggccacaggtgctgccaagatgctccagggcacctgctccgtgctcctgctctggggaatcctgggggccatccaggcccagcagcaggaggtcatctcgccggacactaccgagagaaacaacaactgcccagagaagaccgactgccccatccacgtgtacttcgtgctggacacctcggagagcgtcaccatgcagtcccccacggacatcctgctcttccacatgaagcagttcgtgccgcagttcatcagccagctgcagaacgagttctacctggaccaggtggcgctgagctggcgctacggcggcctgcacttctctgaccaggtggaggtgttcagcccaccgggcagcgaccgggcctccttcatcaagaacctgcagggcatcagctccttccgccgcggcaccttcaccgactgcgcgctggccaacatgacggagcagatccggcaggaccgcagcaagggcaccgtccacttcgccgtggtcatcaccgacggccacgtcaccggcagcccctgcgggggcatcaagctgcaggccgagcgggcccgcgaggagggcatccggctcttcgccgtggcccccaaccagaacctgaaggagcagggcctgcgggacatcgccagcacgccgcacgagctctaccgcaacgactacgccaccatgctgcccgactccaccgagatcgaccaggacaccatcaaccgcatcatcaaggtcatgaaacacgaagcctacggagagtgctacaaggtgagcngcctggaaatccctgggccctctggcccaaagggctaccgtggacagaagggtgcnaagggaacatgggtgagcagggagancttgccanaaggaagacaggganaccgggcatcgangcccattggattccagnnccaagg

SEQ ID NO: 441095 - DNA, 1691 bp, Homo Sapiens
cccagctccgtgctgggctctgaggcgggctctgtgctggagcccaggccctgggacaggatctgctggatggctctgcgcaggttggggtgcagccggccctgcgtctggtagaagacctccagcgcgaaggacttgagggcaccggtgcagaggtcctcgtacagcgggatggtgtacatgcgtgacatctggctctccaggaagcgccgcaccctgtggaggtcaaggaatagtagtcgttgcggaccacaatctgcagccagcggatgcggatctcagcgttcatcgagtccagcagggaggagtagcacttggacaggctcatcaccacctcctgcggcagcggggacccatccaggagccggtcccaggaagagtgctgtctggaaggtcctccacttggagatgtcaatggcgctggccgaggcagctgcctggtccagaggttctgcggtccacagctggaaaagggcctccacgggccgggtcaggctggatccctgagacaggtccggctcagccagcggcgggcctgtggcattgagccagcgctcgaattccagccctgcccggcagtccacgctctgctccttcagctccgggaagaagctcaggaaggagtccagcaggtcctgggccaccacgctggtgaacttgtacttctcccacataggctcggagaaagtcatcaaagcgctgtgggtctccgcagagctgggacaggtagtacacgaagcagtagcccttctcgtaggtgaacaggttcatcaggtggctgggattcactcctggctccagcttgacctgcagtttgctgaccgggctgtcttctcccagaagcttcatctgccggtgcagggcgtccaggcggaaggcagtctccaggcaggtgaaggcagcaccgtaggtctcggtggtgatacggcgctgggcataggtggccaggccctcgctcagccacatctcttcccacgtggcgttggtgacagcgttgccgaaccaactgtgggccacctcgtggatgacatcgatgaccaggaactcatcgctctccaggatggaggagatgatgaaggtgaggcaggggttctccatggccacgatggggaaggagggtggcaggaagacaatgtcgtacctgccccacatgtagggcccatacagccgctcagctgcactcagccactgctccactgcgcccgacagcttgctggtggccgtgggcaggaggcatggctcggcccacacgcggctcctgggcccgatgtctgccggcttgaggtctccggccaccagggccacgaggtaggcgggcacggggtgctccatgtggaagtggaagacgccttcttcctccatgtatgcactccgggtggcactcatcagcacctgcacccccgatggcgccttgacgacggcagagtaggtgcacttcacggcaggtgtgtcgaagcacgggaagaaggagcggttgcacacggagtggccctgggtgaagacgaagggcttggcgcagccataggtcagctctgggtccagccaccagatggcgggggcgtcggtcgaggtgtaccgcaggatgacctggaagggctggtgcgcctgcagctcgggcggcagcgtgacggtgagcgaggagccgtagtcggtgaacgggtccagccctgaaggccagcggacagcaggca

SEQ ID NO: 441096 - DNA, 749 bp, Homo Sapiens
  misc_feature (11)..(11): n is a, c, g, or t
  misc_feature (14)..(14): n is a, c, g, or t
  misc_feature (28)..(28): n is a, c, g, or t
  misc_feature (42)..(42): n is a, c, g, or t
  misc_feature (57)..(57): n is a, c, g, or t
  misc_feature (59)..(59): n is a, c, g, or t
  misc_feature (62)..(65): n is a, c, g, or t
  misc_feature (69)..(69): n is a, c, g, or t
  misc_feature (76)..(76): n is a, c, g, or t
  misc_feature (78)..(79): n is a, c, g, or t
  misc_feature (83)..(84): n is a, c, g, or t
  misc_feature (87)..(87): n is a, c, g, or t
  misc_feature (91)..(91): n is a, c, g, or t
  misc_feature (101)..(101): n is a, c, g, or t
  misc_feature (113)..(113): n is a, c, g, or t
  misc_feature (119)..(119): n is a, c, g, or t
  misc_feature (123)..(123): n is a, c, g, or t
  misc_feature (125)..(125): n is a, c, g, or t
  misc_feature (130)..(130): n is a, c, g, or t
  misc_feature (136)..(136): n is a, c, g, or t
  misc_feature (146)..(147): n is a, c, g, or t
  misc_feature (232)..(242): n is a, c, g, or t
tttaaacattnttntcatatgagaacanagtaaaggcaatcnatgacagactaattntnccnnnncttnactcaangnnaatnngcntccnacttaatcantgtgcaatattnaatgcnaaananttgtnaaaggngctacagagnnagcttgctctaacacagaaatactatatactttctgaattctccagcagtcttccagtcacaatgaagtagcataaggtcacagnnnnnnnnnnnaagaaaatgtagccatgcaatatgcttctaaaagaagaaagctcaacatcaaaaataacacttcagtgcagttgtaccaaaaacagttgtaaagaaaaatgtactggcaagagctgtggttttaagatgatgcttctcgtctgctcccagagaatctattatgaagttccatggtacaattccaattttctaagtgaccctgtttgcgggcgtatgctgctgctttgggtgctgttaacatggcaaaggggtgcaaggggaggcggggagatgaaactcgggggaccttggtggtaccagaatcggcagaagaatcagccccataaattttaaagacttcctcaatcgggatactgttcattaagattccagcataagatgataaaatcatagcttctcgttctctacgatttggatatatgggtctgccatggagtggtattttcagttcctcccactccagccaagttaagtcttctgagggatccagccattgcaaagcaacac

SEQ ID NO: 441097 - DNA, 995 bp, Homo Sapiens
aagaaaatgtagccatgcaatatgcttctaaaagaagaaagctcaacatccaaaataacacttcagtgcagttgtaccaaaaacagttgtaaagaaaaatgtactggcaagagctgtggttttaagatgatgcttctcgtctgctcccagagaatctattatgaagttccatggtacaattccgattttctaagtgactttgtgctttggctgtgtgtctgaaaacctttgtgatgatttccattctgtggcatttgcttcctttgcagagatgctggtggcatttttatttgttgttacctttcttgacttgacaccctgtttgcgggcgtatgctgctgctttgggtgctgttaacatggcaaaggggtgcaaggagaggcggagagatgaaactcggggaaccttgatggtaccagaatcggcagaagaatcagccccataaattttaaagacttcctcaatcgggatactgttcattaagattccagcataagatgataaaatcatagcttctcgttctctacgatttggatatatgggtctgccatggagtggtattttcagttcctcccactccagccaagttaagtcttctgagggatccagccattgcaaagcaacactgatggccaagtcatagtgtgccatatcatctagaaaggtgagttgccgtcttccttttgggtcaaattcattttcccgaagtctgatgccaatataatctcccaagagctttttcatttccttctttatgagccttctttccatgttaaaggcttagccagctgagcaggtatctgcagctaacactacacttagacccagcttctctgagtctagaggcaaccggagaccggttccagtgcttttgttctttctctgcttctggaggcatgctgaagcatccgcgcatctcagactggtgctcacagacatcaggatcccagaattccggaccggtaccacctgcttttggggggccggccgcgcgg

SEQ ID NO: 441098 - DNA, 1496 bp, Homo Sapiens
  misc_feature (1145)..(1145): n is a, c, g, or t
tccccctgggttgggccagaaatttcgaccttcacttgggtgaggaggagtgagatcggtcagcaacttttaccgcccgctctgcttctcccttgcggagacttggggctccggcagagccctggacccgtgatccttgaggttttcaggggtgcattcttggttgattcccttggcatgggtgttcggcccttagcaactgcagccctcatttggctctgtcaccctgggctgccaggacacaagtctttccatgcttttcccagtgcttgacttggcactccctgcagcaataccactcattctggcatcgtgagcagcgcttagaagcctctgcactgcagtaagcacagcggggccgctctggagccactgcctctagcacatccagcctgtaggtctcagcccaccttcgcgcctgcagccgcaggtcctgctctgaggggctgaacacatgctggagctggtgcttggcaattgcctgccacttgcctctgttttctcgctccagccgctcccagatttctgggatctgttccaacaccaggtccttcttaggaggctgggtttcagttagggtcagatgggccaggaaactctgcaagtgggccaggttgggcagctggtccagcagtgtgtctgtgaggaaggcccgaagcttgagtagccgtcccttggcaaaacttgtgaggcagtagcgcgcctgagcctcagggcttagcagcaggttgtacagggcgatccacacttgcccgtccaacttgctcagcttttgctgctctgagggggccacagtatgccaacggctgccctcgaactgctgcagcttgcctccttcccgccggctccagggactatgctccagcagttccaccaggaggcagggcaggttgtgtgtgctaagcatacggctcaaggtgctgagagagaggctgtccacacagtctgtgatgtagcgtagtactgagagggccttcagtgcaatctcaaattccatcagctctgcctgcttctgcagctcctgcatggggttgctgtcctgggatccctcccctcaggggggccaccacagccactctgggccaccagcagggtcagtttgcggtggcaatagtctaccaagtccaagacagtgtcttctgctnactcacacacctccttgtggaagaacactgtctccaagaggttgatgatggaggcctcgtggtgcaccaccatgtagatggggaaggtgttctggggcttgaagtcctccaccctgcagaacacagggaacaccttctgcttccacatctccactgcgatcagctcctccaccagtgttgggaccttcggagcccatctcgcgtagcgggaagtgcgcagaccccgcaccagcacttcagcttccccgggcagcagcagttccaggtctcccatatcgaggccggggtccggcggatcctgggcagcagccggggtggggatgctgtcacattcggggacgacggatcccg

SEQ ID NO: 441099 - DNA, 1136 bp, Homo Sapiens
tccaaccccaggtcctttttaggaggctgggtttcattaggtccagaggggccaggaaatctgcaaagtggccaggttggccagctgtccaccagggttctggaggaagcccgaagcttgagtacccgtccctgggcaaaccttggaggcagtagcgcgcctgagcctcagggcttagcagcaggttgtacagggcgatccacacttgcccgtccaacttgctcagcttttgctgctctgagggggccacagtatgccaacggctgccctcgaactgctgcagcttgcctccttcccgccggctccagggactatgctccagcagttccaccaggaggcagggcaggttgtgtgtgctaagcatacggctcaaggtgctgagagagaggctgtccacacagtctgtgatgtagcgtagtactgagagggccttcagtgcaatctcaaattccatcagctctgcctgcttctgcagctcctgcatggggttgctgtcctgggatccctccccctcaggggggccaccacagccactctgggccaccagcagggtcagtttgcggtggcaatagtctaccaagtccaagacagtgtcttctgctgactcacacacctccttgtggaagaacactgtctccaagaggttgatgatggaggcctcgtggtgcaccaccatgtagatggggaaggtgttctggggcttgaagtcctccaccctgcagaacacagggaacaccttctgcttccacatctccactgcgatcagctcctccaccagtgttgggaccttcccatgggtgaccagcagctcctgaatgggctcgccctggctgactgtggcatcgaggatggcttgcatgttcagcttctccaggttctcatgctgctggttccacccttcggagcccatctcgcgtagcgggaagctgcgcagaccccgcaccagcacttcagcttccccgggcagcagcagttccaggtctcccatatcgaggccggggtccggcggatcctgggcagcagccggggtggggatgctgtcacattcggggacgacggaccccgacggtgccaaagtctgggacaggacagttgcgggacggttggggagcgtcagtctcgctatcccgggaatc

SEQ ID NO: 441100 - DNA, 1563 bp, Homo Sapiens
gacagagaacaaatcggtataatatgaagctgcctgcttcaagaaatccaaatccagttccatgaaggaagaaatgtctgtttttgccgccctcatcgtcacggaaagagtagggtgcgctctctgcctagcagaaggagtcacaggctcagagcaaactcattcaaaggatgttatttcatcaatccacaggggaaggagtgactggctgagcaacgtgtcgagagagcccagcctccagtgtccctcacttgaccctccgcaggtggcgaaagctctgcacggtcctctccatagcatcatccatggtcactagtggctggtagcccatggcctttttggctctctcgcagctgtagtagtggaatgtgccagccagtgcgacccgcatgggtgtgaaggtgggctgcagctggatgacaggactgatcaccatcaccagcagggatagcaggagggccaggtagtaggccacccagtaggggatgtggtacttgggggcctcataattgaggcctgtcaggatgcgagacaggaatgtccagaaagggatgggctcatcattggtgatgtgaaatgccttcccacccagtgtcgagtctcgggagagctgctctgccgccaggatgtgtccatggaccacgttctccacaaaggtgaagtccaccaagttcttcccatttccaatcacgaacttcatcttgccgttcctggctgcctcgatgaggatgggtaccaactgcgggtcccttgggccgaaaatgccatgagggcggatggctgtggttaagaaattcttctcaggatcgttggcgcccagaactgccctctcctgtaagatcttagtctctgtgtagtagtcaatgggtttcatggcatagggaaggtcttcagttccattcttgatatcgacgccctcaaagatgacactggcactgctggttaaaatgagtttctgaaccccagcctctttgcaagtttcaatgacattcttggtgccaatgtaattcactctataaaagagctccttgttgttactggatggtgggggtgacgcacagtggaaaactgtgtttacacctttcagagctgggtacagatcctgtcggctgcagaggtcacccagaaagaaccgcacctggggattatcaaacccttgctggatatcaaatacattgacagcatatcctcttgccagcaactgctccaccatgtgctgccccaggaatccagagcccccgatcactgtgcatctcttggcctgattctggttaaccttttctatgtcagcattcactttgggagtgtcctctgtcaaatgagtccgtgcgacttggtctctcattggctcgctaactgctggttccatttcgaagcaaaatatggtcccgtttgtaatcaacttttcttttccgtccgtaggcgcccccctgtctggcctcagctcgcaagcaggctgcacccactgaactccaggcccggaccgccaccctttactcccctcccgcgtgagccgagaatcagccgagcttcctccaccaagaggattggcccagctcggcg

SEQ ID NO: 441101 - DNA, 1605 bp, Homo Sapiens
  misc_feature (5)..(5): n is a, c, g, or t
  misc_feature (13)..(13): n is a, c, g, or t
  misc_feature (28)..(28): n is a, c, g, or t
  misc_feature (30)..(30): n is a, c, g, or t
  misc_feature (34)..(34): n is a, c, g, or t
  misc_feature (46)..(47): n is a, c, g, or t
  misc_feature (67)..(67): n is a, c, g, or t
  misc_feature (84)..(85): n is a, c, g, or t
  misc_feature (88)..(88): n is a, c, g, or t
  misc_feature (103)..(103): n is a, c, g, or t
  misc_feature (106)..(106): n is a, c, g, or t
  misc_feature (109)..(109): n is a, c, g, or t
  misc_feature (118)..(118): n is a, c, g, or t
  misc_feature (121)..(121): n is a, c, g, or t
  misc_feature (124)..(124): n is a, c, g, or t
  misc_feature (126)..(127): n is a, c, g, or t
  misc_feature (174)..(174): n is a, c, g, or t
  misc_feature (221)..(223): n is a, c, g, or t
  misc_feature (227)..(227): n is a, c, g, or t
  misc_feature (246)..(246): n is a, c, g, or t
  misc_feature (257)..(258): n is a, c, g, or t
  misc_feature (284)..(284): n is a, c, g, or t
  misc_feature (289)..(289): n is a, c, g, or t
  misc_feature (321)..(321): n is a, c, g, or t
  misc_feature (323)..(323): n is a, c, g, or t
  misc_feature (326)..(326): n is a, c, g, or t
  misc_feature (333)..(333): n is a, c, g, or t
  misc_feature (349)..(349): n is a, c, g, or t
  misc_feature (352)..(352): n is a, c, g, or t
  misc_feature (363)..(363): n is a, c, g, or t
  misc_feature (367)..(367): n is a, c, g, or t
  misc_feature (373)..(374): n is a, c, g, or t
  misc_feature (409)..(409): n is a, c, g, or t
  misc_feature (435)..(435): n is a, c, g, or t
  misc_feature (441)..(441): n is a, c, g, or t
  misc_feature (444)..(444): n is a, c, g, or t
  misc_feature (455)..(455): n is a, c, g, or t
  misc_feature (470)..(470): n is a, c, g, or t
  misc_feature (478)..(478): n is a, c, g, or t
  misc_feature (487)..(487): n is a, c, g, or t
  misc_feature (493)..(493): n is a, c, g, or t
  misc_feature (496)..(496): n is a, c, g, or t
  misc_feature (502)..(502): n is a, c, g, or t
  misc_feature (505)..(506): n is a, c, g, or t
  misc_feature (548)..(548): n is a, c, g, or t
  misc_feature (565)..(565): n is a, c, g, or t
  misc_feature (574)..(574): n is a, c, g, or t
atganagcaagtnactctcactgcaaananaggntatgcaaaaaannagcaaacacaggcagaattntgccctgctggatcctnntanctgttttggttcccnctncangttcctggnggnttntnnggaggaacagaggtggggaaacatgggagatgggcatagctttccanaagcttccagcatgggatacctagtggctcatccctgtttgcttctnnntgtntagatacccacatgctatntgttccaatgnnccagatccctctagaccacgcatagncccancctgagatatgttggaagaagcttagtgaaananctnccaaagntcgagttccagcttgnagnttttggatatnaccncgcttnnaggcacagggaccaacctcccatgatgttcatgcnaggtagagtggggtataaggttcggnagttgntanttttggttagntttaccgtcccgttntcccaganaaccttgtntggagntangatttntanntggagccattattgtgctcagcactcacacggtgggctactntggggccacaggaagtncagggaganaataacccacgtgtttggggccctgagcatgggtggggccaggcagggacctacaagggggactttcccagatggaaaccagggctcccacccagtaggcgcagcagcacagatgggacgggaagaccctggacagaggccaaaggccccaggccccagcctccccatcagcctgcgccagcccaggcttcggactacttggagactgtaggccaccagtctggcacagatgcggctaaggccacttgggcaccgctcagaggctctgatgtgcagaggacccttgatcttctctgaccacagcagggtccagccccacgttgccctggccagccctgaacttgcccacagtctgtcctgaggcagtcagcaccgtggcaccaggggtgatgccactggtgggaagggggtccaagaaccggacagggaagaggcgcttgcggatgacgcccatgtggtgggtgcgggccgtcagctcctggccaatgtagcagcctttggtgaagctcacgccgttcatgaaggccaggttggactccaggggcagggccaccccaggaggcaagtctcggaccccctcaggaacgccttgcaggtatcggtgctggtgataatcccacaagtccccgagccggcccccgggcaccagggctgggccttcatcctgggtgaggagccgccaccccatgcgtgctgttcgcgggtcgcggatgaggatggcggcagcccctgccctctcctgcagcgatgcagccccgcaggcctcaggggaactgggcaacaccgcccacactcgcagctccgggtgcggctccaccgtgaccttccgccggatcctgtatagcgcgaggtgcttctgcagcgcgccctgcaccgagctgtcacactccagaaggaagccagacacctccgagtgttcctggagcccgtacaagatgacgtcatagagcgtccggccctgcacgttcaggaagtgggcgtagcccgcgcgcgcagcaggcggggcccccgcggccgcaggactcggaagc

SEQ ID NO: 441102 - DNA, 896 bp, Homo Sapiens
  misc_feature (46)..(78): n is a, c, g, or t
gggatgtcgtcttggggaccgggattatcgcggtggcggcgcatcnnnnnnnnnnnnnnnnnnnnnnnnnnnnnnnnnatcaggccaaatcggccgaagctcgaattcgtcgagagcgggccgcgctcgtggctcgagctccgcgcactccctccgcggccgctgagccgagcggacgcccccgggggccgcgtcgcagccctccgtgctcccccctatcatgcccggtgcccaggctggggccgcccaagcagccaggacaccatgcccgaggacggcgctggcgacggcggggaggtgcccgcgctcatcccggacggcgagccgctgcgggaagagcagcggcccctgaaacagtccctgggaagctccctgtgccgcgagtcgcactggaagtgcctgctcctcacgctgctcatccacgcctgcggggccgtggtggcctggtgtcgcctggccacagtgccgcggctggtcctggggcccgaggccgccttggcccggggagccgggggcccgccaccgacctacccggccagcccctgctccgatggctacctgtacatcccgctggccttcgtctccctcctctacctcctctacctggctgagtgctggcactgtcacgtgcggtcctgccaggcgccacgcaccgacgcccacacggtgctggcgctgatccgccggctgcagcaggcgccgccgtgcgtctggtggaaggccaccagctatcactacgtgcggcgcacacgccagatcacgcgctaccgcaacggcgacgcctacaccaccacgcaggtgtaccatgagcgcgctgacagccgcacggcccgcggcgagtttgactactcggcgcacggcgtccgcgacgtctccaaggagctggtggggctggc

SEQ ID NO: 441103 - DNA, 1393 bp, Homo Sapiens
  misc_feature (177)..(187): n is a, c, g, or t
  misc_feature (208)..(216): n is a, c, g, or t
  misc_feature (1092)..(1120): n is a, c, g, or t
ccccaaagaaagattttaattttttcaaatataaaagtgtctaagagaatcatatgtgaacaaacaaaaatctctgattccagatttttaggataaagatgagtaacacactggcagctgaagaaagctgaaactctgactaataaatagatccaaattaagaatttctacaacagnnnnnnnnnnnagaaaacaggaccagaattcnnnnnnnnnaaatgatgatcctgtggaatgcctttacttccatattcacctaatattgtaacagtaaaacagacacaagaatgttgatgacagctcaacaatggctggattcaggacatttacaggtacacttttgtttaaaagtcctacaagtttattgactaaggctagacagcaattcatatgatcctatttggtgcattttctaccatggtccaagatcattacatggatacagccaaggactgggccccaactttcaggaaaaagaccacaaagaagaaaatcaaggtggctatttggtccccccagttgataatctgtgtcctggaactggaaaaacaaaaggtggaaaatacagactgcaacgagttaaaggacttggaaaaagttggtggaaagtggcacggtatacgagtaaggtcactgggcttgggatggcaagggtgctgcattgaaagagcatccacgggaccaagtacttataatgtctgatggtgtcattccctcaacgacttagaatatctgtatgcgataataaatagatcagttatgtaataaggcagtgtgttgaatatgcattcgtcctgtggaatgaaccaccacagagagatacatgataccatacacattctttgagttttcttgtgttgtgtttgatttgtttgttttcaaggctatccaggctaactcttcccggggatttccttggagagaagagtggtccgctgaggctggtttgctttaacctctcctttatcaagagatgatgactggctttaaagaaaaataaagctgaaggttgtttgatttttattttttcccttttggttgcatcattttgagtgttttcatataaacaacaagaacaaaaaatcacaaccnnnnnnnnnnnnnnnnnnnnnnnnnnnnncacaatagttcttgatgcatccagttgttatatcctcaggatgttccagatgtttccaggtaactctgtagtttacggactgtggttttgtccagcgagcaaagatcaaaatcaaatgttgtgtttgtgatatgaaagtgtccagtttcttctataaggttcacgatctgctgcagaatgtgtctttctctcaatgtcattaaccttctgtgaagctctaccagttcatctaggtatgccttgtcacattcaccattctttatttgcttatct

SEQ ID NO: 441104 - DNA, 460 bp, Homo Sapiens
  misc_feature (197)..(197): n is a, c, g, or t
  misc_feature (430)..(430): n is a, c, g, or t
gtttaaaagtcctacaagtttattgactaaggctagacagcaattcatatgatcctatttggtgcattttctaccatggtccaagatcattacatggatacagccaaggactgggccccaactttcaggaaaaagaccacaaagaagaaaatcaaggtggctatttggtccccccagttgataatctgtgtcctggnaactggaaaaacaaaaggtggaaaatacagactgcaacgagttaaaggacttgggaaaaagttggtggaaagtgggcacggttatacgagtaaggtcactggggcttggggatgggcaagggtgctgcattggaaggaggcatccacggggaccaagtacttattaatgttctgatgggtgttcatttccctcaacgactttggattatctgtttggcgttattaaataggtncattatgtaattaaggcagttttttggatt

SEQ ID NO: 441105 - DNA, 777 bp, Homo Sapiens
  misc_feature (73)..(73): n is a, c, g, or t
  misc_feature (161)..(224): n is a, c, g, or t
  misc_feature (493)..(493): n is a, c, g, or t
ggcctttccttgttttccgcccagtccacgccgccatggccaagtggggccaggggaacccccactggatcgnggaggagcgggaggacgggaccaacgtgaacaactggcgctggcgcggctggcggcggcctccttccgggatctggggagggccgggnnnnnnnnnnnnnnnnnnnnnnnnnnnnnnnnnnnnnnnnnnnnnnnnnnnnnnnnnnnnnnnnccccccctcagctgctggacgcaggctcggccttcgcctctcggctcgggagagtccttgagtacggagaccggctaggagggttgcagctgcctctttttgaaagttgggttgggccccaagagtgacttccgacagacctttccactcccaccgtctgtggcctgagggccttcccttctcctcccgcccacccctctggatgtttcggggagttagaagggagctggattgagagactgtgttaggggcgggggtatggaacgtanggaaaagggcagaaatttggatctcagttcgcgcccaccccgcagcgcctcccgcgagccgggccctctgtgagtgagacaagctccccttcctttacgcgcctcacctggcgcgtgagggagaggtcggcagccctccgccgcagaacctccggaagggatgtcctctgccctgcgcctctggccgggggctgtggtccctccaggcccgtcgagggggatgctgagggccggtccccagaggagcatgacttggctggtccggaggagctctgagggcatgg

SEQ ID NO: 441106 - DNA, 947 bp, Homo Sapiens
agcgggccttctggcagtttctgggagctgcgaacgcgccgccccggggctcggcggccggaaacgctggcttcggagccttaggcgccgcggcctttccttgttttccgcccagtccacgccgccatggccaagtggggccaggggaacccccactggatcgtggaggagcgggaggacgggaccaacgtgaacaactggcgctggcgcggctggcggcggcctccttccgggatctggggagggccgggccgcgggagccggggctgccctggggtctgtgcggggccgcggggccagggggtcagggggccgccccccctcagctgctggacgcagggctcggccttcgcctctgggctcgggagagtccttgagtacggtgaccggctaggagggttgcagctgcctctttttgaaagttgggttgggccccaagagtgacttccgacagaccttttcactctcaccgtctgtggcctgagggccttcccttctcctcccgtccacccctctggatgtttcggggagttagaagggagctggattgagagactgtgttaggggcgggggtatggaacgtagtggaaagggcagaaatttggatctcagttcgcgcccaccccgcaggcgcctcccgcgagccgggcctctgtgagtgagacaagctccccttcctttacgcgcctcacctggcgcgttggggagaggtcggcagccctccgccgcagaacctccggaagggatgtcctctgccctgcgcctctggccgggctgtggtcccttccaggcgtcgacggggatgctgaggccggtcccccagaggagcatgacttggctggttccggaggagctctgaggggcatgggccatcttgggctcgctgcaactcagtttccgagcttcagccaagtctcctgcttcagccttctgagtagctggactac

SEQ ID NO: 441107 - DNA, 1198 bp, Homo Sapiens
  misc_feature (221)..(221): n is a, c, g, or t
ccgtggaaacccagagagttcccccccaaaacccagggtttgtggtcccggcccccttcctggaagggtcccagatgttgggcccctggggcagggtggcctttgtggggccaggaaaagtaatggtggaagaagttcaccatccccagggctgttgtttgttccccaagcttcaggaagtctcaaggcacgttgcgcgggcttgcgcacacgttgtaggnccgaggagtggctgaagatgaccggggcttctggacagctgcagggtggccttcatggtggccacagacacgtgagccaagtcgatgaggacccccagacggttcagctccttcaccacacgctgcccaaagggtgacaagccttggctctggggctcgctgtctcccgtgtccaccagccagttgtcagcccagggcgtgttgcagctgtgggtgagggtcaggtaccgcatgcccagctgatagagtgcccgcaggacgcccaaactgctgtcaatggagtggccgccctccacgccgatcaggctggccaccttcccttcccggaaggcctgccgaatgcctgcactgctggtgacatacaggaaggtctccgggtacatccggcacatgcggtggaccacgtccatctgctccagcgtcctccgcacggcgtctttgttctgggtgtcgcagggcgtgtacacggaccagaactggcctcccacaaagccggccctcagcttggggatgttggtgtgtgtgccggccaaggtggtcaggttggccctctcgtcctgcagccggttgttgaacatatccagcagctgccaggggaggtcattgtgcccatcaatgacaggggagtccctcatgatcctctctgcctcgtcccgaaagaagtctgcagtgcagacggccacaaggggccacagccaccatccgctccacatggtggggtccccggggacctgtgtgcactgctgccctggtgcctctgtgctggcctggctggcccgtgcagaaggatgagcttcaggctgtgaggagccactctgccatgcgcgggacagggtcccgagtacctcggctcagccacccaagtcccagggagacagacccgcctcctgcctcccaggtcacaaggcttgggggttgtttctggtgttcaagttcagtcctgccacccacggagctctccagctacagaacagcca

SEQ ID NO: 441108 - DNA, 660 bp, Homo Sapiens
gacgtcttactaattttaataattaatattgttgacataaaagtaaaaggcaagcttaacttttgaaggctgactcatgaagaattttttcattaatcaaacactgactacatttaagctataaaattttcacatggaatactgaaacaataatgtaccatgattctatctctaaatttattttaaatttagagctttcatattttatagttattctttaccagttcagatgtttctatatctctatatattcatatagaattatagattttatattcatgtgtaattaagtcacaaaactatgtaaaataaaattctgtgtgagtgatatgactgatgacttcttaaaatagtaatcttcaattacatattttacaccacaaaatgtacagacacccagtttttttctaacaacaaatacaggtgaatttatcgattctttataaaagctttaagtgattctaaattcaaagtcatagaaatagaatcagacttatgcagattgttagatagtttgatagtacatagtcagtgctctgtctgataacatcaatagctacatctttggcattgaaaattcaatatgagtttttgacaaaattttgtagcttagagcatcattttcttttaaacaaggaaaaacacggttgagtaagatat

SEQ ID NO: 441109 - DNA, 1070 bp, Homo Sapiens
cccaaaattgtgctttattaaatgctagttcattggaatgttaatacatgtttcacacacacaatcagcaggagaaaatgtttctatagccaaatgacattgataaacagtgttcttacacaaagttaagcctgtttctttattataagacttttcagatactttcccagtgcatagtgtgaatctccacaaagcaagtgaaacatgaatagctccctaaacttacttgaccacagaatgcttcattctatctccatggaaaccacttgtgaaagtctcctactccaactttcttctccaacaaaactcacctgtttgtgatcatctgaactcattttgtgctcttgcctttatataaaagagaagttctgtgaaatgttgaagaagcagggttatggcactagtaatgatccaggcactatacaaattgttaaaattttccattattttagttcagaagccctaaccataggtattctaacagtggattgtggaacccagtatgagtgtttgagacatgttacaaaatataggagctatttttaaaatgaatccatttaataatactgctagatgctgtgagagacagggactccccggcccagcacacacgcttgagcaggaatggagacatgggcatgggtaggcaggctggtggtcagcagataccctttctgtccctcctctgtgacaatcacccccaagtaatttttgggattcagaataaggcagctgctctcccatcctggttactatgagtcgctcttggcagaaaggaccacagatggagagcttggcactcgctccaactttgccgaaaagaggacaaccatccaaagtagtaggtaaaaacacaattttagctgcagtgaaataaaaagaggaagtgaggatggggccaggccgcaactataattaaactgtctgtttaggagaagctgaatccagaagaaacacaagctgtaaagtgagagaggacagggagcagggcctttggagagcaggagaggacaggctgtcaccaagcgctgctcggactctgccctgaaagatatgccgtcagtacgtct

SEQ ID NO: 441110 - DNA, 1765 bp, Homo Sapiens
  misc_feature (724)..(724): n is a, c, g, or t
  misc_feature (736)..(736): n is a, c, g, or t
ccctttggttttagtattgctccgtatgttctcaaagctgcttcgggcagtttattgaggttttcacgttggggtaggggaagtggcacacacatgctcttgctgtgtacacacagtgaaggacctctcccgcaggcaagcacatgcccacagcttgagcacactgtccatgcatctcctgtccccaacaggcagtcgtggcctttggggcctggcaagttccgagctggctacgccccatgcttctccagggtgctggcgacctggcaaggactagggcagtcccccactgcacccccagctcctgaggccaaacccagggcttcccactgcttggtagatgagccctctttgaccgccaactctccttctttggtccgggcaggatggtcttgcagccctcactaggctgtcacagagcctggggctgggctgccagaggacaccactctggggcaggagctgctgctacctccaggagttctgcgtcatgggggccactgcgggaggacacaggctgaggtggctgcagccacaggagggcccggtgccccagggggaggtggggcaccagacataccctcggggcctaggctgggcaccagcattggactcagagggagcgcccaggagggactcctctctggctggaggcagagggccctgtgggttgggaagtcagcttggagtggggctgggccaggtcctcacctcccagcctccncccagaaccaanaaaaactgagtgccaggagggcccctgtcagggccgtgggggcggtggcagcgcagcccccggtcctgctggatgaactgctgcaggttgcactgacggagctctcggttcagctcctccagctcctgagcctgagcctgcaaggctcgctctgctgcctccagggcccggctcaccagagccaggctgccctgcacctccgcactctgccgctcctgaacagccaggtcctggtgcaggcgctcagtggcagatgccataggtgaggggggcccaggggcctccgctgccagctgcagctcagcctccagggcacgggcctgagcgtccagggcctgcagccgggcggcatgctcagcagtggccgcacttagtgcctgcaggcgtgcctgtccctctcgctcccgggcctgctcccggcgcagctcttgctcccagaaggcctcatggcccagctcctcagcattcctctgcaccctgagctccaggccccgcaggtctgtgcagcagcctggtgtgggtgtcacaggggccgcaggcccagggcgtgagaggctgggggctggctcgggggtcagtgttttgcggggctcacagcccagcgcagcccgtggctttacagggaggctggcacgaattaggcagcgttccgggggtggacagctgtctgaggagggcctcccagctaggctgggccctgtgcgcctcaggacaaactggacatcgctggcaaactgtccgcaggtggcctgggcgcccactggacactcttgtggcagcaactgccgctccttctcccgaagccgctgcacaagcacaaagcggccagtctggcctattgcttgggctagtgcgatgaccacttcctggcaggtggtctgctctgagaccccacagaccacacgctggatgccatccacccacaccttcagctccatggccgccagtcccaacaacatgcctgtcctgggcgctcgccagcctggagacccgctccggcgccgccgcaacctgccgcccccagcgccg

SEQ ID NO: 441111 - DNA, 1647 bp, Homo Sapiens
ttccctttgaggagactaaatgtatttcatgctggaaagaacagattttctctcattaaaaatagccccactaaaggagaccaacatgctagaagtgcggcaccagggcctcaagactacacttcggaacatgaagagggctggggaccgctcagcccaagtctggatcttgtaaccaacagatgccgagcttgccgttcaactaggcacagaaagcagactcggtctgggattccagttggtctgattcagttcaagagggtcacagtcagaagaaagctttttccattaggagcttcagcagagtgaagagttcaacacagcaaacaggcaggcagctcctttgtatatgtgacggggtggccctgactgtaaacacagccctaccagtcactgcagctcatggcctgagaagacattccagtggcagcctcgggtgtccactcagttcacatattctggtttcacctgcccaagctgtcttcaggcatgaggtcttgtcagaattgggatgtggatgtctcctatgttaccatttattgtgtgggggcagccatcatcctatttgtctggtccatcaagcttcccagtttcccgctgcacaaggtcccgcatctcttctgtccagcccagaagctccactaggctttccacgccgtgaaccacgtcccccagctgggccacgtccctgctgcgaggatgccaagccaagggccccaccaagtcccggttgatgagcagtcggggaactgagctccgcacggcctcggtcaagctggcaaaaggctccacctccagggaggtcccaaggatgagcagcagatctgccatggggaaatcaaccacatgcagcaagaacctctggggcagcggctccccaaagaacacaatgtcgggcttcacaacgccggtgcagaccgggcagcggggaaccctgtctgccatcacgtcagcccgaatgtcctcccctgggaagggtctttggcagactgtgcaggtggcagaggcaaaggttccatgagcttcaaccagctttgaggcagggatgcccgacactctctcaagcccatcgatgttctgcgtgtagagccgcagaagcagccccttgtcatgaagcagccggagaaagtagtgagtgacgttgggcttgtagtttccagggtacagctccttggccaaagtgaaaaagggcttggggttgtgaaagaagaatgggagttcaaaaatggcctcggggtacgggagatcgtactgctggaggttgctgtacaggccactccccggcgatctgaagtctggaatgccactgggtgtgctgatgccggcccccaccatgaccaccaccctctggcaggctctggcccgaatcagctcagctacatcctgcagggaaagcttccccttgtcactgctgcctccacttccaacaacacttgaagcacccacagaaaaagatatggaccttcttccacctttaataatcgtccctgccgccaagcaccagccgacagccgcaggcctgaaacggccccacgcctcccccggcctcgacccgttcaactacccggccccacagccggagggctgccgcggcgcgccaaccccagaacgccatgttccgcgcagtccgaggagtccccctccgct

SEQ ID NO: 441112 - DNA, 577 bp, Homo Sapiens
  misc_feature (32)..(32): n is a, c, g, or t
  misc_feature (43)..(43): n is a, c, g, or t
  misc_feature (55)..(55): n is a, c, g, or t
  misc_feature (205)..(205): n is a, c, g, or t
tgtgctaatgccggcacccaccatgacacacnaaccctctggnaagctctggccngaaatcagctcagctacatcctgcagggaaagcttccccttgtcactgctgcctccacttccaacaacacttgaagcacccacagaaaaagatatggaccttcttccacctttaatactcgaaaagaagaaactgggagctgctgccctnggctgcctccggaatgccctgggcacctcgggtctgggaggcctctgcaaggggcgcagccgggtccaagggctcaccgcgggccccatggctgcctctcagccccgcactcacatcgtccctgccgccaagcaccagccgacagccgcaggcctgaaacggccccacgcctcccccggcctcgacccgttcaactacccggccccacagccggagggctgccgcggcgcgccaaccccagaacgccaatcttgaaaattccggcccggttccttgagagaacggccgaccccgccgggctccgggccgggggagtggggtggtgtggcgtggtctggtttgcccttcgcctcagggggtcgcctagtattc

SEQ ID NO: 441113 - DNA, 877 bp, Homo Sapiens
aatccatcagtcaatcagcaagcatttattgagcacttgttgtattctcagagctccacttggctgtggagagatagcccatgatttaagcccaagttcttacttctacagagctaacttgtgcagagctactggctagaagtgcagtcataaaggagcagtggaaggcattggtctgaactatcacattcattctggccatctggacattggacatgatgcttctgattgtcagacactcatgctccagctccaggatctcccgagggacctgcaggacaaatttcaccaccttcagctccttggacgccttcttctgaatgacgctatcaaaatcacagtctagctggtcactggtgattggccctgttaggacagccaaggtgaactcaaggccatgaagcgtgtggctgaagggagtgaagaacaggaaggccaggtggacttcagggccctagtagaccaacaggcccacagtgccctggaagctgaggctcatctatgccaagcagcaacttcgggcactatccttcgggtagtagagcccggccacgttcatcaactctctaaggatcttcttcttgttttccctgacattcttcttggctaatgccaagagtagcaccaccacatctagagtgtaggtgtcagcaagcttgaatgtgtcgtatgtgtcactccatgcctcaatatcacctccacaggcatctatgttgaacaggggaaaatgcatcaccactggtcagtttctcctttcaggatgtagcagctggcgggggccttggaccacaaatccagctcagcctcttctacttggggaaaggggatcttgtggcggcggcagtagtcagtggtagcccggatggtctcgaaagga

SEQ ID NO: 441114 - DNA, 800 bp, Homo Sapiens
  misc_feature (6)..(6): n is a, c, g, or t
  misc_feature (16)..(16): n is a, c, g, or t
  misc_feature (23)..(23): n is a, c, g, or t
  misc_feature (33)..(33): n is a, c, g, or t
  misc_feature (81)..(81): n is a, c, g, or t
  misc_feature (86)..(86): n is a, c, g, or t
  misc_feature (91)..(91): n is a, c, g, or t
  misc_feature (137)..(137): n is a, c, g, or t
  misc_feature (167)..(167): n is a, c, g, or t
  misc_feature (204)..(204): n is a, c, g, or t
  misc_feature (284)..(284): n is a, c, g, or t
  misc_feature (290)..(294): n is a, c, g, or t
cgcggntgcgccccgncgccgcnggcgcgcttngcccggcccggcgagaccctgcggtgggcgggccgtgggcgcggccgngtgancgcancccagtgtgcgtgcgcgggcctggcggggcggaggcgggcggcgcnggcgcgctctggactgagctcgcgagcagncctatgcgccccggctgcgcaaaaccaagtaccgcanttccgccgcgctgctcaagtcatccccggactcaaccgctccctggaggaggaggacacccagctgtaggggcggggcgnccacgnnnnnatttatttatttattcgcaacagccagcgctaaaagagggggaggccgagccaagaggaccccaggagcccagagcagcgggagagggtccttcctagcctcggcccgccgggtcggttcctggctggtgtctgctgagggagtggggggcccagccccttctcttctcccccgccaaaccacagtgggagctggggcagggggagagccaggcaatcgggggccaaagatgggggtgctcgcctacagtctgcatctgtagtgccttgtggggtatccaggaacaccctcccagcaggggatgggaaccctgtcccatgaagccctctcctcagctttacttgctcccccgcccttagccttggggagaaatggcccgtggtgggctgaccccccaccctccacacacacagttccatgacccagcgggcccccaggggcatcaggtgctggtcctcctccctcctggcctcgacccctaagggcttcgcccctcccaggggcct

SEQ ID NO: 441115 - DNA, 1036 bp, Homo Sapiens
  misc_feature (13)..(13): n is a, c, g, or t
  misc_feature (18)..(18): n is a, c, g, or t
  misc_feature (20)..(20): n is a, c, g, or t
  misc_feature (25)..(25): n is a, c, g, or t
  misc_feature (39)..(39): n is a, c, g, or t
  misc_feature (47)..(47): n is a, c, g, or t
  misc_feature (56)..(57): n is a, c, g, or t
  misc_feature (60)..(850): n is a, c, g, or t
aaaaaaaagtacngtaancnccccngcaagccttcaggngtaccagnagaggcatnnttnnnnnnnnnnnnnnnnnnnnnnnnnnnnnnnnnnnnnnnnnnnnnnnnnnnnnnnnnnnnnnnnnnnnnnnnnnnnnnnnnnnnnnnnnnnnnnnnnnnnnnnnnnnnnnnnnnnnnnnnnnnnnnnnnnnnnnnnnnnnnnnnnnnnnnnnnnnnnnnnnnnnnnnnnnnnnnnnnnnnnnnnnnnnnnnnnnnnnnnnnnnnnnnnnnnnnnnnnnnnnnnnnnnnnnnnnnnnnnnnnnnnnnnnnnnnnnnnnnnnnnnnnnnnnnnnnnnnnnnnnnnnnnnnnnnnnnnnnnnnnnnnnnnnnnnnnnnnnnnnnnnnnnnnnnnnnnnnnnnnnnnnnnnnnnnnnnnnnnnnnnnnnnnnnnnnnnnnnnnnnnnnnnnnnnnnnnnnnnnnnnnnnnnnnnnnnnnnnnnnnnnnnnnnnnnnnnnnnnnnnnnnnnnnnnnnnnnnnnnnnnnnnnnnnnnnnnnnnnnnnnnnnnnnnnnnnnnnnnnnnnnnnnnnnnnnnnnnnnnnnnnnnnnnnnnnnnnnnnnnnnnnnnnnnnnnnnnnnnnnnnnnnnnnnnnnnnnnnnnnnnnnnnnnnnnnnnnnnnnnnnnnnnnnnnnnnnnnnnnnnnnnnnnnnnnnnnnnnnnnnnnnnnnnnnnnnnnnnnnnnnnnnnnnnnnnnnnnnnnnnnnnnnnnnnnnnnnnnnnnnnnnnnnnnnnnnnnnnnnnnnnnnnnnnnnnnnnnnnnnnnnnnnnnnnnnnnnnnnnnnnnnnnnnnnnnnnnnnnnnnnnnnnnnnnngacaaatgtatatgcaaattcctaatgacctgctcttttatgactgttacctatctcctgccatatacattgttttgaggcctattatctgatactactattgccatgccaactttcttttacttaatgtgtatctttttcttgaccatttttaagtagctttctcagctttgaatttctaattca

SEQ ID NO: 441116 - DNA, 1521 bp, Homo Sapiens
  misc_feature (370)..(370): n is a, c, g, or t
  misc_feature (372)..(372): n is a, c, g, or t
  misc_feature (376)..(376): n is a, c, g, or t
  misc_feature (391)..(391): n is a, c, g, or t
  misc_feature (393)..(394): n is a, c, g, or t
  misc_feature (404)..(404): n is a, c, g, or t
  misc_feature (411)..(411): n is a, c, g, or t
  misc_feature (413)..(413): n is a, c, g, or t
  misc_feature (428)..(428): n is a, c, g, or t
  misc_feature (430)..(430): n is a, c, g, or t
  misc_feature (437)..(437): n is a, c, g, or t
  misc_feature (455)..(455): n is a, c, g, or t
  misc_feature (457)..(457): n is a, c, g, or t
  misc_feature (459)..(459): n is a, c, g, or t
  misc_feature (475)..(475): n is a, c, g, or t
  misc_feature (510)..(511): n is a, c, g, or t
  misc_feature (609)..(609): n is a, c, g, or t
  misc_feature (622)..(622): n is a, c, g, or t
  misc_feature (983)..(991): n is a, c, g, or t
  misc_feature (1507)..(1507): n is a, c, g, or t
agtatagacaaattattttagtcctttagtacagtctgtttcctccttcacccccagaacaaaaatcgaacttctggttggacagcgtcagatgtcactgaggtgaccccagcctgtttgcagttccaagtcttccgtgtaggcgtcactgctactggaactttgtagatgaggagcctgtatgatgatgtcctgaacatttctatcctttcctcacacagagggaagctacagaatgaaggggctggaaaacgttggtctggttccttttagagctgattccccattggatactgcctggaggccttggggatgaatgagaagttctgcagtttggatcagtagcagaagcaggtaacacatcagggancnggtntgcctaaaaaaaatngnnttagatattnttgattnantttctgatacatttntnagctaanttgctatggtcacccccntntntcctgtaatgtccaancctaaggaattaactaagtaaactaaaacctttgnnttcttgctctgaccttggacaatggaattcttcttattttcattcagtggatagcaaatctgcttcttccctgccttaactcactcaaggtctctgtnatgcactccaganttttcctccttccctggcatagtcttctccctcccctagctgcctttcaaaattggtgaaaatgaagcttcaggattatgaaaactagtacttaatgaaggccattattctaatgacaatatcgctggactcttgaacttgttatgctgggatctagaaaccctttccccagcaatctttcacacagcacctctgggaagcggtttcccactaacaggccatagaggtcaagtggaaacagtccagttctcattactgaaaagctaagattcagaagaatcacttttcttgaggaaaatggctaattctatttctatccataagacaaaatcagacttgattgctcctcaaacattctttnnnnnnnnnttaaccttttaagttcatgtaaattttaaacactgagctattttccagaaggaagatactcagaagtttgaaacaagtactcaaaaacaatcggttccaactgttagaggaatataatgaaaccagtatgatcaaatgctccatccttacctagaaggggctatttctacttttaggacagaaaatttctctaaccaaacaaaaaggagctctctccttaagtgagcttccacagactatatactggggtccagtcaaaagacagatgtccaaagacagcaaatccatctagattattgtaaacaattttcggtgagtgagtaaatggtattaccttcagccatgatgaataaagcatctaagccaaaaatacaatgtgcctacatctacccaaacaaaagtcagatccccaacttgccctgttcaggttcctctctcctcctcccacactccaagttgtataacctgtcacctaaccttttagggtctcagcttgcaacatctggaaaattaganccaaattggaaaga

SEQ ID NO: 441117 - DNA, 956 bp, Homo Sapiens
  misc_feature (38)..(38): n is a, c, g, or t
  misc_feature (283)..(315): n is a, c, g, or t
  misc_feature (718)..(718): n is a, c, g, or t
  misc_feature (773)..(773): n is a, c, g, or t
  misc_feature (790)..(790): n is a, c, g, or t
  misc_feature (797)..(798): n is a, c, g, or t
  misc_feature (800)..(800): n is a, c, g, or t
  misc_feature (802)..(802): n is a, c, g, or t
cgtaactttgctttctgcaggagcggaaaactccgctnccataagagcagcaggagagagacagggacagactgttatcagagcgtttgtggggcagggcatggagggcagtcaagacagaaggggcgtgaggcacccagtccccagaggtgtcctgtggcaatgggtggggagggagatacctgggatgtgcccagcacggggacccccatacttgggcttgttattccagctgccccagtggttctggtatccttggcacttactggtgctgccactggcnnnnnnnnnnnnnnnnnnnnnnnnnnnnnnnnnctgcttgtgtccagtccagccgcagacctgggcctcccattaggagtcaggcccaccctctattacaatatttgcattgtgctttgacccctctttgcaaaccaaccccttatctgtctgcatcatgatgtgacaggcaccttcctcaaggtccctcccttctactgttgaatcgtcctcaaaaatgcccagtggttaggttaggagaaaaggttcctgggagtattttcaactttcccagattctagcaggttctgtgcctcagtttccctctggctgccatgacaagcaggagccacgtactggttgccaaagcatggcaatgaactccttcccattaggcctcacatggagaacagggcacccagtccatgcaggggtgtgctagtgagccgccctcccntctgctgggtcctctctcagctgtagggcacagggggcctggtcgggtgggtcgnagataagtgtgggcctnagtggcnngncnccacatctcatgggctgtcttcaggaactcgatgcctcacagagggacagggaccaagaggaggagtaggcatgggctagagcaaggacgcccacggtccacgcaccatgggtgagtcgccaaaggcccggcgggaatggccggttttctggaa

SEQ ID NO: 441118 - DNA, 1029 bp, Homo Sapiens
  misc_feature (20)..(21): n is a, c, g, or t
  misc_feature (38)..(38): n is a, c, g, or t
  misc_feature (42)..(42): n is a, c, g, or t
  misc_feature (46)..(47): n is a, c, g, or t
  misc_feature (55)..(55): n is a, c, g, or t
  misc_feature (81)..(81): n is a, c, g, or t
  misc_feature (87)..(87): n is a, c, g, or t
  misc_feature (114)..(114): n is a, c, g, or t
  misc_feature (132)..(132): n is a, c, g, or t
  misc_feature (182)..(182): n is a, c, g, or t
caaatatatacatataaaanngcagttacattgttganaganttgnnattttggnttcttcactgaatataatggtcttgngttggnctccggtccccttatatactgtcagantttatattgccaaaaaantctttcattgactgaatataccataatgtaaaataatttagagtatttangattttatagcttttaaagttatattttgtatattcattttttttgtataaaatgttaaaagttataaaatggaagtatataacatattttgacaactgatgcttcccagcatgcaattcaacaggttcaagccccctttatgcttccctaactcctcaaaggctgggaagggacagcaggttagacactgcacgaggatattacacccaggcattgaaggtcacattccagaaggtccagttgaaagtgactgagtgcattttaagtcacacatggataactgaaggtctgtttgtaaagttcacatgctgaactcctacaagctgtaaaacagagttgataggtttgtgatccaacctattcctatcgcggtgtataaaatggatgttgttacctggacctaaaatgagggttccaccttgctgagctgggtctccttgaaaatcaaagagagggccagtcactgcccgccacaggctctgaaggcttcctgagagtagatttgattttatgtgggggctctgtcctgaggaagcaatttcttcacctcttttcattcccaatcttttataaatttctctctcaggatcgacatagatttcatgagaatatccagtcagcttgcaaaaaggctcaataatgataggtaaggatgactgtccaatcactaataagggtgacaattatgcttcttgtaagaaactcctggggattttggccagatcctctacgtattccttgcagatgtaacacaggaaaatgctgccgcgtgaccggggcacggcgcggccatgaacgcggggcggccgagggcctgggtccgcatcccgggaattccggaccggt

SEQ ID NO: 441119 - DNA, 1642 bp, Homo Sapiens
  misc_feature (263)..(263): n is a, c, g, or t
  misc_feature (265)..(265): n is a, c, g, or t
  misc_feature (281)..(281): n is a, c, g, or t
  misc_feature (292)..(292): n is a, c, g, or t
  misc_feature (296)..(296): n is a, c, g, or t
  misc_feature (330)..(330): n is a, c, g, or t
  misc_feature (338)..(338): n is a, c, g, or t
  misc_feature (342)..(342): n is a, c, g, or t
  misc_feature (347)..(347): n is a, c, g, or t
  misc_feature (356)..(356): n is a, c, g, or t
  misc_feature (363)..(363): n is a, c, g, or t
  misc_feature (374)..(374): n is a, c, g, or t
  misc_feature (403)..(403): n is a, c, g, or t
  misc_feature (412)..(412): n is a, c, g, or t
  misc_feature (474)..(474): n is a, c, g, or t
  misc_feature (534)..(534): n is a, c, g, or t
  misc_feature (611)..(611): n is a, c, g, or t
  misc_feature (613)..(613): n is a, c, g, or t
  misc_feature (623)..(623): n is a, c, g, or t
  misc_feature (625)..(853): n is a, c, g, or t
tcaagctgctatgaaagccaaacatgtatcacttttgtccccacaggacccagcagatgcaacaaacatccagagaggtggtaataccatcagacagacatttaccagtgacaaacgcctccatccccgatctcctgacgtgcccttgatggtcacacttggcactgctaaggaggacctacctcttcttggctggctcaggtaagctgttggaggccgtggagggctgagacatcagctgcccaggctggctaagtcgagangnattcatgctatccggncttccactganaggnccacggaccttgctctaggggaaaaaataaaaanaaattagnagcnaagtnatgaatcanattttgnattcacgccanagtattttcttaggagaaaactggctggntgcaaaaanacaaaactaaccctacagcctaccagttggaacccccacctgcgggtcaactggtgcttcanatctggcttcaaaagtgtttctgtatcaacggagactttagaggaaaggattctaaattnaaagagacctgggtgcctacattaatttgcaggcttttttattttcatcagctttactgattgattatgattgaaantnttgctctgangnnnnnnnnnnnnnnnnnnnnnnnnnnnnnnnnnnnnnnnnnnnnnnnnnnnnnnnnnnnnnnnnnnnnnnnnnnnnnnnnnnnnnnnnnnnnnnnnnnnnnnnnnnnnnnnnnnnnnnnnnnnnnnnnnnnnnnnnnnnnnnnnnnnnnnnnnnnnnnnnnnnnnnnnnnnnnnnnnnnnnnnnnnnnnnnnnnnnnnnnnnnnnnnnnnnnnnnnnnnnnnnnnnnnncatgatccactgcatccagccccttaatgaacttttacaagaaaagaacaggaaagtattcttactgttttccaggtagaagacagacacacacacaaaggctatgggaattcctgtggcttgcatcctctatgacctggctgagaagaaacaaggacaccctgactcccaaggggctgcagccactgcccctcccagcccgaagggtcaagcaggggttcccattccagctacctgagcctcctcagctcacagcccacgaccgccggccaatcttcaggtcacccctctgctgatctctgccctgcatggtccccaacccacccatgtagccccccaggccccacacctgacactcacttcggcctgcagtccttcatcccctcacgtgtccctcaggccgtggaaccatcctggctccacatcctcccctccagcgaaacctcaaggcccacacatcaagaagccatgttaagcacccaagcctcccgttcctggtcctcctgctgcaccttccctgctgaccatgcctggggagaggcccggcattggcctcctgtgcttctgccctggaccgaaagtatggcaggggatggctcctgcactgcctggctccctcccagccaggccctgccccagctcctgccccaccctgttctgtgctgcacagcggcggctcaactccagcctcgctgagcggcccgtctcagtgctgaggttggccagggactcagatcctccagctgcctggagagggacttccccaaatcccagatgtgatcatatccc

SEQ ID NO: 441120 - DNA, 868 bp, Homo Sapiens
  misc_feature (66)..(66): n is a, c, g, or t
  misc_feature (87)..(87): n is a, c, g, or t
  misc_feature (112)..(112): n is a, c, g, or t
  misc_feature (115)..(115): n is a, c, g, or t
  misc_feature (119)..(120): n is a, c, g, or t
  misc_feature (123)..(123): n is a, c, g, or t
  misc_feature (139)..(139): n is a, c, g, or t
  misc_feature (148)..(148): n is a, c, g, or t
  misc_feature (153)..(153): n is a, c, g, or t
  misc_feature (170)..(170): n is a, c, g, or t
  misc_feature (193)..(193): n is a, c, g, or t
  misc_feature (200)..(200): n is a, c, g, or t
  misc_feature (220)..(220): n is a, c, g, or t
  misc_feature (223)..(224): n is a, c, g, or t
  misc_feature (244)..(245): n is a, c, g, or t
  misc_feature (251)..(251): n is a, c, g, or t
  misc_feature (269)..(269): n is a, c, g, or t
  misc_feature (277)..(278): n is a, c, g, or t
  misc_feature (280)..(281): n is a, c, g, or t
  misc_feature (288)..(288): n is a, c, g, or t
  misc_feature (291)..(292): n is a, c, g, or t
  misc_feature (316)..(318): n is a, c, g, or t
ttttattattttatttttgatcaacataaaataattatacatctctatgggttacatagggatgtnttgatacatacaatacaaccntactgaattgtttatcacatctaanggntttnnggnagggtgtttaagttcntctatatanaagantatgttgccagcaaatngggacaatttgacttccaccttnccaattngaagaggctttatttctttntcnngcctaatcaccggcataagnnggtatnggatacccactagatacnaggctatnngnnctatgcnagnngctataagaatagaaatatgaaannnaaatacctaccacaaggaattttagtcccatgggccagccctagggcagagagctagctatgagagatattgtggatggtactaagtggccagggaacacggagaacagagctgtgaattcacattcacaggggctggaggggggaaggggcaactggtaggtacgtggcatttctaggccatttggtgttggttaggctttgagtagacagataagaaaataaacgggttttcagttgggagaacggtatacccacagtatgcgggcggagggactcgaaggttgtctaccaaagagctttcggaccagtgtgatccaggggagtgggggagctctctgagagtgggagctggaggtcaatagtcgtaacctggaagtgctggctggcaaggttttggagcaggctcatataagggtggttggaaggtgcagttcttgagggtacggctgccaaagcagttcttcacaaataaaagtgagataaagatttttccagacaaataaaagctgacttgtctcacaagaaatcctaaaggaagctcttcaggc

SEQ ID NO: 441121 - DNA, 2109 bp, Homo Sapiens
  misc_feature (1618)..(1618): n is a, c, g, or t
  misc_feature (1859)..(1859): n is a, c, g, or t
  misc_feature (1875)..(1875): n is a, c, g, or t
  misc_feature (1877)..(1877): n is a, c, g, or t
  misc_feature (1888)..(1888): n is a, c, g, or t
  misc_feature (1890)..(1890): n is a, c, g, or t
  misc_feature (1892)..(1892): n is a, c, g, or t
  misc_feature (1910)..(1910): n is a, c, g, or t
  misc_feature (1921)..(1921): n is a, c, g, or t
  misc_feature (1924)..(1924): n is a, c, g, or t
  misc_feature (1930)..(1930): n is a, c, g, or t
  misc_feature (2048)..(2048): n is a, c, g, or t
  misc_feature (2089)..(2089): n is a, c, g, or t
ggggctcccagagcgttccattggggcaccgggcccgcaccccagcccgcctgccgctcccggaagcgctgggcatcagcccctgaagggccattgagcacgcgaccctcggcggccaggtccagcgggctccgtaccgcggtggttggtgtagctcacgtcggcgccctccagcgccaggaagcaggcgaccgccgcgcccaccgtcagctccgcgctgccggggaggcccgaggcctgtagcctggccagcaggctggcaagggtccttgggtcccccccggccccatcagccacccaggggcaagcagctgatgacgcttgcagcgccacgtgcagggttgtgtccccctcctcgtcctcggcgttgaccctgcacccagcgtccaccagtagcggcaccagccccacgtgggcctgttgcacggcgagatgcagcggggactgcagcttccggttgcgcacgttcacgtcacagcggccctcccggatgaggatctgggccacctcgcggtggttgttgagggcagccagatgcagcgccgtgaagccgtcctccttcttggcgtccaccagctgccgcgcccgagccagaatctttctcacagctagcgcgtgacccttgagggaggcatggtgcagcagggtgaaaccctggctgttggtggcggtaacatcgatgtttggcaacctccgtgaggacctcgacaatgccgctggctccagtgcccgccgagatggcggagtgcaggggcgtgtccgagtgggcgtcgggcaggttgacgtcacagccgcgctcacacagggcccgcaccacctccaggaagcccctctgcacggccacgtgcagtgctgtgctctgggtgctgttgatggcgtccgcccggcacccagcactcaggagcaccctggtggcctcgggctggttccccagggccgcgtagtgcagtgccgtgttgccctcgtcgtccggcaggtccacgcccgccctggcttgtagcagcagccgtatcaactccacctggcccaggtaggcagccacttgcagagcggtcctgccttggttcttggtgtccacctgctctgggcgcctccgcagcaggtccagagcccgggctgcgttacccagcgccacctccaccaccagccttcccgggtgctctgggtcactcttctgggcccgaagcttgtccagggccacgctcagtgagcttttgttctcccgggcgcgctcggccacgtccaggttggcatcctcctcgggccggtaggccaccaggcaggaggggctgaaggtccaccgctgaccagcgactgctacacgcaggttcccgtctccaaacactttcaccaccttcccgacgcggcccagggcaggggccatgtcgtccgtccactcgccatgcccagcctgcagccgcttcactgtgtcaaggtcgccgatgacccggaccacgtcgcccacccagaaggagtggtgtctgagcgacaaagaggggcgtgaggggccccccagctgtgtgtggctgcccaggttcatgcaacaggagggcaacctgctgagctccacgagacaggcaggcctgactcggccccggccccgaccccgaccccaggnactgccagaggctctggctggacgagagccccaggtgtccaaggcagccctgggtgtccctagccccagagccatgggaggagtgtccaggcagacagaagccagctctgggcaggtgtgaagccgaggtggctggccctgggaagctgtacgctgaccagcagcaggcaacatggccagggcccgtgagccagcgtgggggtggggccccaggaccatggggtgcaggacgggcccactntgccccacctgagccntnatatgcagggnantnactctacaagcccgtttnatgactccttnggngcctcntcaaaggtgcctggtatccaggaccccagatccagagctgagctctgacgctttgccccgggcctgcccctcccagggccatccaagctgccaccgccaccacctccagccccctccntgccatcctgcttcccaggcagccctcactacctcccgccnccactctaggccaagcatcc

SEQ ID NO: 441122 - DNA, 713 bp, Homo Sapiens
  misc_feature (19)..(19): n is a, c, g, or t
  misc_feature (183)..(568): n is a, c, g, or t
ccagttggacatgagactngcaatctacatctttaaaaaggcttcccaggtggtttttgtgcatactgtttgagagtcactaagttatatatatatcctaccttctgtaaagtgaaatgaggccccaaaaagctaaagaggtagagctgctacctcgtttttagttgattcatcatctagtcnnnnnnnnnnnnnnnnnnnnnnnnnnnnnnnnnnnnnnnnnnnnnnnnnnnnnnnnnnnnnnnnnnnnnnnnnnnnnnnnnnnnnnnnnnnnnnnnnnnnnnnnnnnnnnnnnnnnnnnnnnnnnnnnnnnnnnnnnnnnnnnnnnnnnnnnnnnnnnnnnnnnnnnnnnnnnnnnnnnnnnnnnnnnnnnnnnnnnnnnnnnnnnnnnnnnnnnnnnnnnnnnnnnnnnnnnnnnnnnnnnnnnnnnnnnnnnnnnnnnnnnnnnnnnnnnnnnnnnnnnnnnnnnnnnnnnnnnnnnnnnnnnnnnnnnnnnnnnnnnnnnnnnnnnnnnnnnnnnnnnnnnnnnnnnnnnnnnnnnnnnnnnnnnnnnnnnnnnnnnnnnnnntggatgaattacagctggtctgatggtagtgggttatcagaacttattaacattagtgtcattaaagttggtatatagcccctcactgctaaatctggctcaaaaattaaaagattattaaaatttgatgaattagtggtgatgg

SEQ ID NO: 441123 - DNA, 437 bp, Homo Sapiens
  misc_feature (376)..(376): n is a, c, g, or t
ttttttctttaccaagactgtttttatttaaaatatacttggaataggtgaatattaatctaagcattttcctatcacttttaaaattttatactatgtactttgtattaaatagtacagtagtttcagtaagacatgtaaaatttgccattttaaccaccttaaagtgtacaattcagtgacatttattatatttacaatgttgtgcaaccatcaccactaattcatcaaattttaataatcttttaatttttgagccagatttagcagtgaggggctatataccaactttaatgacactaatgttaataagttctgataacccactaccatcagaccagctgtaattcatccaattttcatcatcctaaaaggnatccccatacgcattacgcagtcactcccttttcaccccctccctagttcctgataactac

SEQ ID NO: 441124 - DNA, 878 bp, Homo Sapiens
gaagaacatgcattcaggcagatgctgtcccattcagaggaagctacagcagttgctccactgatgaaaaatattccaatgtaatttttatgggaattcttttatatagtgttctgcatattgtaattcatagggcttttgtttattcatataaaggataaatatttgggtgttttgagcttctataaaatatgattaattaaaggtagttaatactcaagatggtcttgagtttttaaggtctaacatcagttagaatacttcaaatcagaatcaccttccaagactgacttgacaggtggttctaaaaataaatcacgtcagctttttaggaaatgaagccttaagctagggggtaatgtgacttttgtttttcagtaagtctcacattaagcaattgtgtgcctctaatgaatcttccatgtcttttcagaacagaaactagcagctagtttcttacttgaacaagactattaaaaaccaaatatcaaaaaactgaattggctagatttttacagccaaaaattgctgtaaggcagtgtgtatcactgttgctaacatgtttatagtgggagtcttggggatgatagctggttcaacagtattttgctgctaatactttatgttgcttcttggtcaaacttttcccattcaaaggaagaagatggtgctactatagacagtttttcccctagcaaatatattgtaccataatatctatcatccaagtttcagggttttttgaaagttgataattaggaaagtgacattttacttttcttagtgccctttgcctgtttgatttccattgagaaagagcagtcaccaaagttcctcaagtgtcggaagaccaccaccatcagaatcagtgcttgttt

SEQ ID NO: 441125 - DNA, 433 bp, Homo Sapiens
tgaatttctcaatcaattttatttagcaatagcatatagtgttacagtgtatcaacatataaataagaacatacacaaaggacagacaactggaagaacaataacaccatatcaatttcaatcaaaatgaattatatccagtgctcactctcagccttctatatctagatataggtatcacatatattaaaatgtctagccaattccatctgtgttgggagttttcagctgaatctggggataattacatgcagatgccaatatcttgtttatctacaagggatttctttcataatgaatgaagtgggagggatatcatagggtcctggactaccgttttcaacaaaaggcagattgaagggaacactttcaggaaaaaggattctaggtatgtctttttggaattactgaacggttatgcagttggcaaatt

SEQ ID NO: 441126 - DNA, 1023 bp, Homo Sapiens
  misc_feature (940)..(976): n is a, c, g, or t
cagagtaggagcagagccttcccgtcaatttcatggcttctgaagaggtcgacaagagggcataatgcaagaggatctgtttgttttagaaataggaccactgcttccaccgaccaggttgaagggtgcttagtgatgcttccttcctctatgtaaccgtcattttcaactggtgaccttgtaactgaaggtggtgctgcagaagcatggtcagttgagtaagtgttgtggatgctgtcagcccgagggttgccaaggcagagccctgaagaagaaccatacgttgcaccatcagatgcataatacggctgacaattatgctcagagaaatctgagggatgcactggactcggagtgcggctgaggatcgggtcctcctccagctcagctcgctggtattcttccatgcaaaaggatggccttggaaggttgctcggggaattattctcacgccttgacactggtaaagtggggctgtaactgttcagggtaggagaatgtctcgtaaacctcatttttcttcattttctggagtttaagctttttaacaagccggtaagaatgcttgtttatatccatatcgcttatgatttgtccacagggatctcgcatggaaacgttggatttttgaaacctttctacgaatcacatcaatcttcttatccaggttttgcagagcatcatatataacctggcaatgaataaggacatcatcaactgtcttcagttgctcttcagtattacaggatgcgtcagatacaatattcggttcctgctattttagtgacagagcctgtcacgccggcctccggaggtcgcggtaaaactgctcgcagtagtcctgcctctccgatgggcgacagctgtgaccgttaggccactcgacgcttcggaaagctccgctctcgacgaattcgagctcggccgatttggcctgatnnnnnnnnnnnnnnnnnnnnnnnnnnnnnnnnnnnnncggccgccaccgcgataccgccggttcccctatagtgagtctataca

SEQ ID NO: 441127 - DNA, 1821 bp, Homo Sapiens
  misc_feature (14)..(15): n is a, c, g, or t
  misc_feature (43)..(43): n is a, c, g, or t
  misc_feature (52)..(52): n is a, c, g, or t
  misc_feature (62)..(62): n is a, c, g, or t
  misc_feature (64)..(64): n is a, c, g, or t
  misc_feature (66)..(66): n is a, c, g, or t
  misc_feature (80)..(82): n is a, c, g, or t
  misc_feature (101)..(101): n is a, c, g, or t
  misc_feature (111)..(111): n is a, c, g, or t
  misc_feature (115)..(115): n is a, c, g, or t
  misc_feature (121)..(122): n is a, c, g, or t
  misc_feature (124)..(124): n is a, c, g, or t
  misc_feature (132)..(132): n is a, c, g, or t
  misc_feature (139)..(139): n is a, c, g, or t
  misc_feature (199)..(199): n is a, c, g, or t
  misc_feature (222)..(227): n is a, c, g, or t
  misc_feature (238)..(238): n is a, c, g, or t
  misc_feature (278)..(278): n is a, c, g, or t
  misc_feature (293)..(293): n is a, c, g, or t
  misc_feature (299)..(299): n is a, c, g, or t
  misc_feature (319)..(319): n is a, c, g, or t
  misc_feature (324)..(324): n is a, c, g, or t
  misc_feature (351)..(351): n is a, c, g, or t
  misc_feature (357)..(357): n is a, c, g, or t
  misc_feature (394)..(394): n is a, c, g, or t
  misc_feature (419)..(419): n is a, c, g, or t
  misc_feature (443)..(443): n is a, c, g, or t
  misc_feature (454)..(454): n is a, c, g, or t
  misc_feature (493)..(493): n is a, c, g, or t
  misc_feature (504)..(504): n is a, c, g, or t
  misc_feature (588)..(588): n is a, c, g, or t
ctgtattttaaaanncctaaagaggggaacacgaaagcccgcngggaagganaagagtgaanananaaaccaagaacagnnncccgccacacccgcctgtngctgcccggntttnccaccnntntccaaggncgcagtnctcaccaaaaagggccgccctttgggcaggtcctcagggaacaggcctgccctttgtgcntcccctgggctcggctgaaacannnnnncgcctgtagcnacgctggcaaaaacccgtcatcactcccgcccctcctcanaccgggctgatgtangccgcngccctgagcagagtggacangacanccttgctcctgcacgctgctcctggcnccacanggccctgcccagccctccagcccctgttggaaaatancttttgtaaaaagtcactgccaggncccccatccttcagcccacatggncccctccaggncccacccttcccgccacactcagttactgtaagaaaagncccccagaggnttcccgcctcaaaacctcggaggcaccgtgctgaggagggccgcgggcgggtccactggcccagcgccgcctcacttcctgggncccggcccagcccacgtcaccaaagggaccctcgccggtggccgagcgtggcgcgggcccgcacggggtacagaggtcggagtcggtgtctgactctccctccgcaatgtagggcctgactttggcacaaggcgccacggccgcgtacagactgtttgagagcatccaggttctccttggactgggagatgctgaagccgctgaaggaacgctccagctcctcgtggtccacggacgggatggagatggacgtgtcgctgtcccgcaggttcccctcggggggcctgcagcccggggtgtcctcctgccgcaggaactgccatgctggcgcggttgcccccgccgtaggcggacagcgaccgctcgtgggctggcggcggcgggatgcgcaccagggagccgtggtcccccacgggggaggtgccgtggccctggcgcgggtggctctgtggctgccaggaggtggagggcggacactggacagggggcgcggccgggggcgccgagaagttcttctggcccgtggagctgctggagcgcacgatcttgacaatgcagccgtgcctgtcgacatgctcccggctgtcttccgggctgtggtacggcggcgccggctccggctctttggccccaaagtaggcctcggtctctgtcggggggatgcccatccgctgcatgtagatattcaccaggaagtccagcttcttctccatggacaagacctgcttctccaccttcccgagccgtcccatcatgctgggggtcctcgggcagctccgcctcggccgggcccttggtgcggtccttgtccgtgatcgctgggccccgccccacgatctggtccactctggactgcaggctcttaattcgggacagcatgtccaggtggccggctgagtactgctcgatgacgtccatcacgtcgtagggccgcaggctctccttgaacttccgcttggacaccaggaaccgcatgacacacacggctctgatgctgactttgaggcccggggtcaggtcctcggtcacaaactcgcaggggcagctcttgtcatccacaatgtcctctccggggaggcttgcttcttctgagttctgccgtgacgcggcacccttgatgcggaaagcctggcgtgcccggctgcggtccccgaagctccagctcttgggcaccttgctggggctgtcctcgaggctctggtcggcgctgggtgaccgcctcacagtctgggc

SEQ ID NO: 441128 - DNA, 967 bp, Homo Sapiens
  misc_feature (21)..(21): n is a, c, g, or t
gatcaacaccatcacgaacanccccgccagaaccaccacctttgagccaaggggcaggggaggattctcctgctggcggaagcagcggagcatgcaggcctcctcagagccggtagctgttcttattgccccggcagcctccatagatgaagttattgcaggagttcctctccacgtcaaagtaccagcgtgggaaggatgcacggcaaggcccagtgactgcgttggcggtgcagtattcttcatagttgaacatatcgctggagtggtcttcagaatcctgccttctgggagcacttgggacagaggaatccgctgcattcctgctggtggccaggtcacccgtggcattctctgtgacagtggcacatttcttgaggcactcctccttggtcaggtaattattgctgtttccgtcacagcccccatacacaaacagctggcaggatccgtcagtgacattgtaccaccacctaggcatggaggcccggcatctgcccaccaccttcgacaccaggcagaagtcgtggatgctgcgttctcggtcggccgccaggaccccagagaggagcagcgatcccagcagggcgagaaacgcccggctccgcctcagcccgcacagctgcgccatggccagctcagccgagacgcgcaggcgacgccaccagccgttggggtctcgcgatcaggtgcgggaagcccctcaacgcgcacgcgcaatggagcgcctcgcgttcaggtgccgacgctccgggagggtccgccaggtgccaaagcccccggaagtcgcctttccggaccttcagtgtggggacgcccggccttctcggcgcgcgatgcctgggtctgctcctcactcgcgccctcgccgcctgcgacactcaacggccctcagcgcgttcagagccgcgctacacctcccaacgcgcggagcctcgtgccgaattcgccacccaggcctcgctac

SEQ ID NO: 441129 - DNA, 1043 bp, Homo Sapiens
gatttttctggcgggcggaaagcagggggagcatgccaggcttccttcagagcgggtaactgtttcttattgcccggggcagcttccatagatgaagttattgcaggagttccttttcccacgtcaaagttcccagcgtggaaggatgcacggcaaggcccagtgactgcgttggcggtgcagtattcttcatagttgaacatatcgctggagtggtcttcagaatcctgccttctgggagcacttgggacagaggaatccgctgcattcctgctggtggccaggtcacccgtggcattctctgtgacagtggcacatttcttgaggcactcctccttggtcaggtaattattgctgtttccgtcacagcccccatacacaaacagctggcaggatccgtcagtgacattgtaccaccacctaggcatggaggcccggcatctgcccaccaccttcgacaccaggcagaagtcgtggatgctgcgttctcggtcggccgccaggaccccagagaggagcagcgatcccagcagggcgagaaacgcccggctccgcctcagcccgcacagctgcgccatggccagctcagccgagacgcgcaggcgacgccaccagccgttggggtctcgcgatcaggtgcgggaagcccctcaacgcgcacgcgcaatggagcgcctcgcgttcaggtgccgacgctccgggagggtccgccaggtgccaaagcccccggaagtcgcctttccggaccttcagtgtggggacgcccggccttctcggcgcgcgatgcctgggtctgctcctcactcgcgccctcgccgcctgcgacactcaacggccctcagcgcgttcagagccgcgctacacctcccaacgcgcggaggtcgccagagccaatggcgaacgcctattggaagcggctcccgaaggtggccgggcaggcagggggcggggcgcacctggctaggcagggcgagctgggcgcaggcgcaaagggcaggcacctgcgcgatcccgggaattccggacctgttcccgtgtggggg

SEQ ID NO: 441130 - DNA, 1713 bp, Homo Sapiens
cagtaataggacatttatttcatcttgtggattcattcaaaaagatctgaaagacgctattttgaggggtctatttctagaatgggacacctcagatagtgtcttgtgatcattttggtagggttgaaattaggactcccataaagaaagcacatgctgaaatttattctaaaggggaaggcccctttttattaaacttgtacattttactttccttctttcagaatgctaataaaaaacttttgtttatacttaaaaaaaccataaatcagacaaacaaaagaaacgattccaacatcacttctgtgatgagaaaagaggcaatggaattcaacataagcaaagaaaactctacctggaggaaagaaatcgatcagcgaggaaacaactcggggctgctgccagactgcaggccatgcgaggaggagcctcctagaggatttccaaagcaaacccatccctgccagaccaggaagcagccgtcctacctcccagagaaacagacctcagccctaatgatcactcaaatccgagtcaatccctctatttaaaaaaagctcacacatagtctcccctcccttccccagtcctcttggcgacagggcggtcacaggacatatgtgttcttcaccagctgctccttgtcatctccggagctccagacggtgcgcagggcacgctcctggttcctccgtgccacccggatcaggtagaccatggaggctcccaggaagaggatcaacaccatcacgaacagccccgccagaaccaccacctttgagccaaggggcaggggaggattctcctgctggcggaagcagcggagcatgcaggcctcctcagagcggtagctgttcttattgccccggcagcctccatagatgaagttattgcaggagttcctctccacgtcaaagtaccagcgtgggaaggatgcacggcaaggcccagtgactgcgttggcggtgcagtattcttcatagttgaacatatcgctggagtggtcttcagaatcctgccttctgggagcacttgggacagaggaatccgctgcattcctgctggtggccaggtcacccgtggcattctctgtgacagtggcacatttcttgaggcactcctccttggtcaggtaattattgctgtttccgtcacagcccccatacacaaacagctggcaggatccgtcagtgacattgtaccaccacctaggcatggaggcccggcatctgcccaccaccttcgacaccaggcagaagtcgtggatgctgcgttctcggtcggccgccaggaccccagagaggagcagcgatcccagcagggcgagaaacgcccggctccgcctcagcccgcacagctgcgccatggccagctcagccgagacgcgcaggcgacgccaccagccgttggggtctcgcgatcaggtgcgggaagcccctcacgcgcacgcgcaatggagcgcctcgcgttcaggtgccgacgctccgggagggtccgccaggtgccaagcccccggaagtcgcctttccggaccttcagtgtggggacgcccggccttctcggcgcgcgatgcctgggtctgctcctcactcgcgccctcgccgcctgcgacactcaacggccctcagcgcgttcagagccgcgctacacctcccaacgcgcggaggtcgccagagccaatggcgaacgcctattggaagcggcccccccgct

SEQ ID NO: 441131 - DNA, 1003 bp, Homo Sapiens
  misc_feature (268)..(331): n is a, c, g, or t
  misc_feature (543)..(545): n is a, c, g, or t
  misc_feature (652)..(652): n is a, c, g, or t
  misc_feature (738)..(738): n is a, c, g, or t
  misc_feature (799)..(799): n is a, c, g, or t
  misc_feature (802)..(802): n is a, c, g, or t
  misc_feature (933)..(933): n is a, c, g, or t
aatagattacccagaaaacatggaatagtctgcataaaaatcgcatgactgctaatcaagttcagcagagtcagcccggctgtgctcctgccagtctgttcctccctcatgggagtcacacaaaatgaaaatctcctagaaagaggaattcctctgatcctctgagcttcttcactatagtacgctgtcgaccttcccatgttgttcaacatcctcaactcggagcgtcactggctggaggtggtctataaatggaattggcttaacnnnnnnnnnnnnnnnnnnnnnnnnnnnnnnnnnnnnnnnnnnnnnnnnnnnnnnnnnnnnnnnncttagacggcaaagaattcacaggtcaatcgttcccttcgctttgaacttcttcgcagaccgttcacttgaccgaagctggaatttgttcccgtaaatgtaggaaataaagccatcggtttccacagtgaacacgcagtttagcttggggataactttcaggcggtcttctttggtgataattttgaaaatgtgctttgtttcctgtagaannnttcctgtaatacccacataagaggggcatttggattttgtcactgaaataatagccccgtgaagatctgcctttaagagcttggcctgaatcatttgtggctgcgtntttggcttgagcccactgcacaggtccctgatgtactgtttccagagttcatggagagggaggaaaaggctgtatctctgctgctntggtttaatgtcaaagagccgcagctccctcctttgcctggcagagaggcctttggctttnttnttcttctccttgcgcttgtggcgggtgaagtactccaggaccaccgccttgcgctgcagctggtcctcgcgggcctgcgggctcatgcggggcgtgtgcgcttcaggaaggccctcacgaaggcctcggcncgctgtgctcctgaaggctggacatcggagtcattcgcctctttttgagacaatgcatggtagatcacac

SEQ ID NO: 441132 - DNA, 1094 bp, Homo Sapiens
tttgcagcaatacctcctttatttgatccctgtttatgtccacatatgtattgtattatcacagatgcaactgatttatcatagagcactcagaaaacatggaaaagtatttttaaaaatcgaataatcctattcaagtcaaccagtgttaaccccggtgtgcttcctgccagtctgttcctccccatgggagtcacacaaaatgaaaatctcctagaaagagaaattcctctgtcctctgacttcttcacttagtacgctgcgaccttcccatgttgttcaacatcctcaactcggagcgtcactggctggaggtggtctataaatggaattggcttaactatctcttcactgaaaggtggacatttagggagtgtccagttttcagctgtcataaacaactgccttagacggcaaagaattcacaggtcaatcgttcccttcgctttgaacttcttcgcagaccgttcacttgaccgaagctggaatttgctcccgtaaatgtaggaaataaagccatcggtttccacagtgaacacgcagtttagcttggggataactttcaggcggtcttctttggtgataattttgaaaatgtgctttgtttcctgtagaaggattcctgtaatacccacataagaggggcatttggattttgtcactgaaataatagccccgtgaagatctgcctttaagagcttggcctgaatcatctgtggctgcgtgtctggcttgagcccactgcacaggtccctgatgtactgtttccagagttcatggagagggaggaaaaggctgtatctctgctgctctggtttaatgtcaaagagccgcagctccctcctttgcctggcagagaggcctttggctttcttcttcttctccttgcgcttgtggcgggtgaagtactccaggaccaccgccttgcgctgcagctggtcctcgcgggcctgcagggctcatgcggggcgtgctgcgcttcaggaaggccctcacgaaggcctcggcccgctgtgctcactgaaggctggacatcggagtcattcgcctctttctgagacaatgcatggtagatcacactcttcattctcgga

SEQ ID NO: 441133 - DNA, 1092 bp, Homo Sapiens
  misc_feature (96)..(104): n is a, c, g, or t
  misc_feature (320)..(367): n is a, c, g, or t
acccgggaggggttcaaaactgtttggtcgcgttgaaaaaaattttggaaattattcctttatctccaagtgcaacccccaggtgtttaacccccnnnnnnnnnttttcctgcccagtgctggttccttcccccgtggggagtccaccccaaaatggaaatttttcctagaaaggagaaaattcctcggtccctctgactttctccacttaagtccggctgcgaccttccccatgttgttcaacatcctcaacttggagggtcactggctggaggtggtctataaatgggaattggcttaactatctcttcactgaaagnnnnnnnnnnnnnnnnnnnnnnnnnnnnnnnnnnnnnnnnnnnnnnnncttagacggcaaagaattcacaggtcaatcgttcccttcgctttgaacttcttcgcagaccgttcacttgaccgaagctggaatttgctcccgtaaatgtaggaaataaagccatcggtttccacagtgaacacgcagtttagcttggggataactttcaggcggtcttctttggtgataattttgaaaatgtgctttgtttcctgtagaaggattcctgtaatacccacataagaggggcatttggattttgtcactgaaataatagccccgtgaagatctgcctttaagagcttggcctgaatcatctgtggctgcgtgtctggcttgagcccactgcacaggtccctgatgtactgtttccagagttcatggagagggaggaaaaggctgtatctctgctgctctggtttaatgtcaaagagccgcagctccctcctttgcctggcagagaggcctttggctttcttcttcttctccttgcgcttgtggcgggtgaagtactccaggaccaccgccttgcgctgcagctggtcctcgcgggcctgcgggctcatgcggggcgtgctgcgcttcaggaaggccctcacgaaggcctcggcccgctgtgctcctgaaggctggacatcggagtcattcgcctctttctgagacaatgcatggtagatcacactcttcattctcggaccgccctcgtgccgaattcgccacccaggcctcgctac

SEQ ID NO: 441134 - DNA, 1498 bp, Homo Sapiens
  misc_feature (72)..(72): n is a, c, g, or t
  misc_feature (185)..(197): n is a, c, g, or t
  misc_feature (226)..(226): n is a, c, g, or t
  misc_feature (256)..(316): n is a, c, g, or t
tcgcgccgccggggggtgtgttattcttgggggcggaggagaaaacacaacccaactcttttgttgtgggcncgcggatgtctctttgtggggaagaaaaattatttacccatttgtttttgttttgtggtagggggggccgccccctcccaaacaaaaaaaattttagaaaagatttttttgannnnnnnnnnnnncgccgaaaaaaatagcaaagtataggtcnagtgaaatccgcgcgacccaggagagggcnnnnnnnnnnnnnnnnnnnnnnnnnnnnnnnnnnnnnnnnnnnnnnnnnnnnnnnnnnnnncaaggtggggaggaagggcggaagaaaagatgatatggggggtttgttttttacacttaatattttatttaacatgttatccaaccacttctaaaacagcctccatggcacggtatggaatagagcagtgattctggcacaggaaatggtctccaaaatctcaaaatatcagatctctaccttgtcaagtcatctattaagttcaatgttcaagattatcaagcatacagccccactcttctactgtaagcaatggatgggctagagagatgtcaaatcaacatgggtactgccatgcccttaggatagcatctgtcctcaaagctgaaagcagccattgcccctctttgctgtcttccaaaaactccccagacaggccaatggctgattgtggacaaattcaccagaatctggttccgtagctacagtagaaggctaagtatctggtttctgatctcaatggttcagaatcctgagcctgaggtgactctcccagagccttgctcacagcaacaatctcactacctcttgacaacgttccgtggcacttcaaatttgcctctgcagctagagcatgtctctttcacatccagccatctgcacccatgcagaatagctgctcacactagcccaggagtcctcagggtcttctacagttctgcacccaggaagaatggaggaggcagaaggtacttgtcacccttcctggctagttgttgtgaagtccatcactcaattccagaggaattcagttctagaggaaaccttttctacaaagagcagcagatgggaatcaggcaaggatcaagactcagacagtcgcttctgaatttcagccacaaaattttcccgtttaatggccacctcctctctgctggccactgaacggatcttgatgaccccttctttcagttcttgctcaccaataatgaccaccagtggaatgcctgtgctctcacaatagtgcagctgggttaatagtttggggttgttcttgtatagcatctctgccttgattccagaatcccaaagctctgcaataagcttcaaccgttcttggagaaagttcttctgtggtgtggccacaaacacttgagtctctgtagtccgcaccttctcacctttggtcttcatcctctgctccacaatgtagaagattcgctcaaccccaatgctgatccc

SEQ ID NO: 441135 - DNA, 1133 bp, Homo Sapiens
  misc_feature (576)..(576): n is a, c, g, or t
  misc_feature (613)..(613): n is a, c, g, or t
  misc_feature (633)..(633): n is a, c, g, or t
  misc_feature (644)..(644): n is a, c, g, or t
  misc_feature (761)..(761): n is a, c, g, or t
  misc_feature (806)..(853): n is a, c, g, or t
  misc_feature (896)..(896): n is a, c, g, or t
  misc_feature (899)..(899): n is a, c, g, or t
  misc_feature (904)..(904): n is a, c, g, or t
  misc_feature (972)..(972): n is a, c, g, or t
  misc_feature (981)..(981): n is a, c, g, or t
  misc_feature (988)..(988): n is a, c, g, or t
  misc_feature (994)..(994): n is a, c, g, or t
  misc_feature (1006)..(1006): n is a, c, g, or t
  misc_feature (1017)..(1017): n is a, c, g, or t
  misc_feature (1020)..(1020): n is a, c, g, or t
  misc_feature (1025)..(1025): n is a, c, g, or t
  misc_feature (1028)..(1028): n is a, c, g, or t
  misc_feature (1032)..(1032): n is a, c, g, or t
  misc_feature (1037)..(1037): n is a, c, g, or t
  misc_feature (1042)..(1042): n is a, c, g, or t
  misc_feature (1066)..(1066): n is a, c, g, or t
  misc_feature (1074)..(1074): n is a, c, g, or t
  misc_feature (1077)..(1078): n is a, c, g, or t
  misc_feature (1088)..(1088): n is a, c, g, or t
  misc_feature (1095)..(1096): n is a, c, g, or t
  misc_feature (1099)..(1100): n is a, c, g, or t
  misc_feature (1107)..(1107): n is a, c, g, or t
  misc_feature (1111)..(1112): n is a, c, g, or t
  misc_feature (1114)..(1114): n is a, c, g, or t
  misc_feature (1117)..(1117): n is a, c, g, or t
  misc_feature (1126)..(1126): n is a, c, g, or t
aattttaaaatgttcttttttggtcagtagtcttagtaagagatttatatgaaaagaggtaggagtatataaatagggtgttaaatatatcatgtcaccaaaaaatttacccgagaaatagaagtttaaaagcaattttaaaaaaccttcaatcaacaatatataaataacttaatctgaggtaagagggaaaaatgccctgcaaacactttaggaaaaacacatctctgccacactacagaaatagacctttaccacatcttctggaatcccagttccctccatctaccaaagattttgggcaccagaactaaagatgagaatctctcccacccctaccacttccaggtaaacacaaagttcatgttcagccaggctaaagtacaagaaaactgaacccactctccatcccaccccatcctaggataggtggggccagggcagaaatcatggaatgctcaggactccacccctcccaagtgcactgaggtaagttctggaactggggcttcctcccaacaaggcactcacctcctctggggagttcattcacctcctctcccttcctcaaagganaatgtttaatctctgaaattcctcttgccttgtcagnagcaaccatctggctgccantccaaccagtnctcaaaagaactcagcctccaaccctgaccccaaatctgtccaacctggttctatagtgtcttccatctgaccgagctctagagtgacagctccatatcagagcatcatcgctcaanacccctgcctcaggccaagacccaaatgtcttctcctgggagggnnnnnnnnnnnnnnnnnnnnnnnnnnnnnnnnnnnnnnnnnnnnnnnnctcaagagggagaaaagattctgaatcggtgttctggtttgtncanctgtnttttaaaccccctttctgttttggtatttttaacgtcccatcacacagtagagctgaatgctagaggnggtagaatnagaacanagtttngccagtggctgnctgcttcctancancctgnggnagancctgncaaancactgcagttccggctctgtgggngttcccantcnngtccttagtntctgttnncgnnagtccanaaanngnaanaaaggtggnatccaaa

SEQ ID NO: 441136 - DNA, 1001 bp, Homo Sapiens
  misc_feature (526)..(526): n is a, c, g, or t
  misc_feature (574)..(574): n is a, c, g, or t
  misc_feature (587)..(587): n is a, c, g, or t
tctggaactgagcttcctcccaacaagcccactcacctcctctgggagttcattcacctcctctcccttcctcaaaggacaatgtttaatctctgaaattcctcttgccttgtccaagagccaccatctggctgccactccaaccagtcctcaaaagaactcagcctccaaccctgaccccaaatctgtccaacctggttctatagtgtcttccatctgaccgagctctagagtgacagctccatatcagagcatcatcgctcaacacccctgcctcaggccaagacccaaatgtcttctcctgggagggaaagggagaaaaaaatcaaaaatcaataataaagtattttgcaaaaactcaagagggagaaaagattctgaatcggtgttctggtttgtgcagctgttttttaaaccctctttctgttttggtatttttaacgtcccatcacacagtagagctgaatgctagaggaggtagattcagaacagagtcttggccagtggctgcctgcttcccctaccnagcctgcggaagcaccttgccaaaagcactgcagtcccccggctctgnctggctgtgcccnagtccctggtccttaagtgtcctgtctgccgcagagtccccagaaacaggaaagaaaggtgagaaatccaaaaggtgagcggagctgcattcactctggatagtctgggccaggagctcaggccgtttgctctgcactggtgccagctgtgaccaagtactgactgggctttgctagcatccctgggccagtgctgtctgccccaatcggccacagcaggtagcatcagcttttcctgcactgtggtatggaaagtaacaaggagctgccacagtgtctctcttgagcagcctgggcctgcatctcagcagcaccatcttgacggtgagatgctacctaccaaggaaggaagccagtctggctataaccagtggctgccgtttgatgaaagagctcaggagctgaggtgggaat

SEQ ID NO: 441137 - DNA, 1085 bp, Homo Sapiens
  misc_feature (13)..(14): n is a, c, g, or t
  misc_feature (18)..(19): n is a, c, g, or t
  misc_feature (26)..(27): n is a, c, g, or t
  misc_feature (30)..(31): n is a, c, g, or t
  misc_feature (36)..(36): n is a, c, g, or t
  misc_feature (44)..(44): n is a, c, g, or t
  misc_feature (50)..(50): n is a, c, g, or t
  misc_feature (60)..(60): n is a, c, g, or t
  misc_feature (84)..(84): n is a, c, g, or t
  misc_feature (103)..(103): n is a, c, g, or t
  misc_feature (155)..(155): n is a, c, g, or t
ttcagtatctcanncagnnccacagnngtnnccatntactcaanatttcnttatttgaanaatccaatctcataaccttcacangcatgaaggccttctctcntgcaatggaaattcaaatcaaaaggagaggccaagttcagagagttcagctntgcccagtagaagttcagtttctaaacgttttgctctccacaccattgagaccaccaacactccctgcttgtctggcacctgcatgttggtctttctgcttattgggctgtaggtccatatcgtcatcatcttcaataactcctccttgtggcgactaggagtgtaggatgttgaggggactgactcgagccttggtttgcattaacataggcttcttttacccacgtagattccccaggcaccggaacacaatagaaagtctgtctttccaaagtggtatttcgtggagagtttaaatcaagttcttgttgaggcccacactctgctacatctctatattttccaaaatgaagaacatgtgcttttgtgttttggttaaccgtttcataaactcccatgtaaaactcagggtcaaacatatcctgaatcatgcaacgaaatttcacaaaactattaggtttcaaataatgaaggggaacttcgttcagtgatggtacccacttaggagcattattttccttcagcttttccttaaaatactcaattactttcttctcccagtcaggattaactccattttgggcgaagaatccctgcacgattcccagcgggtggctgagccaatcctccccacacggcatctcgccaggggccggggccggcgaagaccgggcggaggcgatccgcgggccgagcgcggccgggcggccggcgcccagctcctcttcagcggctcggccgctcctcgcccgcgttcgctcgcgccctcccacgcacagcgagccgcggggcgcgggcctcccgcgcctcagggagcggcggctgcggtggggccgccgaggagctgctggcgacagtcaggcgggcgcgtacgggcccctagccttcacttcgcacaatggcgggaaatagccgccgccgaccgcgct

SEQ ID NO: 441138 - DNA, 1619 bp, Homo Sapiens
  misc_feature (759)..(759): n is a, c, g, or t
  misc_feature (1087)..(1099): n is a, c, g, or t
  misc_feature (1112)..(1112): n is a, c, g, or t
  misc_feature (1118)..(1118): n is a, c, g, or t
  misc_feature (1120)..(1120): n is a, c, g, or t
  misc_feature (1144)..(1144): n is a, c, g, or t
  misc_feature (1151)..(1151): n is a, c, g, or t
  misc_feature (1164)..(1164): n is a, c, g, or t
  misc_feature (1195)..(1195): n is a, c, g, or t
  misc_feature (1215)..(1215): n is a, c, g, or t
  misc_feature (1226)..(1226): n is a, c, g, or t
  misc_feature (1228)..(1228): n is a, c, g, or t
  misc_feature (1232)..(1233): n is a, c, g, or t
  misc_feature (1235)..(1236): n is a, c, g, or t
  misc_feature (1239)..(1239): n is a, c, g, or t
  misc_feature (1247)..(1247): n is a, c, g, or t
  misc_feature (1255)..(1255): n is a, c, g, or t
  misc_feature (1258)..(1259): n is a, c, g, or t
  misc_feature (1263)..(1263): n is a, c, g, or t
  misc_feature (1265)..(1265): n is a, c, g, or t
  misc_feature (1268)..(1268): n is a, c, g, or t
  misc_feature (1270)..(1270): n is a, c, g, or t
  misc_feature (1274)..(1275): n is a, c, g, or t
  misc_feature (1277)..(1279): n is a, c, g, or t
  misc_feature (1285)..(1286): n is a, c, g, or t
  misc_feature (1289)..(1289): n is a, c, g, or t
  misc_feature (1291)..(1291): n is a, c, g, or t
  misc_feature (1293)..(1293): n is a, c, g, or t
  misc_feature (1296)..(1296): n is a, c, g, or t
  misc_feature (1300)..(1300): n is a, c, g, or t
  misc_feature (1504)..(1504): n is a, c, g, or t
  misc_feature (1528)..(1528): n is a, c, g, or t
  misc_feature (1617)..(1617): n is a, c, g, or t
gaaatggaggcatgtatatctgtacttccaacagtaagtggaaacacagatattcaagttgagatagcactggccatgcaaccattaagaagtgagaatgctcagttacgaaggcagttgagaattttgaaccagcaactcagagaacaacagaaaactcaaaaaccatctggtgctgtggattgcaaccttgaattgttttctcttcagtcattgaatatgtcactgcaaaatcaattggaggagtcactaaagagccaggaattactgcagagtaaaaatgaagagctgttaaaagtgattgaaaatcagaaagatgaaaacaaaaaatttagtagtatatttaaagacaaagatcaaactatacttgaaaataaacagcaatatgatattgagataacaagaataaaaattgaattggaggaagccctagtcaatgtgaaaagctcccagtttaagttagaaactgctgaaaaggaaaaccagatattggggataacattacgtcagcgtgatgctgaggtgactcgactaagagaattaaccagaactttacagactagcatggcaaagcttctctccgatcttagtgtggacagtgctcgctgcaagcctgggaataaccttaccaaatcactcttgaacattcatgataaacaacttcaacatgacccagctcctgctcacacttccataattagctatctaaataagttagacacaaattacagttttacacattcagagccactttctacnaattaaaaatgagggaaccatagagccagacaaaacctatgaaaatgttctgtcctccagaggccctcaaaatagtaacactaggggcatggaggaagcatctgcacctggaattatttctgccctttcaaaacaggattctgatgaagggagtgaaactatggctttaatagaagatgagcataatttggataatacaatttacattccttttgctagaagcactcctgaaaagaaatcaccactttctaagagactatcccctcagccacaaataagagcagctacaacacagctagtcagcaacagtggacttgctgtctctggnnnnnnnnnnnnncagagaacaccanaaaaananaaccccttcaacaaaggaagcagnagatgcncctgaaaaacaanccagagcaactgaaaagaaggacacacagcncctcaagaaaataaaggaancaaatggaaanancccnncnnccnccaaggancccgaggnacnnaccncncgncntggnncnnnagggtnnctnancnacngccntcaagtgaaaggcaatactgtctgtgatggtagtgttttcacttctgacttgatgtctgactggagcatctcttcgttttcaacgttcacttctcgtgatgaacaagacttcagaaatggccttgcggcattagatgccaacatagctagactccagaagtctttaaggactggtcttctggagaaatgaattcagaagaaaantcatcaggtgcttctttttaaaantagaacttggctatattgaatgtgtatttttctttagtgaaatgatgttttatgttattatgtgtgaagtaatatattatacaagtaanaa

SEQ ID NO: 441139 - DNA, 1240 bp, Homo Sapiens
  misc_feature (876)..(876): n is a, c, g, or t
  misc_feature (1235)..(1235): n is a, c, g, or t
cacccctctacacgctgggcgtcacctacccggatgagaacgtcgattccagctgctcgcccgtctacacttgccatcttctacacagcggccatcctgggtccagctgccggctacctgattggaggtgccctgctgaatatctacacggaaatgtggcctgacgtgacggacgtctgaccaccgagatgcccactgtgggtcggcgcctggtggtgtcgtgcttcctgggctctggggccgctgctttcttcaccgccgttcccatccttggttaccctcggcagctgccaggctcccagcgctacgcggttcatgagagcggcggaaatgcaccagttgaaggacagcagccgtggggaggcgagcaacccggactttgggaaaaccatcagagacctgcctctctccatctggctcctgctgaagaaccccacgttcatcctgctctgcctggccggggccaccgaggccactctcatcaccggcatgtccacgttcagccccaagttcttggagtcccagttcagcctgagtgcctcagaagctgccaccttgtttgggtacctggtggtgccagcgggtggtggcggcaccttcctgggcggcttctttgtgaacaagctcaggctccggggctccgcggtcatcaagttctgcctgttctgcaccgttgtcagcctgctgggcatcctcgtcttctcactgcactgccccagtgtgcccatggcgggcgtcacagccagctacggcgggagcctcctgcccgaaggccacctgaacctaacggctccctgcaacgctgcctgcagctgccagccagaacactacagccctgtgtgcggctcggacggcctcatgtacttctcactgtgnccacgcagggtgccctgcagccacggagacgaaatgtggacggccagaaggtgagtggagccgctgcctaccgcccctgtcctcccctggaccctgggaaggggccccgtgccttccccttgtaatcggagctattgttgggcttcccaggtgtaccgagactgtagctgtatccctcagaatctttcctctggttttggccatgccactgcagggaaatgcacttcaacttgtcagagaaagcccctccttctggttttcatattcgttgtaattttctttacattcctcagcagcattcctgcactaacggcaactctacggtaagctggggtcgggtgtgcgctgtccagagcttncttgc

SEQ ID NO: 441140 - DNA, 1382 bp, Homo Sapiens
gaagaaatgagtgaagatgaagaacgagaaaatgaaaaccacctcttggttggttcaacttttccagttccagagtcacggttcgaccgagattccggggagagtgaagaagcagaggaagaagtgggtgagggaacgccgcagagcagcgccctgacagagggcgactatgtgcccgactcccctgccctgttgcccatcgagctcaagcaggagctgcccaagtacctgccggccctgcagggctgccggagcgtcgaggagttccagtgcctgaacaggatcgaggagggcacctatggagtggtctacagagcaaaagacaagaaaacagatgaaattgtggctctaaagcggctgaagatggagaaggagaaggagggcttcccgatcacgtccctgagggagatcaacaccatcctcaaggcccagcatcccaacattgtcaccgttagagtgagcatggccccaccacgcctggccccgggtggaaggcttttccgacagggccccgtgctgtcctggggccgggtgcttcctacactctcctgcacttagtggagcccttcacagaccacacagaagcaagtatttgcctcccgggtggcaccggaggtccttactgtccctcagcatctgcgcccgggtgcaggggtgggtgggggcctggaggtgcccagcacccacagagccgtgccctgcaggagattgtggtgggcagcaacatggacaagatctacatcgtgatgaactatgtggagcacgacctcaagagcctgatggagaccatgaaacagcccttcctgccaggtacagccgcgccccaggggcctgtctgcgtacaagtgggggcagggtcctggtcacccccgcggtgacagtgctgcagggagggccagctgcatccacagggaaagccctgagaagcctctgttgctgccgaggcgagtgggccaccctgagtgccctgggctgggggcagccaggtccacatgggagcttccctccctcccaggggaggtgaagaccctgatgatccagctgctgcgtggggtgaaacacctgcacgacaactggatcctgcaccgtgacctcaagacgttcaacctgctgctgagccacgccggcatcctcaaggtgggtgacttcgggctggcgcgggagtacggatcccctctgaaggcctacaccccggtcgtggtgaccctgtggtaccgtgccccagagctgctgcttggtgccaaggaatacttcaacggtcgttgacatgtggtcagtgggttgcatctttggtgagctgctgactcagaacccttgttccccgggaagtagaaatcgatcagatcaacaaggtgttcaaagatctggggacccctattgag

SEQ ID NO: 441141 - DNA, 394 bp, Homo Sapiens
  misc_feature (74)..(99): n is a, c, g, or t
cctcgaagaatattttaatacattttaaaactcaacaaccttgtataaaaacctgtcgagtctgctggcacagnnnnnnnnnnnnnnnnnnnnnnnnnncctgtgtggacagggctggtctggacgagtgggttggggcaagagggcatcgctcatcccaacacagaaacaggtctccagctccgaagattaaacaatccacccggctcccaccagttcctttccaaatcacggcccagccagccccgtgcgtgtcgagagtgggagagggtggtgttgaggtttgtgctgccccacgtgggcacccgaagatgcccaccctttccgccctgggcaagtcacggagaaaacacagctctttcctccacaacaaggaaaatgatttaattctaca

SEQ ID NO: 441142 - DNA, 291 bp, Homo Sapiens
gctccacaacaaggaaaatgatttaattctacaaatttacaaaccaaaatacaaaaacaaaacatggagcacaaagtaagacgaggagttccgagtctcatcgcagctccagccgcagtagccacgcctgtggtcccggctgagttctccccatgacggggtccactctgaccttcagaacttgaggctgaagccggggcccgcggcagaggccccctggttcgtggtggtaaggtggaagcccgtccccttctgtcgtcttctcgcagccgtatagtagtagtagtaggc

SEQ ID NO: 441143 - DNA, 2121 bp, Homo Sapiens
  misc_feature (81)..(107): n is a, c, g, or t
tttttttcctcgaaaaatattttaatacattttaaaactcaacaaccttgtataaaaacctgtcgagtctgctggcacagnnnnnnnnnnnnnnnnnnnnnnnnnnncctgtgtggacagggctggtctggacgagtgggttggggcaagagggcatcgctcatcccaacacagaaacaggtctccagctccgaagattaaacaatccacccggctcccaccagttcctttccaaatcacggcccagccagccccgtgcgtgtcgagagtgggagagggtgtgtggaggtttgtgctgccccacgtgggcacccgaagatgccctggcaagtcacggagaaaacacagctctttcctccacaacaaggaaaatgatttaattctacaaatttacaaaccaaaatacaaaaacaaaacatggagcacaaagtaagacgaggagttccgagtctcatcgcagctccagccgcagtagccacgcctgtggtcccggctgagttctccccatgacggggtccactctgaccttcagaacttgaggctgaagccggggcccgcggcagaggcccccctggttcgtggtggtaaggtggaagcccgtctccttcaggtcgtcgtcacccagttggctgtaggccaggcctccctcagggggcctcgggctgtgtgccccgcttcacacgctgctgctcgctcttggcgggccacgtggggaacatggaggggtcgatcgggaggggggtctcgcggaaatactcatgcttgaggccgtcctcagcgctgatcctcctcccggggaagtaggtcaggaacttgttcatgaggtcgaagccctggtctgagagctagagccccgaagcgcttgcggaggttgttgtaggggtgctcgctgaaggtcatcttcttgactactgggagctcactgtagccgggccagattttctcactgggggtccccagctcctgaaagatagaggtgcttcaacagcgctgaccaagtggccgggaaagtaggttggcacctgtgtcccgtgagataagacaagccacctggagggctctcagtggccctggtgcccttgctcaacgcagcagctgtgcgcgccgcagccccattcttgcaactcctgggagatcgctatagcgggccacttgccgcagggccagacccaccttgaacaccttgttgatctgatcgatttctgacttcccggggaacagaggcttctgagtcagcagctccccgaagatgcagcccactgaccacatgtccacggccgtggagtattccttggcaccaagcagcagctctggggcgcggtaccactgggtcaccacgaccggggtgtaggccttcagaggggatccgtactcccgcgccagcccgaagtcacccaccttgaggatgccggcgtggctcagcagcaggttggacgtcttgaggtcacggtgcaggatccagttgtcgtgcaggtgtttcaccccacgcagcagctggatcatcagggtcttcacctcccctggcaggaagggctgtttcatggtctccatcaggctcttgaggtcgtgctccacatagttcatcacgatgtagatcttgtccatgttgctgcccaccacaatctctctaacggtgacgatgttgggatgctgggccttgaggatggtgttgatctccctcagcgacgtgatcgggaagccctccttctccttctccatcttcagccgctttagagccacaatttcatctgttttcttgtcttttgctctgtagaccactccataggtgccctcctcgatcctgttcaggcactggaactcctcgacgctccggcagccctgcagggccggcaggtacttgggcagctcctgcttgagctcgatgggcgacagggcaggggagtcgggcacatagtcgccctctgtcagggcgctgctctgcggcgttccctcacccacttcttcctctgcttcttcactctccccggaatctcggtcgaaccgtgactctggaacaaccaagaggtggttttcattttctcgttcttcatcttcactcatttcttcctcacttacttcttcggcagactgctctgatgcctcctcagagttgctgccggt

SEQ ID NO: 441144 - DNA, 1015 bp, Homo Sapiens
  misc_feature (355)..(363): n is a, c, g, or t
  misc_feature (402)..(402): n is a, c, g, or t
  misc_feature (440)..(448): n is a, c, g, or t
  misc_feature (477)..(477): n is a, c, g, or t
  misc_feature (510)..(510): n is a, c, g, or t
  misc_feature (517)..(517): n is a, c, g, or t
  misc_feature (923)..(923): n is a, c, g, or t
  misc_feature (962)..(963): n is a, c, g, or t
  misc_feature (973)..(973): n is a, c, g, or t
  misc_feature (981)..(982): n is a, c, g, or t
  misc_feature (985)..(985): n is a, c, g, or t
  misc_feature (989)..(990): n is a, c, g, or t
  misc_feature (994)..(994): n is a, c, g, or t
  misc_feature (996)..(996): n is a, c, g, or t
  misc_feature (1005)..(1005): n is a, c, g, or t
agggctgaatcctcaactaaaattttatttccttgtgctgaatagaacacatacagatccatattaaaaacagtcatcatattaggcaaattcaatctgtcaatgtagttttagtccagaaccaaaccagtgatagttaggaattacagagttaccaaccaaactgatttgctttcctggtggttctttgtgtaacagatgagagaaataaagtggcagagtaccagtgaacatttggagaaaatacctaattattttcttcctaacccaagttagccactgaatagtcatctcagaatagtcacctcatcccagttggcccattaggttcctgtgtgcttcatcttctgggagnnnnnnnnnccttatatcattccttatttcagatgtaagatgccaggngagttattttccacaaatttcttaagctcattactggnnnnnnnnntttctcaaaacttttagtaatgaatgagngtacaagcagcaattggatattaatcccatggngcaaggntttcctgcaaagtacctttaatgtgtttaaatcagcagcaagcattaggacatgctattttggccccataagttaggtgtgtagcactacacattagacaccaagtcatcccaaccaatatttatccatatgaacagataaactgaacaaaaacatagttctgataaaacctgcattcacaacctaatgtagtttaaagtaaattttttcacaattgagggctgctatttaggactgttttgttaataataaaaacaggaattatatagaagataaaacaccattttttactgctatataatgtcttgctatataaaacataccctcaacaagtcaaaatatttaaaaccagtgtttcaaataccaaaaatcacagctatgttactgttcagtaactccactccanataaatgttagtactgcattcttgaaggaaaaaaactgnngccaaggcancccccctnncgnttgnntcanantttaaaganagaccctaaa

SEQ ID NO: 441145 - DNA, 2127 bp, Homo Sapiens
  misc_feature (137)..(137): n is a, c, g, or t
  misc_feature (191)..(191): n is a, c, g, or t
  misc_feature (204)..(204): n is a, c, g, or t
  misc_feature (206)..(206): n is a, c, g, or t
gaaaaggtacctttttaaaggggggtttaaattccagccaagcaaaagcatttagggaacatggctattttggggcccccataagtttaggttgggtagcacttccacatttggacacccaagtcatcccaaaccanatatttatccatatgaacagataaactgaacaaaaacatagttctgataaaacntgcattcacaacntnaatgtagtttaaagtaaattttttcacaattgagggctgctatttaggactgttttgttaataataaaaacaggaattatatagaagataaaacaccattttttactgctatataatgtcttgctatataaaacataccctcaacaagtcaaaatatttaaaaccagtgtttcaaataccaaaaatcacagctatgttactgttcagtaactccactcaaataaatgttagtactgcattcttgaaggaaaaaaactgcagccaaggcaagaactctgaagtttgcactcagagtttaaaagacagacccctactctgcaaactgaagactgccactctgcttcaataactccagcctgccacattttacttcaattggtaaagcactctgctgagaatataaaaagttataaaaaggcaatcataaaagattaaatattggtaggcatgtaagcttccttttaataaaaacaaaaatagtcaatgtcatctatttaaataagtatcctttgttatagagtgttccagttattgaaaaagggcccttaaaaaacccaactgtctacatctttaaaccctaccccttttaccccatagtacacatttgagggaagagtcatttaatgtgcaaattggcaaaacaaatgtggaggagaggggacttcttgaaatgatgtgcccaatcaattcttggtttattcttttccaaaaagtaaaataaccaaagtcttaaaagtacacaaaacagaccttcatctttgcattcctttccaaataaacccaaaaagtatgtacagcatgtttaatagtatgcaatatgcaaaagctttgtgttgctgttagcaacatctatacccacccaccctctttattcacaagtgtacctctgctaaccataattacatcactaagcctgttagtttgagagggtcttaaatttgttaaaactggaaaatctttgtatagtgggctccattcatttgactcaaggttatagacttccaccgtattcagaaattcattgccatcgaatcctcccactgcataaatggtgttccctacagttgcaatcccatcattgctccttggtgaatgtcatatttcccatcatcttccattcatttctagttggatcatacatttccacacaactgatggcatgagaaccatcaaagccaccacatacaaacagtttttccattaagaacagccactccagctcctcgcctagccacattcatgggtgcaattaaagtccaggtattattttcaaggattgtatcgttctactgtgttcagacaattccaagattctgcacctccgattgtgtacaaataaccaccaagctcacagactgcagactggtgtctccgaatgttacagaggggcacagcttgtccacaactttgttacaggatcaaatacatcacaatttttcagtcctttttgaccatatggatcagagccaccaacgatgtataactttccattcagagcacacactcctgcattacaacggttagttctcaattctggaacaggaatccagtcatctatgtttgaatcatacatctctccacaactcaggtcatctgagtggccatttgatccacctaccacatagagctggcccatgagtacagccatttgaaatcgggctcttggtgttctcatgggagcaagaaaggaccagtgatctgtatgtggattatagcattcgactgttcgaagacattcctctctgttatagccacctgcagctatgagtttgccattcatctctgctgttcccagaccagatcgtgcgtactgcataggagacatgggcttttcgattagctcatcttgttgcatctcaaagcttaaactcttacttagttttggagtacttgttggtgagctctgtgggctgtttctccc

SEQ ID NO: 441146 - DNA, 858 bp, Homo Sapiens
  misc_feature (666)..(666): n is a, c, g, or t
  misc_feature (672)..(672): n is a, c, g, or t
  misc_feature (678)..(678): n is a, c, g, or t
  misc_feature (687)..(687): n is a, c, g, or t
  misc_feature (689)..(689): n is a, c, g, or t
  misc_feature (708)..(708): n is a, c, g, or t
  misc_feature (718)..(718): n is a, c, g, or t
  misc_feature (725)..(725): n is a, c, g, or t
  misc_feature (735)..(738): n is a, c, g, or t
  misc_feature (763)..(763): n is a, c, g, or t
  misc_feature (776)..(776): n is a, c, g, or t
  misc_feature (798)..(814): n is a, c, g, or t
  misc_feature (833)..(835): n is a, c, g, or t
  misc_feature (838)..(840): n is a, c, g, or t
  misc_feature (842)..(843): n is a, c, g, or t
  misc_feature (846)..(846): n is a, c, g, or t
cttctactccctttataataaataggctacagcatggggaacaagctgagggtactaagtggcctagaaatctaaattacagttttatgtgctatccatcaaaattgtggattaaatggcacctgagtgacagaaatcagccaacaatgtctactaagcatcaatgtgcaaacgatattattatttatttagaatatcaaaatactgatacaatctgaatgtctcataaaggaggaagggtgaatagtatagagtcatagaatgggatgttaagccccattgcaaattatattttttaaatatttaatggcataagatactattttaaatgtatacatgaaaagaaggctgctcggatgcatttgtagtatgatcccagctttatttaaagattgcaagtaatgtctataaagacgaaaagactggaagcaaattagtaaaaatgttcatgattgttatcaataaatgatatgatttaaggtaattttcatattttctctttgcttttaagcattttcagaatgttttataatgagccaatctgactgttctaaattgaagctagtggtaattagtaaagagaaaagggcatcttggtaagaaccttggggaaataagaggaacaagtagataggacacctaccctcaattcaaatgtatagaatnaaatancaaaancaataccanangccgaacaaaaacgaaaanacctataaanatacagnaatttgggannnnaaggcgggtggatcatgaggtcaanagattgagaccancctgaacaaaaatagtagaaannnnnnnnnnnnnnnnncccccacacacaccccccnnnggnnntnnccngacctaaaaaac

SEQ ID NO: 441147 - DNA, 930 bp, Homo Sapiens
agtttcttaatagctgcgtctcgttcctttccaaagggctcagaatcatactcaattgaaagtttagtaatgttccattccttgaaaagcctgggaaacacatctgctggttgtccacggatcacaaacagacgggagtttaattttcgtagattggcatcaagatcctcaagactctgaagctcatatcgccacctgttgatgcccacattggaggagccggctgaatccaggggtccaggatgtagacgcatcggatgttgtcggcgccctgtatgcactccttcagggctggggttgtctgtggagccggagcccctttcggaaccagtgcacggctgttcacccccatgccggggggcgcgtcgggtcctccacggagaaattcaaggaaggaggctccggctcatagccgacaccttcgcttccaagagaattgcctcacccggggcgtgaggaaagggcggcagagggggaacaggaaaatatgactccgaggaggggaccggagaaggcgggggcgctggaggcgcagtggaaagatgaatggaggttgcctagtcggcggagtccgggtgtgacgccctttaggagcccgcgcccgccgcaaccgcctggaggcgacgcataacttcgagggcctcggacctccggagcctgagcaagttccaggagctcgagtcgccacgacggcccgagccggcacggacggccccaggagattcgtcacggaaacctcagccccaccaaggcggcccctaaagacaaaacggcccgcccgaggtgagtcaccgaggagaaccggaggggaatgagcccctgtcggcgacgctgtcatctcggcccgggagaaaggaccgggaacggaggctagaggcggtggtcgaggccgctggacatcccgggaattccggaccggtaccagcctgc

SEQ ID NO: 441148 - DNA, 939 bp, Homo Sapiens
  misc_feature (686)..(730): n is a, c, g, or t
  misc_feature (862)..(898): n is a, c, g, or t
tatgttttttgtatgctggctctctgtttaaggttgtgtatcctacgtgctcataaattgggtttatcgtcatcttggcaatgtattctgctgccttggtttcaatatagagagtaatcaagccatcagtcaccagatcgtggatggactcaaagcgtttctccccaacaaagtgcttgccatcgtagtagagcctgaagtttctggtttgacttccaaatcttaaagccaaagtgtaggtccctggctgccgctggctctcccggatgaggtagctcccctcagccacaatcaagagctggtcggctgcttctctggagatcatgccatgaaactctcttccataatactttggtctgttttccacctcgcaagtacaggtaattcttcgaggatgaggggcttcctgttgtagctgatataagtaagatttccaaacaggaggtctatattcatctgtatcaaacagggtcagggccattgtaaaggcgctcgccgccgcccgcgagtccaggcgctcctcccaggcgggctagggatcacctcatcagcccgccgcacccacacctcggagagagtggggtgcccgatggggcgtgctgggggcgccggcgcccggggaggctgcaggccgggacgcgggggaccgctgcgaggcaggaggcttggccgcggcgcagtggctnnnnnnnnnnnnnnnnnnnnnnnnnnnnnnnnnnnnnnnnnnnnnggagagcagcagcagcctcgcacagcccccggcggggcgcgctcactccgcatcccgcggcctcgcagacgccatcttgcgatagcgcctcccgctctcgacgaattcgagctcggccgatttggcctgatnnnnnnnnnnnnnnnnnnnnnnnnnnnnnnnnnnnnncggccgccccgcgtgagctccattcgccatagtatcaaact

SEQ ID NO: 441149 - DNA, 1612 bp, Homo Sapiens
  misc_feature (13)..(13): n is a, c, g, or t
  misc_feature (335)..(335): n is a, c, g, or t
  misc_feature (1016)..(1016): n is a, c, g, or t
  misc_feature (1173)..(1173): n is a, c, g, or t
  misc_feature (1236)..(1236): n is a, c, g, or t
  misc_feature (1265)..(1265): n is a, c, g, or t
  misc_feature (1271)..(1271): n is a, c, g, or t
  misc_feature (1274)..(1274): n is a, c, g, or t
  misc_feature (1276)..(1276): n is a, c, g, or t
  misc_feature (1279)..(1279): n is a, c, g, or t
  misc_feature (1283)..(1283): n is a, c, g, or t
  misc_feature (1298)..(1298): n is a, c, g, or t
  misc_feature (1308)..(1438): n is a, c, g, or t
  misc_feature (1518)..(1525): n is a, c, g, or t
  misc_feature (1573)..(1573): n is a, c, g, or t
  misc_feature (1582)..(1582): n is a, c, g, or t
cgcggcggccgtntccctcagtggccgcagcgcctcccgtgagagcggtttctcctccttgtactgctggacctggccccgtatcttcgtggcagaggccaagcaaggggactccgatgccggggcgtaggggggtttgggtcaaaggatgggggcagagttcaaagtgcagggggcgggctcgtttaatggcgaagtcctggcaccgcgccccagggaggaggctccggaggccagtggaaccccgctagacttcaggggtcttggttggggacgcggggcgttttgaccccctaggcctgaggatcctaggcctgagtaacccatcggatttngagggaagggtggggtttaggtgaaatgtaaatactgcgtggtttccatttggcaaagagcaagcttgtaaaggggtcaccctcgggtctgggctgcgaagtgcagccgggacctgtttccttgggaaccacaagataagaccgctgtagattgttatgtccggaaaccgcttatcagagccctgcacctgggttggaaatggagacggattctctgtgtccaagaaaatcagaccctccggccggaaaaggtaagtttattcttactgataaaatgtcaatcactgtgtatgattgtaatgggcaaggaaggcatttagcgagctagaagacattgatggctcagaaaaaggtgttcttggcaaaaatactgttttctgttaattttccaactgataccatctgggtctgtcctcccagcctgatgaatgtgtaggcagatactttctcagtcggagttgatttttattatcttgattgctgcatcctgtgcacagaggttttctgctcagctgggcttcatcctggggtcccagtcctggccccaagccttaatcagctctcgggtgatattaggcaagttgccaagcccctaagtcgcctcagtttccaggtctgtaaaatatataacattacctgcatttgtcaaatagtgctgtgtgtggattattattggcagcncatcatcaccattatcaccctcctgtaaacgtcttggaccccttaagtgaagacagcagggttacggcggataaaatgatggacttcagagaaaagactctaagaccaaatagagtctaaagcagtgattatcaaagaggggaggagaaattttacncccaggggacactggacaatgtctgcagacttggttgtcacaaccggggatggggttggggcnactggcatccagtggatgaggaggtctanggtgcngcncnacncccngcaatgaatagcacnccagtctttnnnnnnnnnnnnnnnnnnnnnnnnnnnnnnnnnnnnnnnnnnnnnnnnnnnnnnnnnnnnnnnnnnnnnnnnnnnnnnnnnnnnnnnnnnnnnnnnnnnnnnnnnnnnnnnnnnnnnnnnnnnnnnnnnnncgctatacatacacaaaaattcatagactacacctcaaaagaaaaattcaacatgaccatataactactataaaataaannnnnnnncaatacctggtttggggttggatcttcggaggaccagctgtaaagacnatttggggnataattgaaggaaatacgattatgggctag

SEQ ID NO: 441150 - DNA, 825 bp, Homo Sapiens
  misc_feature (643)..(643): n is a, c, g, or t
  misc_feature (690)..(690): n is a, c, g, or t
  misc_feature (817)..(817): n is a, c, g, or t
tccttggataccacacacatatataatattatatagagcgatatatttaatacctgtgtatatatgcatcacgggggcgacatatatacacactagaaacaaggctggtgacaacggactgcaacaccacggatcagggaaaacgagtatcatcgacatcacggccacacatggccacagcccccaccttgggtgtggtctcccctcccctacagccacaccaccagcacccaaactctgcagtgctggcctgctgcggccagggggtggggcagggaagaggaaagggcgcatgccacgattatcaggaaaggttgggcagtggcggcgggaggaacagcgtcccctccagccctgggcagcccatcactgtgtcagcgcgcgctggcaatccttgcttgagaagaatggggtggtcccttctctccttctcacccccctacagcctaatccctggttccttccggggctgccccactcctgtgccaatgatgtggggcattctggaatgtctggggaaccagggcacggtggatctgccctggttgatggaaggtagggtggagaggaggggggtgcacacagacatgtcagacgagagggacgagcgaggccttggtgagtgggggcaggggctgggggnccactgaagtcccagacagctgggagggccagggattagggaggggntaggacagacggttataactgtatgtctgggtctagaggagaggacatactgggtccccaagaaagaggggccgtgtcccatcctggagtggcccatggtgcccggggtcaagcctcccttttctcngcattccc

SEQ ID NO: 441151 - DNA, 469 bp, Homo Sapiens
  misc_feature (14)..(14): n is a, c, g, or t
  misc_feature (30)..(31): n is a, c, g, or t
  misc_feature (33)..(33): n is a, c, g, or t
  misc_feature (89)..(89): n is a, c, g, or t
  misc_feature (121)..(121): n is a, c, g, or t
  misc_feature (133)..(133): n is a, c, g, or t
  misc_feature (140)..(140): n is a, c, g, or t
  misc_feature (142)..(142): n is a, c, g, or t
  misc_feature (146)..(146): n is a, c, g, or t
  misc_feature (154)..(154): n is a, c, g, or t
  misc_feature (162)..(162): n is a, c, g, or t
  misc_feature (169)..(169): n is a, c, g, or t
  misc_feature (195)..(196): n is a, c, g, or t
  misc_feature (203)..(203): n is a, c, g, or t
  misc_feature (228)..(228): n is a, c, g, or t
  misc_feature (238)..(238): n is a, c, g, or t
  misc_feature (243)..(243): n is a, c, g, or t
  misc_feature (255)..(255): n is a, c, g, or t
  misc_feature (262)..(263): n is a, c, g, or t
  misc_feature (270)..(270): n is a, c, g, or t
  misc_feature (275)..(275): n is a, c, g, or t
  misc_feature (287)..(287): n is a, c, g, or t
  misc_feature (292)..(293): n is a, c, g, or t
  misc_feature (297)..(297): n is a, c, g, or t
  misc_feature (302)..(302): n is a, c, g, or t
  misc_feature (312)..(312): n is a, c, g, or t
  misc_feature (324)..(324): n is a, c, g, or t
  misc_feature (327)..(327): n is a, c, g, or t
tattcatcatagangcagctacatatattnnanaaatattagggcatatattatgaggcatattatttatcctatccatagatgaaatnaaaatccaaatggactatttatttatttcccnccattccccccnggctggncntganttcctgtnctcaagcnatctgcntaccttggcttccccaagtcctaagnntatgggngtgagccactgcacctggccaaggntccgaatggnttganagataccttganatagttnntcaatgnaacanacacacatatgngaggnntggngaaangggaagaganggttgggctganganagggacctgggctttcctcagctcttctgccaaggtatctgtcctttcttagtgactcactgggctgaagtctagagcattccaatgggtgctggggatgggttagtgaaccaggaccagccctgcccttggggaggcatgg

SEQ ID NO: 441152 - DNA, 1914 bp, Homo Sapiens
tttctgtgtttgtcaccaatcctttattgaaactggtaacttacacactttataatagaacaacaaaaataatgttcaatatatacagccttcgcatggactatctgactatacacaggcagagtgataacacaatctaatcttcatcataatctgtgcacaaaaagacaccaaacagacaacatgtgcacatcacagtgaaatgacatcacaggtccagtgaaaattcagcataatacaaaatggactgctctattgcaaatgacatctttctaaatgcccagctcttactcagtagtaatttacccagagtctgaagcagagattggttgtgtggctataagtctcttgagtgagacaacctctgcagataagtttgctatcccctgcttcaaatacaagttctctgggtcagaaactttgtagccactgtctttcatttcaacaactccagttttgaaactattctgagttttgccactcagttctttttgatgccagtgctccgatttgagagaccaatcttgaatgttagtcacttgcactgagaaaggagtaagagaagaatgtaccatacttggggcactatgcttttcgagttcgaaatgtcttttagatgtcatgtcaataggtgaggaaagtttttgcgtggcctcaaattcattatcaaaggcttctactttgatctgcatggctttggctttgatccggagcttgtgtggcaaggcagaggaattcacttctggaactttaaccacagttgcatgcacatgcttgagttcaactggagaatggatggggcccttggggacctgttgctcgtcttctccatcagatgactttcctaccacaccatcatcagtttccgacgttctcggggagttgctggaggatcggttgacttgcagtagtgggggagagtgtgagtacccagagaaagaattccccatatagttttgatagatggacgctgtgtaagagcctcggtcatctcttggctcccttgtgtagctctctaattccatcggctcttgcttgataatctggaacttgttttcaggacttctgcagcttccctgcacagagctctcctgcgtgtgttctactgaggacacttctgaaacatcggacagcgagctttgtggagagtgtttaatgacagaaatacaactacttgacaccatcgagggttcgtgctcgtccacaaatgaactcacattggatttggaagtctggtaatcttgaaagtacacagctgtagaattactgagtttctgaatctcttgagcatatgctgtggagctaattaaaccaaactttaattttagtgaaagcagctcagcttttaaagtggcgttttcttctcccagtgcaattagtttgttctctaaaaccaggtcattcagtcgacgcttctcacgagatcttttggcagcttcattatttttccgccttttttcccaatacatagcatctttcttttcatcaggaatgaattcccgtttcctccgacatgcagaagatttgttcttccccacacttccttcactgagaagcagctcctcacctgttgtggagtcttctgacacttccgttaaagcagaattaaggaccatcatcttgtccacattgctactggcatcaagagacgcctgctcctttttgacggtctgcatttttctcagctgcatcagaaacaaccttaccctatctatgtgtgtaggagaacaaattaatttccccgtattctcaagctctttaaaaactctggtttaaaatccatcaatattcttccttttgttctaccgtctgggataaatccgtcaggctccttattgaatgaagttgggcctccttcgttatcgtgttcctgctctcgggccggcgaggagaaagaaaggggcggccgggagt

SEQ ID NO: 441153 - DNA, 1321 bp, Homo Sapiens
  misc_feature (654)..(654): n is a, c, g, or t
  misc_feature (725)..(725): n is a, c, g, or t
  misc_feature (759)..(759): n is a, c, g, or t
  misc_feature (768)..(768): n is a, c, g, or t
  misc_feature (825)..(825): n is a, c, g, or t
  misc_feature (831)..(831): n is a, c, g, or t
  misc_feature (834)..(834): n is a, c, g, or t
  misc_feature (841)..(841): n is a, c, g, or t
  misc_feature (858)..(890): n is a, c, g, or t
  misc_feature (893)..(893): n is a, c, g, or t
  misc_feature (899)..(899): n is a, c, g, or t
  misc_feature (904)..(904): n is a, c, g, or t
  misc_feature (922)..(922): n is a, c, g, or t
  misc_feature (929)..(929): n is a, c, g, or t
  misc_feature (939)..(939): n is a, c, g, or t
  misc_feature (951)..(951): n is a, c, g, or t
  misc_feature (955)..(955): n is a, c, g, or t
  misc_feature (963)..(963): n is a, c, g, or t
  misc_feature (968)..(969): n is a, c, g, or t
  misc_feature (971)..(972): n is a, c, g, or t
  misc_feature (979)..(979): n is a, c, g, or t
  misc_feature (981)..(981): n is a, c, g, or t
  misc_feature (990)..(991): n is a, c, g, or t
  misc_feature (995)..(995): n is a, c, g, or t
  misc_feature (997)..(997): n is a, c, g, or t
  misc_feature (999)..(999): n is a, c, g, or t
  misc_feature (1019)..(1019): n is a, c, g, or t
  misc_feature (1026)..(1026): n is a, c, g, or t
  misc_feature (1035)..(1036): n is a, c, g, or t
  misc_feature (1041)..(1041): n is a, c, g, or t
  misc_feature (1043)..(1044): n is a, c, g, or t
  misc_feature (1269)..(1269): n is a, c, g, or t
ctcatgggatatgcacttatttaatcgttgcgttagtatttagcaacgtaatgagagtaagtacatctatttgccgtctgagatcacagttagccctgagcaaatcatctatacgtccctccttcttttccaggtcctggattttattactttctaatgctgctaatttcagcattgtgagatcagtctgaataattttaaaggataattgctttggttgtacaatagggtggtccccaaatgctaatgcagtaggagaagggctattcggtcgaacagatgaggaaggagtggaatgtgaatgtgaattttgaggagaacggattgcaggaggtatgcctcttactggacttgagccatttccaccctggtattcaaaatagtcgctaattttgtggccacgtcccccaatactttttccctgactactttcattctggttttctgcttttctctttcttcccctggatgattccgattgtttcttctccggtgtctctgattctttgtcacttaaagatcccaagcttccaaaactgtgattagagctttcgttatttgttgaggctttagctccaacactgcaactgcccgtacttccagtgctcccacttgcaactccagtaaatctagcttccaataactcttgccttnttggatccagactatgaagctcatccattgcaccttccctgggcctcccggatggcggcgtgtgattcagnagggacctggccgccgccgccgagcccgggtttngagacttgnagagctgggaccaagatgtctgcccctccaaacttccactgctactttggacactcntcaatntantttctgntaacccgactccccccnnnnnnnnnnnnnnnnnnnnnnnnnnnnnnnnnccncctccntcatngcgggggccgcgctgagngctagcnagagagcganggctgggagggnagantcaagggnatggnnannaaaaccnanaagagggannttanantnaaaagaggtgagggaagganagggaanagggaagannaaaangnnaaaaagcgagggagcgagcgggcgcgccagaggagaggaggaggaaaggagcgcggcggcggaggcgtcgagggggtgccagccgggccggggtcggagcgcgggcggagcgcggtgcgccggccgaggacacttccgcgggcggaacctgccggcacctctgcagtgcgtcggcccccggcgtcgcccgggaggcggcggcggcggcgggctgtgggtggcggntgaggcggtggggtaacctctgcatcagttacaggcggcggcggcgtcacgc

SEQ ID NO: 441154 - DNA, 727 bp, Homo Sapiens
  misc_feature (711)..(711): n is a, c, g, or t
ccagccaaaaagaagaaatattaagttgtccataatctgttatatctaactattataaagtataaataaaacaaaataagttttacattacttgtttctgtcacattgttcaaaattcttttgggcttaaagccaactatgaattttagttgagtaggaggacaatgggaaacagattctttttttgttgttattgaaatgtaagcaacttgcccttaaaatagtatgaatatccagttcaggtaacaactttcacttttaattagtcaaatatatattaaatataaaaatctaatgctgtacagatgtgactttggacattttaagtattagtttattcagaaacgcctttaaaaatcagtgtgtatagaactagctcatttcttaactgtcaaatttagaagtgcaacagtgggtcttcagagagaatatgcccaagaaaaactggataaaaagactgggtaaatacatcaaatgaaacagtgattcacttttgacaagactgaaatataagtatataatcactgatgcatatttattcagtaggcccatgtgattatgtggtttttaactaacagcatttatttttgcaaactgcttggcattcctccaaggggaaagggagcttctaggactacaaacactgaggcacatacatttttaaatttaacacatggaattgcatatggggttgttggtatgcttttaggngtcttgtctctacagg

SEQ ID NO: 441155 - DNA, 518 bp, Homo Sapiens
  misc_feature (310)..(318): n is a, c, g, or t
tgggatcaactgagaatatgtttatttaaaagcaattttaaatattaaaaaaagtagaaattaacacatacagtactgaaaaactgtcacattaaacacatgtgaaatgacaagtgtactgatgtttgatggtaacatccagatgagaattcggcatttaactagtggcactacaggattcctatacaacatgttgaagttctaggcaataaaaaaataaatagcaattgctgttcaacagtaaaataagacacacactatttgcagaacataactttcccctctgggggaaaaggaactaatttgctannnnnnnnncataaggttccatatcttcaaaatactatataatgtacaaaattgcagatagtggcttactgagtttaagatcaagatcagacttaaactcaacaagatcaccaaaggtatttctactgagttttcctatgtcccacagtaagctgggttagagagaactcaaattcctgatggaaaacaaaaccgaacaaaaaaactag

SEQ ID NO: 441156 - DNA, 1000 bp, Homo Sapiens
  misc_feature (42)..(72): n is a, c, g, or t
  misc_feature (250)..(250): n is a, c, g, or t
  misc_feature (283)..(283): n is a, c, g, or t
  misc_feature (325)..(325): n is a, c, g, or t
  misc_feature (330)..(330): n is a, c, g, or t
  misc_feature (333)..(333): n is a, c, g, or t
  misc_feature (373)..(373): n is a, c, g, or t
  misc_feature (420)..(420): n is a, c, g, or t
  misc_feature (435)..(435): n is a, c, g, or t
  misc_feature (445)..(445): n is a, c, g, or t
  misc_feature (508)..(508): n is a, c, g, or t
  misc_feature (519)..(519): n is a, c, g, or t
  misc_feature (544)..(544): n is a, c, g, or t
  misc_feature (563)..(563): n is a, c, g, or t
  misc_feature (631)..(631): n is a, c, g, or t
  misc_feature (633)..(633): n is a, c, g, or t
  misc_feature (636)..(636): n is a, c, g, or t
  misc_feature (643)..(643): n is a, c, g, or t
  misc_feature (645)..(648): n is a, c, g, or t
  misc_feature (674)..(674): n is a, c, g, or t
  misc_feature (703)..(703): n is a, c, g, or t
  misc_feature (831)..(831): n is a, c, g, or t
  misc_feature (887)..(887): n is a, c, g, or t
  misc_feature (908)..(908): n is a, c, g, or t
  misc_feature (926)..(926): n is a, c, g, or t
  misc_feature (929)..(929): n is a, c, g, or t
  misc_feature (945)..(945): n is a, c, g, or t
  misc_feature (950)..(950): n is a, c, g, or t
  misc_feature (959)..(959): n is a, c, g, or t
  misc_feature (961)..(961): n is a, c, g, or t
  misc_feature (973)..(973): n is a, c, g, or t
  misc_feature (980)..(980): n is a, c, g, or t
  misc_feature (982)..(982): n is a, c, g, or t
  misc_feature (984)..(985): n is a, c, g, or t
  misc_feature (987)..(987): n is a, c, g, or t
  misc_feature (997)..(997): n is a, c, g, or t
agtattatatcccacacccacccaagaaacagggtttttttnnnnnnnnnnnnnnnnnnnnnnnnnnnnnnnttcccgctcatgagttttgactattggtgggatgttttccgctacagttaacatgacaaatgtctcagtggcaaaaatcccctttttgtaagcccccatagtctagaggcagttttctttttaagaatcatgccagagcctgagtcgagcagtatgctttcttggtttttgagagttnttgtgtaattgtagagggggaaatccaattctnacctaagaactgggattcttctgtcatcttgtaaaccgtatnttganaanaacagaatgtcactaaatgcatattaagtcaagtattggnaagtataaaagaaaaatcattctgacaagtttctaagccagaagcgnacaagaattactganatctaccccntgaatacttggggggcagtaattgtgggtgacacctcagttcatcaaccccttaataatatcngcttggttttnatgtcaactaaatatgctgaagtgngggtttagtgttttttaanaaagcaaaacaaggttcagtagtcctcagcaattctccaagtttctctctttgcctagcatggtcatngntcntggtttntnnnnatcgtgatgaccacacccagtcatcntcacagcataattgcaggtggcagtaaanagagtgtgctgggtaaggagcagttgctgggtcattccttgggccccgacctgcccggggagtagccctggggggagagagggcagtgttgcctatcccagaggtcccagcagtcacactgctctgcnggccgggctctctttatagccagagaaatcaccttaatgcagtctctttagttgtntgctgaagctgtagttattanggggcacttacatgaggntgngagtacgtgcggggcnccccnctgcctgtngnggtctcttaacncagtaanananngnctgtgggccnggg

SEQ ID NO: 441157 - DNA, 902 bp, Homo Sapiens
  misc_feature (739)..(791): n is a, c, g, or t
tttttttgcagaggagcccagagccttctcctcctcctcctcctcctctcgcctcatctgtctcccggcctgataccagatacaggttgttgatttcatcgtgggtagcaagctagtaataaatttcaaagtgctttctcttttcatgctttttgccaataactgttaccgccgttcttattctctcccttaactcattgtctttgggggagttagacaccaggaggtgccttgtcggtcatatttttcagcacgtcatcaatcctatcatcttcaataacaacccgcttgctccggccgatctggcccagcttgggcggccgcttgttctgcccggcgccgaagaagttgttggtgtcctgcaggcggcaggagaagatctggcccacgtcgccgccgtcgccgtaggggctcagcttctcgtcgccgtagggcagcacctccgacatggtcgcgtccgggggctccgccgcggcgcctcctccgcccgcgtccccgcccgcggcggacagggtcagcggcgcttggggccgggggcgcccgtccggggacggcccgcgggctgttgcggcggtggcgccggcgagaggcccgggggacgccgctagggcaagagcgcggcattcgcgcgagcggcccggagagcgacccgcggctgcactgcgctgcgctccggctccgcgcgcgagtggctgctgctccgccagaggcgagcaggactcacatcctcggcgcgctnnnnnnnnnnnnnnnnnnnnnnnnnnnnnnnnnnnnnnnnnnnnnnnnnnnnnacgtccctgcgagcccggagggcgcgggaccgaggagggcgcaccccgggagccgggcgggccggtcctgcggcgagtgcgggcggcggcgccggttcggggaggcagact

SEQ ID NO: 441158 - DNA, 1346 bp, Homo Sapiens
  misc_feature (41)..(119): n is a, c, g, or t
  misc_feature (460)..(523): n is a, c, g, or t
  misc_feature (871)..(879): n is a, c, g, or t
gtctttcagtccctgtttttcaaccccgtctccctctcggnnnnnnnnnnnnnnnnnnnnnnnnnnnnnnnnnnnnnnnnnnnnnnnnnnnnnnnnnnnnnnnnnnnnnnnnnnnnnnngtagtcccgccgctcgcagctcccagtctgcctccccgaaccggcgccgccgcccgcactcgccgcaggaccggcccgcccggctcccggggtgcgccctcctcggtcccgcgccctccgggctcgcagggacgtctcctccctcccggctcgcgggcccgcccggcccggcccccgcccagagccccagcgcgccgaggatgtgagtcctgctcgcctctggcggagcagcagccactcgcgcgcggagccggagcgcagcgcagcgcagccgcgggcgctctccgggccgctcgcgcgagtgccgcgctcttgccctagcggcgtcccccggcctctcnnnnnnnnnnnnnnnnnnnnnnnnnnnnnnnnnnnnnnnnnnnnnnnnnnnnnnnnnnnnnnnngctgaccctgtccgccgcgggcggggacgcgggcggaggaggcgccgcggcggagcccccggacgcgaccatgtcggaggtgctgccctacggcgacgagaagctgagcccctacggcgacggcggcgacctgggccaaaatctctcctgccgacttaccgagcccaaaacttccttcggcgccgggtgacaaacagtgtaccccttcttaaaatatcccttcaaggggaccctcccttccccccataccatgcgttttttgctccctacacgcaccccctaccgcgaatccgtaaaaatcggtctcccgcaagctggcgccccttcctcccccgttctttcgcaatnnnnnnnnntacacccatccatccttaaattaccgccctcaataatcccctaccccccgcctcgtgccgccaaaccgttccccgcgtatttcccgtttcctacgcgccgcttgactcctttgagtcgccacatctgctactttcacctcgccctaccctgatactcccgcttacgtgtgttctttccgcgcccagcccgcccttattcggccgcccactcctttttcccgtcgcttcactccgaaccgctaccgctatcccccaccctttcttagttctctgcctccccgaatcccctcctctccgcccgctattacccccctatattacgcccgcctccttctttcttccctgctagcgccgcgttctcttgcaacgctgcctactatgttaccctggaataatacttccaagcacgacaagacgctacattctcaatccacgttgtcccccgccctcactctttattcccgtca

SEQ ID NO: 441159 - DNA, 846 bp, Homo Sapiens
  misc_feature (170)..(224): n is a, c, g, or t
  misc_feature (265)..(265): n is a, c, g, or t
aaagaagaagaagaggagaaagaaaatggcgctgccaaaacttgatcaactgcgcctgcccagagctcacctgacgtgctcagacgtgaacattcctgtccccgtggccttgggggccgtgacctgtgcactgccacgcagcctcggagccgtgtgcacgcatatgcacnnnnnnnnnnnnnnnnnnnnnnnnnnnnnnnnnnnnnnnnnnnnnnnnnnnnnnntgtagcggtgcctggggagtctgacctcagaaggtgctgtngggagggctgcaaggtcctggcgggaggaggcactccccacgcttccccttgggctgggctgttcctggcaggcgagtgctaggcacagtgtgaggttctgtgtggattctgctgtgctccttggcagctctgggggccttcccttgcatttcgaaggaaggggaggcgtgtggctggaggtgagaggccctgaggccctgcctggctcccagcttcccaatatccgcctctctctgggtcgccgccctcagagattgctgaggacacgagctttccacccacgggctgtcctaacggagccgggctaggggcttctggacagaggccgcctgcccctttgggctttggggtttgtttttctcagcagctcacccgggtctctggggtcagggtatcgggcagaaggcagaggacgctgcgcttgggacctgagctctgggcagccctcggggctcaggactcctggctcttctgcccagtttcatgtgttttgtgttttgaaacacgtgtggtcccacagttgtgccctcagaagccgccgtggctgccgtgaggtagcagtggacgggacgccacggtc

SEQ ID NO: 441160 - DNA, 1031 bp, Homo Sapiens
  misc_feature (909)..(945): n is a, c, g, or t
  misc_feature (955)..(955): n is a, c, g, or t
  misc_feature (981)..(981): n is a, c, g, or t
agtgagtgagaggcagagcgaggaactgaggaggagggctaagagccaggggtcctgggcaagtggacagggctgtgggacatgttggggaggctttgggaatggggtattcctagtcagggttcacacctcacctgggatgttgttccatgctggtatttcctctgccacccccagtgcccatcggtcttggagaaaggagtccccgggtgtgtgtttgcccagctgtccattctatctctcccttaaacacagagcattcagcccttccctggatttccctcctctgagccatggagtcagtgccacagcctttgctatgcacctctcaggcctctccttggcgttgaccctggaaagacctaccaccacctattttttcccatagtctgtacccagtgagttgaaggctgggtccccacccttccttttgatttcctgtcttccttctcgtggccccagctggttgctgtggagatgaggttcctggtcctccctgtcctggctggactgccccgcctcagatccaggatgcccttggcatcgctcccaccctcccccagcttttcctccctggtctgacaatgggcatgcaaaaaggggcagctgcaatctagcaggcctgcccacccccttcagttcaggtaatacagttgtgaatcttccagccgctggttagggccttgggcaccacaggcagcccctcacctaagccggggcctactcctcttacaacagcaagagagccctggggccccaggcctgttgagcttcttgtctcccagcacccgcttttgggaaaatgacttttcctcttcaagctgaaccactctgtccatattacacagaagccatatttgtacgggggggtgggagggagaggggctgttgttctgtgtgtttttgttnnnnnnnnnnnnnnnnnnnnnnnnnnnnnnnnnnnnnaccgtgtatntttataatctttctaactctcctgtnctaatctcagaggggtcacctcaatatatctggattatccgtgtttttca

SEQ ID NO: 441161 - DNA, 1806 bp, Homo Sapiens
  misc_feature (1514)..(1514): n is a, c, g, or t
tgaatgcagctgacataatatatctttaaaccactctaaaactgcctaataaaggtattggtagtcatgggacaacatcttgcttttgccgttcactttaagtttctcatgagctctggcccttcagtttgggggagtggttgtttggaagggccagccaccatgaacacctaagtttacaatgaaggtggtgatgactgattgataggttcttaataaagatcataaatatggacagcatggagcaagaatgaaccacagcagagagtagggtcattttatcagatttcagataacatcaggaaggtctgcatttggaaaatggttttgcttggatgtgtctgccataaaatcatagcaataaaaccctctgacttaattttttttaaagcattgcaatggtttattcaattttatgagtctaaaaggtaccaacacttactgatctgagttttaagtgtgtaaaacttttgagtagctatggtgtaacctgatttttaagatttcaaaataagcttggaaaaaaatcacatccattttacatgcatccattcattacttctaattgattatactacagataacttaagccttagttctttctctttaaggttccccccagttttacgagaggcatggacataattagcttttttcctttagtaaaaatgtgttatgtgctgtagcatacaccagagcttctactttccaatcaggcaacacagactccgagctgcttttgtttttggtccctggaggtgtatatgacaagttgacagaaacaaaaaggtgaagaccctgctccacccagtatagagtcctcttttctttggtgtctcatggaaacctattaacatgccttccacataagtctctatatataaaactatcaggcattatgaattaatttgcagtacagtcactttgataaagttgctatttatcttcaaagtggaaaagtcctgctaatcaaaatggaattgtgaattaaagtaggccactggcttaagtatcaggtagaaaatcaacagcttattttttctgctcagtttgtgctaacactgatggtctttttgaggaatgctgagtatgccaagggtagaactttcgtacctaggtaggtaccaatctcttaagagatccaggtttctggcatggtcctagctgcattgagaccacttgtcatgtgttaactgacacaatgctttgatttgattgtttcacagtagaatataggtgaaaactatcaccagagtaactgtaatccatacagaattcttttacctgtaaatgcctttcccaatggagaatcaacagattgggtgatggtggagtcggtcaggaagactcaggtcttctagaggaaaggatgcctcatcaccccttgggcccaggcagctgctgtcagagaatgacacagcacctgcacagtcgctgtccacttcctgccactgctgtcggtggggtgacgggagcaaagtaggcgtggactttgacatgagggagctgagccncgcatccgcttgatgcctgcacgggtaacctgctggcagtcgtacagctcgaggcgctccaggcctcggcagttctctaggtgttcccagggccacatcagtgatgaggaggcagttgtccaactccagtacccgcagcctctcatggccacaggtactgttgctcaggtgcaggatcccatcatctgtgatgagttcacagtgggacaggctctggaacaggaagacatgagtaaatgtttgcaggacccttattccaaggctcaagtcctaaaaaaaagctggtaagcta

SEQ ID NO: 441162 - DNA, 1040 bp, Homo Sapiens
  misc_feature (115)..(165): n is a, c, g, or t
  misc_feature (966)..(966): n is a, c, g, or t
  misc_feature (969)..(969): n is a, c, g, or t
aatgacccggatggaggcggcgccggcgcggttggggcggaggatctggagagggaaggggcgtgcgagccccgcggaccccgggcgcgcccgggccgcctgagctgggccagcnnnnnnnnnnnnnnnnnnnnnnnnnnnnnnnnnnnnnnnnnnnnnnnnnnntggggagccccagccccggggttgcgggggcgcgtgaccggctgtctgcgtggggcccgcgcgcggtgcctctgcctgaccgtgcccgagcctagcgcggagcctggcgcgggggctgcgagcacaggcccggggctgatcgtaatcggaagaggactgtcagaaggacgtagaaggcacggttttactgtgaggagcaaagattctttacctacgcattttacaagaaatgtgcagaaagccattgataaatatacctgcaaatccttgtcatccttttcctccagcggaagccatacacccacgggagcccacacctcttggtctgggtcggccacacagagctctaccaccggctcatccacggagaggggctccgtttattcctggagagatgacgaatttgacgaagccagttcacagtcagtgcagcggttactctgggaggtggaggaaatgttatttgaagggaaagtgaaccctcagacccagagtctgctggccgaatgcggggagtggacaagaagatccctccatttgagagtattaggaagacagctgatcctgcccactgacgaaggcgtccagcatttccagggcagcactcctgcctccgcagtccacagacccccgctcagtgcctgcggacacagcagcaacatcagagagttgtgcatttctggctcttatatagtcccagcagcattctcagcctctgccctgccaggccctgatgacacaggggttgctgacctaacggcagttcatccctggaagaagaggtttacatgtggatggaanatnaggagtattcgctttgacagaaagaggaagggaaaaacagagagaacattgaagtggctggaacagatttc

SEQ ID NO: 441163 - DNA, 959 bp, Homo Sapiens
tcaggtccaacacgcagggtacttgaagtgtgcaccacgttctcaagcaggaggaacttgtagagctttcggtccttggactcggagcgcatgcggctcagctgctgcttgtgacaacgcaggctccaggggttgtggctgatcttctcagaactcaagccactgttgccatctagcatctggaaagggacctctgagtggctgtgcagctcccacttcggactctttgcctcctgtgagctctcagaggtctcaagggacaggctggctttctcctccttgtggtcactgccactgcctgaccggtgcaggctccggcgggagtgtttgcgccgaggttgctcccgttctgttgtgtcatcctgttccacagtctcactttccacataaggataggccactaagttgatgtaaccatcactgtccccctcaaaacagacagataccacgcctttgtattcaggggtgaactccttcatttcgggagggagggactcgtaaaagcgctgttcccgggagatgaggggcttgcacacagtgtgatcgtcgtaacgcatcatgctgctgtgtccgcctacttggtggatgaagggctccaggaggactccccggtctccagcccgacttgcattcttgccatactgccccacttccatggtttgacaaacacacattgcgttgggggccagttgcacactgagggcagaggatgcagcacatgggccacaaaaggagagctacatagaaggtcctggccaggtgaaagccaatggtcagattctattcagcttattattctgtcctgcccggcccgggcaccgagcgcccacggctccctacgggagctgggccccccgggcctccaggtttcggcccgccccctggcaggcagcacaggtggctgagcaccgctacagcggcctctcaccggccgcttggtccagctcccggcgctgccc

SEQ ID NO: 441164 - DNA, 990 bp, Homo Sapiens
agatagctcatactgtcacgttgcaggtccagcccttgtgcagatactgtaagaggccattcggaaccttcaatcgcggtcccacggccatagtacttggtgcctgcagagttaatgtccccttgtgttccaactgggtaacacccttcattccgcagaccctgtacccccagctggcctgatgtgctctgctcgcaatttccgcatcttccggccttgcccttcttcacctgacgccgtcatcgcccatgctgccgcgtgcccatcttcagggtccaacactcaggggtactttgaagtggtgctaccacgtttctcaagcaggaggtacttgtagagctttcggtccttcggaactcggagcgcatgcggctcagctgctgcttgtgacaacgcaggctccagggtcttggctgatcttctcagaactcaagccactgttgccatctagcatctggaaagggaccttctgagtggcctgtgcagcatccaccttcggactcgtttgcctcctgtgagctctcagaggtctcaagggacaggctggctttctcctccttgtggtcacttgccaactgcctgaccaggtgcaggtctccggcgggagtgtttgcgccgaggttgctcccgttctgttgtgtcatcactgttccacagtctcactttccacaataaggataggccactaagttgatgtaaccatcactgtccccctcaaaacatgacagataccacgcctgcccggcaccagggcaccgagccgcccacggctccctacgggagctgggccccccgggcctccaggtttcggcccgccccactggcaggcagtcacaggtggctgagcaccgctacagcaggccatctcaccggccgcttggtccagctacccggcgctgcccactgggtacggacgacgcgtggtcgacgatatcccgggaattccggaccgtacagccgctaataaccggttttatattacaatacgac

SEQ ID NO: 441165 - DNA, 942 bp, Homo Sapiens
cgcattgtcgtcgcatccaggaccttcacgcagatgcgggaggtgccagatagcactggtcacccccatcagaagccacgagaacgaggtggtgaacagcctcttcctcgcggtccagagagcgctccagcaccagttctgggtacttgttcccatcagctccccatcgcacgtccagggagaagtggtcatttgggttgagtgcgtacttctgaagggcgttctcacctacgtctgcatcatgcgcattcttaagaggaatccggaatcctggcgtagtggtttcactgatttttagctccagttcctctactccaaagcgaggggcattatcgttaatatctgttatttccacctctactgaataaatagtcaatttatcctccagcagaatgttaaaattcaacagacagggtgcgctctgagcgcagagctcctcccggtctatcctgttcgcagtgaccaagctgcttcgcgggttcagagcaaagagctgggacctacctctggagacgatgcggactccctgctctgccagtgccaggggctccaaacccaagtccttggcgatgttgcctacgaaggagcctctgtcgatctcttcccgcacagaatagcgaatctgcccggccctggcctcccacagggtcgccaaaaggaagcacagcaggaccagctttctgcagtgtggcaacttttgcagagccgccatttccctcctgtcgcaattttctccgagtcaacttccagcatccagtgcggattccaatctttattcctcagggtgtgagataaccagcattcacgggacccaggtccctatggagagaactggtgggctgttcgactgaatttctttggtgtcctgaagctttagggccaaacctccacccccttgtgctgtgatcccgggaattccggaccggtaccagcctgcttttt

SEQ ID NO: 441166 - DNA, 823 bp, Homo Sapiens
  misc_feature (55)..(55): n is a, c, g, or t
ctggctgccttcagagttttctaaagggagaaaacctcatgttaataaaaatgtnttaatcattacttttgtcattaatgatctcgatatagttaacatcttaagcactatgaaatatggtaattaaaatggcaatatattgaaatgtgaaaacagttttagcacagcacttattgactatgaaatacttactgcagttgcctgtagattattggggtagacattaaggagctcctgaggagggtttaaaggtttgagataacgtgtgataaaaacagtttttccgcttatatcaattactgttgtaaggcactgacgatttggaaactttaaggcacattcagcttgaaacttctcagttgcttgaagtaatttctcatcttcctgagactcaaacttcaaaaagaaagacttcatggagtttatgtatgattacaagagagaaagtacgtgttcagattccacagtcaacatgcaggaaatgtatggtttgggaatatgactgactccttacaaagctgtcatgtcctggtgtccctgcagctttatttaaattaaatttgtagtttgaaaattagaccggctcattaaatacttaaaatatatttgacaggattgaaataaagtagcaggtaagcagccatatggaaactactacattaataatctatgaaaattaaactgtgatgtactaattctgattgatgaggctagaattaggcagtagagttttgtgtgtattttgatggtggttttaagtgtgcaggctggggggcggccccagaaaatctaacatctcatatgtaaatcttaagcaactcat

SEQ ID NO: 441167 - DNA, 847 bp, Homo Sapiens
gtgcgcaatgccttccgtgatgtctggctgcttcgttcaatgtaggtgtgctttggggtctgggccttatgtcagccttccctaaggtagctgataaagtgtcttcagcaatattcaagtcaacatgtatcacatcctgtgccaagactggatatatcttcagactgggagaggagagatgaatctaccagcataggggaaactgtgttgaaatccagcaggaagtgcaggtctgacttgaggtgtgccggtgtgtacttcatacacatccgtcaaatgccatccccttctgctgaccgagcagctgtctctgtccccctgctctagttcatccatgtagactgtcaaacccttgcttggggggctcttggaccccacagtcagggagtgctttctttccagctggagggaaggcattttctgatccagaataacacctgattcttgtgatcccctggccacaggtcctcctgtactgcccatttgcagttagcagccctagcactgtcctctgcgggggatcctggcccaagcggggctctggtgagtatctgacaagcatcgggacctcgggccactgtagccagcacaactccactcttgggtttgctgcagtgcattgcttcagactccacgggctgctgctgactcgctccgggtggactcgccgcgacccctgggcgttcaggcaccctgagggcccaacgggcgacggccctccagctccagctgtgcgtctccgcccgggcgaggtggggctgaccgcggccgtctgcacacgtcccctctggtccgcgcccccaggcctgggagggcgactcgcccaccccacgatggccccggcttt

SEQ ID NO: 441168 - DNA, 3272 bp, Homo Sapiens
  misc_feature (349)..(349): n is a, c, g, or t
  misc_feature (613)..(613): n is a, c, g, or t
  misc_feature (699)..(699): n is a, c, g, or t
  misc_feature (1792)..(1888): n is a, c, g, or t
  misc_feature (3008)..(3073): n is a, c, g, or t
ttttttttgtcataagacaagcagtttattgtttaaaaaatgttggactatattacaaactactaaagtctaagggaaactaaattcatttacatttttaaaatgtcatctatattgtaaacaacattagttgatccaacgtgcagaagcctatgacgattattggcacttctgatatggaggtgaagttctggaagtgcttccattcagaaacttattgtagaagaagaactgcaggtggctccatgagggacacacacaggtactttgaagccttgtacttctccctaattgcttgctgaggtcgatgggggtatatcaaggtacgctttatgaagctcactcaggnaagggacaatttcacttaatgaataccctgtaaatgcagcaagggtttctggccaaaagtgcttgttcacagtatagtttgccaggcaaaaagctgctgcagctatcagtgaaggaagatatttcaagaatggatctgcttcaagtagactcagctctgctacgtacttagccaggttctcagtcctgacgcacactccttgtcgcctcaagtactgaaggagaaactggttggtggttggtactgtcagatcaaaagctaganctttcagaagcaagtgttccatttttaacagttgtcgttttgtgtatgtatcatcggtgatatagacaaactcgtctacttcaggnggatatatctcttcatatttcgaagccaaaagcatagctgctgttcctacgagctgcagtttccctctcagaacaagacatacaatgaaaggaacctgtccaggaagttgacagccagatacagggtctctgctcgaagtttatattcttccccaaacctccaccagccagtccaccagaatcgtgcgcatgccttccgtgatgtctggctgcttcttcatgtagtgtgctttgggtctgtgccttatttcagcttccctaaggtactgataaatttcttcagcatattcagtcacatttatcacatctgtgccaagactggatatatcttcagactgggagaggagagatgaatctaccagcataggggaaactgtgttgaaatccagcaggaagtgcaggtctgacttgagtgtgccggtgtctacttcatacacatcctcaaatgccatcccctctctgaccgagcagctgtctctgtccccctgctctagttcatccatgtagatgtcaaacccttgcttggggggctcttggaccccacagtcagggagtgctttctttccagctggagggaaggcattttctgatccagaataacacctgattcttgtgatcccctggccacaggtcctcctgtactgcccatttgcagttagcagccctagcactgtcctctgcgggggatcctggcccagcggggctctggtgagtatctgacaagcatcgggacctcgggccactgtagccagcacaactccactcttggggttgctgcagtgcattgcttcagactccacgggctgctggaagacgaaatctgggagccccggtccttcccagctgagatactcttctccccagcccccaataaaagatccagggtacatgattgcgggaaagccggtctccatcccaagtgacgagcagggtgctgcgctgcggcctcctcccaccagacaggaggccccaaaacctgcctggaccccaaagcgggccccgctcttcccgtcgttatctttctatgtgtccggaacaactggcaagtgcactggaggatcgcggttaagaggtggccggctgggcggggcannnnnnnnnnnnnnnnnnnnnnnnnnnnnnnnnnnnnnnnnnnnnnnnnnnnnnnnnnnnnnnnnnnnnnnnnnnnnnnnnnnnnnnnnnnnnnnnnccaagtgtcgagggattccagcctgggaggcggccgggcttagcgatgcggctgagctgcccacccgcgtctgttgaatcggccaatcagcggcgcccccggacctagcgggagcgtttccatgccgaccgcggcaggcgtgcgctctccggggccgcatcgccatggcgacctgctcacctgactcgctccgggtggactctgccgcgacccctgggcgttcaggcccctgagggcccaacgggcgacggccctccagctccagctgtgcgtctccgcccgggcgaggtggggctgaccgcggccgtctgcacacgtcccctctggtccgcgcccccggcctgggagggcggactcgcccaccccacgatggccccggctttggaagggactgtttccgtgacccgttctcccaacagccgctaacaaccccctctaacgtctcctgcgcggcccgctcctgagaaccctggctcgggagagcgacgcggggtcctcggggctgcgcaggctgcggcgccctgcccacgctggcccgagggcgctggctcgctccgggtcggctcacacacctacgcttcctgccgggaggcggctgggacgcggcggggctgccccaagtgcagtcgcggcagtgttgcgtctccatcgcgggggtccttgcgggccgcgcctgccccgcccggctcccggtgcatgtggcctgcgaggctggcagaggagatgtggggatttagggtcgcacgtcgtgctcgaggtccccacgagaggtcttcccccgcgggctcctgcgcaactgcgtgaagccggcccgggaaagccaagattgtggcccaggaagaggaaggaacgcgggcgacagaagctggggcttgggacgttgacgggggtccggtggcagctctccgggcctgggggccgggcggggcgccccggccctctgtttcaaagaaccccctggggtccttatacggggggcttcctggaaacccggggggttccaaacgtcccccttaggtgaaccctaaaccccagcggcaaccgatcccacatctattttttctcaataccaccctcgcctactatagcacccgtcaccttacaaagctgcgaataaacnnnnnnnnnnnnnnnnnnnnnnnnnnnnnnnnnnnnnnnnnnnnnnnnnnnnnnnnnnnnnnnnnngctaccctgaaccctcttcttggggccccgattcacccgactctcacgacagccaaccactaacgcatgaatatgtgccccccgccatatccaccacttcccgtaccccttagtatcccgctccgcaccccctctctccggccgacgtacgcacatactaatctaacaagaccaccccccacacaacccacactaacta

SEQ ID NO: 441169 - DNA, 1841 bp, Homo Sapiens
tttttttctcagtcggtatggttttattggccatatcaaaagtgagcacaaatcaaataactgcttgatccctctgctaccacccactgagaggagaaaagtcatttagttccaagataaccttggttccaggctagatacagaggggcccttgggacagctgtgtcaccaactctggagcagtctctggaggcaagtccagagcattaacataaaagtgtcccagtcccacagtgccccaggtcccagcacccctgctccaaccctaaccttggatacttttggccctttaacaaatcgccacctctgcttgcaggacttgatcccatgtgtgggctccaaggccttgtctggcccacaccttctttagtgtctctcacttccgtgtcctggcttcctcctggctccagatgagaatgtggtaacccattgcagaggccaagcgtgtcccccatgggattgaattcattaagcgaactgatgccagaagattctgggtcatagagctgacacatcatcttccctgagtttccatcgaacacgtcgatcgtcctcaattcataaggggtacaacttttgaaattaggatctgggtatcggcccacaacaatgaggttgtagcgaggatgccaggctgccttgatgggtgtgaggtgctggaagtgacggtgagggtgcgggatcaggcccagggggcagtcccactgggaagcagagtaaactcggatctcgctcttctggtccgtggtcaggagccgggctccatcgggactgaaacaagctgcgttgacaggatgcctgtgcggcagcgagtagaggaagctggctttccctctaacctggcgcaggtcccaaattttcactgtttgatctacggaggctgtggccaggaaccaatcacagcatgggttcagggccacatgcgtcactttctttttgtgcattctgagattccaaagctctttgccgtccatgttcagcaggatcacgttccccacgttgtctcctgtgaccaccattcggctactagcagacacatccaggctacaaaaccagatgttgatggtgtctgagctggcaaaaactcgtagaatgttgcctttaaagtcttgcagcctagttgttccctccattgaggaggcgtaaaactggttggtattgagagggttaaacttcagcccagtgatgctccctccagctccaatccctttgatgaaggtgggtttgtccttgatgccaaaattccagagcatgatatctccccctttggaacccacagccacggtgctggggtgagttgggtgccacgccaaggatgtagccctcctgtcaaagggggcagccttttgtaatatccggtaagaatccagagtgtgcaaaaaggactgctggagcccctgctggacagatggccaggaagctctgcccagcttatgctggtggagggtcctgacgatgctgcggcatggtggcaggatctgtgggccagccagccccacccagaggcagtctgagtcacatcttctgctaggaccggagcccttcgcacagagcttcttggcctcgggctccagctccaggggactcctgctcctcttgttcctggggcgtaatacaatctcggaggtcttctgggtttctgggcgtttcttgggagccatcgcgtcctccgtgtgaaggggtactgtgctctatgcgaagatcatggagggaggattgagaggcctctggggagaaacaaggcggggactacaaaactgcggggccacaggtagccgagctaagccaacttcccgccaaacatgcccagggcttgttcaaaccagcttggagctccggcc

SEQ ID NO: 441170 - DNA, 460 bp, Homo Sapiens
tcattcattcaacaaatatttattgaatgcccgctgtgggttagtcaccggagcggcaacagtgagtaaataggactatctctgtccccaagaatcttacaacacagtctctccctccagcatctggttttgtagcctggatgtgtctgctagtagccgaatggtggtcacaggagacaacgtggggaacgtgatcctgctgaacatggacggcaaagaggtgcgttctccgaggtcctgcctttccctccctcacccccacctcggttctgtgtccccacctgaaccgagctcttctctgcagctttggaatctcagaatgcacaaaaagaaagtgacgcatgtggccctgaacccatgctgtgattggttcctggccacagcctccgtagatcaaacagtgaaaatttgggacctgcgccaggttagagggaaagccagcttcctctactcgctgccg

SEQ ID NO: 441171 - DNA, 730 bp, Homo Sapiens
  misc_feature (719)..(719): n is a, c, g, or t
ggcatttcttggcattcgagatccaagctcttgccgccatgttcagcggatcacgtccccacggtgtctccgggaccaccatcggctaatagcagacacatccaggctacaaaaaccagatgtgtgatggtgtctgagctggcaaaaactcgtagaatgttgccttgtaaagtcttgcagcctagttgttccctccattgaggaggcgtaaaactggttggtattgagagggttaaacttcagcccagtgatgctccctccagctccaatccctttgatgaaggtgggtttgtccttgatgccaaaattccagagcatgatatctccccctttggaacccacaagccacggtgctggggttgagttgggtgccacgcccaaggatgtagccctcctgtcaaagggggcagccttttgtaatatccggtaagaatccagagtgtgcaaaaaggactgctggagcccctgctggacagatggccaggaagctctgcccagcttatgctggtggagggtcctgacgatgctgcggcatggtggcaggatctgtgggccagccagccccacccagaggcagtctgagtcacatcttctgctaggacctgccaagcaggacagacatattttcctctccaatctcacgaaaggtttttctgctgaattccccgaaaggaagccttgtttcattcggcacggttaatctctgtctcatcaacctnctgcggccttt

SEQ ID NO: 441172 - DNA, 935 bp, Homo Sapiens
tgcctgtacggcggaagtttgggatatgtgaccacgcgtcgcgccgccgggccggcgcacggcgggcacctgcgagcctggaggtggcggtcgctgcgaacccggcggcgcggccaaacctgtgctggctgcctgggccttctgggcctcctgggccagaagctggcgctgggggcggcggcggggtgggaaagcggcgccgccgtggggcctcctggacgcgtcggcggaggtggcttcgtcccgcggagtccaggcttcaggctttcaccagttctcaggatgcccatagggatgggtgaagcctgcctggcctgtggtgctttccagtggccgtcatctcattagggccccacagtggcattaggatgcacctctcggcggtgttcaacgccctcctggtgtcggtgctggcagcggtcctgtggaagcatgtgcggctgcgtgagcattgcagccacactggaggaggagctggccctcagccgacaggccacagagccagccccagcactgaggatcgactacccgaaggcactgcagatcctgatggagggcggcacacacatggtgtgcacgggccgcacgcacacagaccgcatctgccgcttcaagtggctctgctactccaacgaggctgaggagttcatcttcttccatggcaacacctctgtcatgctgcccaacctggggtcccggcgcttccagccagccctgctcgacctatccaccgtggaggaccacaacactcagtacttcaacttcgtggagctgcctgctgctgccctgcgcttcatgcccaagccggtgttcgtgccagacgtggccctcatcgccaaccgcttcaaccccgacaacctcatgcacgtctttcatgacgacctgctgccactcttctacaccctgcggcagtttcccggcctggcccacgaggc

SEQ ID NO: 441173 - DNA, 1054 bp, Homo Sapiens
  misc_feature (5)..(5): n is a, c, g, or t
  misc_feature (24)..(24): n is a, c, g, or t
  misc_feature (29)..(29): n is a, c, g, or t
  misc_feature (37)..(37): n is a, c, g, or t
  misc_feature (42)..(42): n is a, c, g, or t
  misc_feature (50)..(50): n is a, c, g, or t
  misc_feature (52)..(52): n is a, c, g, or t
  misc_feature (64)..(64): n is a, c, g, or t
  misc_feature (103)..(103): n is a, c, g, or t
  misc_feature (163)..(163): n is a, c, g, or t
  misc_feature (167)..(167): n is a, c, g, or t
  misc_feature (173)..(173): n is a, c, g, or t
  misc_feature (188)..(188): n is a, c, g, or t
  misc_feature (192)..(192): n is a, c, g, or t
  misc_feature (251)..(251): n is a, c, g, or t
  misc_feature (256)..(256): n is a, c, g, or t
caganggcaagagtacgccccacngcacnatggacantagcntcccacgntnaaatgcaaaaancagtttacccccacatagctccggggagtacatgccttngtttcttctgcaacatgggccacagggcaaaaatctgaatggcaaatgtcaccatgatgnaggnatgcangggaccggggaagangtgntgccaagcatacagaagcaaagatggccatgttcaaggatagtgtgctggatacaatgncagcnttggcaccatagtcaaaaagatgagatggcctaacagcatgaagactgaccatggcatagatggtgtcagtgctgacagactctgtaagggtcttcagcactggtgaaaacccataagtgaaagtaatgaagactagggcactcttcaggtcagcccaccgggtctgcccactcttcttccgcccttcacctccatcaatgagatcagacaaaacatacccaatcagtgaagaagccaggccagtccctaaaagccaatggggggccagaagaccctcatccatataccaccagataaccacaaaaacacaaacactgcacagctgctggatcaccacactggactcaaataccacagcccaatattggtatttccgagcatggatgtttttccggagctcttccaggaatcgccggtccacatagttatcaggaaagggctgtcgctcatacaagaccttctgccacttgacctccttggtgttagtcacaggttgagcatacattatcccttcattcaaactcaggccagtttaatcatcgccctcacagaagtccaggtggttcttgttctttatgaagttttgaaatgagacctccctggaaattccatgctgtgttgatgttctaccaacctttccttgttttcaaaggcaggggctaggcctacaatagatgaatttgtctctgaggcaggacaacacagccaagttcctagaaaaagagagactgtgaacccgagagttcctagggttgcgcagctgggggacggcggcacccagcctttttcccgcttcg

SEQ ID NO: 441174 - DNA, 1501 bp, Homo Sapiens
  misc_feature (580)..(580): n is a, c, g, or t
tttggatgtgttatttttttaatagaaaccacatcacttcatatgttacagcatgtaattcaagaggtccccaaaaagttttttcatctacaaaataacagaaaggataagcaccctcaccacccaagcctttggttcattttttttggttttgatctctattctcttaccacaatgacatgctgcttccagaatggaactctgtctttaagttctatactagttaggaggctaatctatcagcttgctttaataatgtaatggatgtcctaatttaactgaggaacctggacaagtcttccttgatttcagcttcatcccaaggcccatgaatgttttctttaaaaagctgcaagcgaatgaggtagaatggacacagacatgagatagacatcagcagaagggcaaagagtacggctcccacagcactaatggacagtaggcctcccacggctgaaaatgcaaaaagcagtgtgacccccacatagctccggggagtacatgcctttagtttcttctgcaacatgggccacagggcaaaaatctgaatggcaaatgtcaccatgatgaatgcatgcangggaccggggagacgtgatgccaagcatacagaagcaaagatggccatgttcaaggatagtgtgctggatacaatggcagcattggcaccatagtcaaaaaagatgagatggcctaacagcatgaagactgacatggcatagatggtgtcagtgctgacagactctgtaagggtcttcagcactggtgaaaacccataagtgaaagtaatgaagactagggcactcttcaggtcagcccaccgggtctgcccactcttcttccgcccttcacctccatcaatgagatcaaacaaaacatacccaatcagtgaagaagccaggccagtccctaaaagccaatggggggccagaagaccctcatccatataccaccagataaccacaaaaacacaaacactgcacagctgctggatcaccacactggactcaaataccacagcccaatattggtatttccgagcatggatgtttttccggagctcttccaggaatcgccggtccacatagttatcaggaaagggctgtcgctcatacaagaccttctgccacttgacctccttggtgttagtcacaggttgagcatacattatcctttcattcaaactcaggccagtttaatcatcgccctcacagaagtccaggtggttcttgttctttatgaagttttgaaatgagacctccctggaaattccatgctgtgttgatgttctaccaacctttccttgttttcaaaggcaggggctaggcctacaatagatgaatttgtctctgaggcaggacaacacagccaagttcccgagagttcctagggttgcgcagctgggggacggcggcacccagcctttttcccgcttcggggcgccggggctgcgactgtggccaagcacttccgggtcccgggaatccggaccggtccagcc

SEQ ID NO: 441175 - DNA, 1431 bp, Homo Sapiens
  misc_feature (152)..(166): n is a, c, g, or t
  misc_feature (1219)..(1219): n is a, c, g, or t
  misc_feature (1248)..(1310): n is a, c, g, or t
  misc_feature (1343)..(1354): n is a, c, g, or t
  misc_feature (1395)..(1395): n is a, c, g, or t
atctacctcaaagaaatttcaagattatttagataacatggatatgtgccaaatcctttgagctgttaagatgataatttcctgctttcctcctacatcttctcctcccactccctcctttggtgtgaatattggcttcccaattaagaccnnnnnnnnnnnnnnnccagtttgttttagcttattataggttttggaggaactttgccattttgtaatctttcaaatcattcttcacccttcctcacatcagcttcctgcttttcccagtgttttactgtaaattgtgtagcatatgacaaatcttgagctgactttcctcttcacctgttatggctggagtattttccagacctgaagggactcacacttgttttgatacttggatcacatctccgtgaggttaggaaggtaaatctaccaacaggaagccctgtactctgtattccaaggccattggtaaatgtgttggtgccactgatcggactgtatgaccttaaacaagtcaccttagttttcagtgaaatgggaatatcattgtctcctctttcatgaatgctgtgagaatcagatgtgcaacaggtacagacttgccctttgaaatctatacctctggatacattagaggcattttattaacaaaggcccttctaaatgtgctatttatttgacaataactatcagatttgccttaattttgtgtttatagcatttatcaaaacgtatcctcatagactttatgcagattaatatggtcaattgatttggataaaagaaagtaatttcagggtttgtttttaagccaggacaagaagtgcaaatgcctctttgaagcaatttaggctaaactgattttgaaatttccaaaatgttttattttactttgttttattaagccaggacaagaagtgcaaatgcctctttgaagcaattcaggctaggtaaaccgattttgccatttcaaaacgttttattttactttgttttatatcagagtcttataaaacctgctgcaaatatttctgaatgtctttgtaaaagtgtttgttagtgtacctgtgattatagtacttcacttttttcctttggattaattggttaaatgaatgagaaatgtgttatgttttttactaaaaagtataaattaaaattttggaaagaaaaggcaatatttatctggctccccaatttaaagtttgattttattggcccccaaccntacaccattaaaataactacatacaaacnnnnnnnnnnnnnnnnnnnnnnnnnnnnnnnnnnnnnnnnnnnnnnnnnnnnnnnnnnnnnnncactaaaccataaccaccccttaaacatctttnnnnnnnnnnnntaccatgcccacccactgcccgcagtcttcccacataacgnacgaatgctcttcacgagaggttgccacaccccccc

SEQ ID NO: 441176 - DNA, 1794 bp, Homo Sapiens
  misc_feature (4)..(4): n is a, c, g, or t
  misc_feature (20)..(20): n is a, c, g, or t
  misc_feature (25)..(25): n is a, c, g, or t
  misc_feature (34)..(34): n is a, c, g, or t
  misc_feature (37)..(37): n is a, c, g, or t
  misc_feature (43)..(43): n is a, c, g, or t
  misc_feature (45)..(45): n is a, c, g, or t
  misc_feature (55)..(55): n is a, c, g, or t
  misc_feature (77)..(77): n is a, c, g, or t
  misc_feature (97)..(97): n is a, c, g, or t
  misc_feature (101)..(101): n is a, c, g, or t
  misc_feature (115)..(115): n is a, c, g, or t
  misc_feature (126)..(127): n is a, c, g, or t
  misc_feature (166)..(166): n is a, c, g, or t
  misc_feature (170)..(170): n is a, c, g, or t
  misc_feature (231)..(231): n is a, c, g, or t
  misc_feature (275)..(275): n is a, c, g, or t
  misc_feature (343)..(343): n is a, c, g, or t
  misc_feature (356)..(356): n is a, c, g, or t
  misc_feature (545)..(545): n is a, c, g, or t
  misc_feature (603)..(603): n is a, c, g, or t
  misc_feature (698)..(699): n is a, c, g, or t
  misc_feature (702)..(703): n is a, c, g, or t
  misc_feature (1493)..(1493): n is a, c, g, or t
ctgnggttttgatttggaanggtantcctcgagnttnggagtngnaagcccatangcacccctccccctttcctcgncacccacaacgtgaattgcnacanttcagccttcactnggctgcctcanngggagaggtagcaataataactttatgggttggttttgntttntggtagggttgggagtccttgatgagatagcacagctgccaggaaggcttcatcgaatgtntcacgcaggttcatggccagagtgtcggtccagaaggtgttgtnacccaggtgccgcttcctgggcacttccctcatgctgatggggtaaaagccctggggcaccttcattntgtatggccatanacgtgggtacagcatgcgcagagcacctcaaaaggtagccgcggcacgggcgccacccagtggccgtccactgtgtgcagccgcgcaccgccgtgcccatcaggcctcacctccaggaagctgctgaagtcgtgctccggagtggggtctggatgcacgcccaggcggatgccctgcgagtggctgatntgggtggtggggggtctggcggggttgttgctaacattccacattgtggccgcttgancgtgggcttcctgtagatgggcttgggcatctccgtgggctgtggaatgcattgcaggcgtgcatccacagaggggtggaagctcctggaacgcnncgnntcccgttgctctggggtcttggagagggcggtggcccgggcttgcttggtattggagagcagagagtggcctgggtgcagcttgccgtggagccactttctgatagcagcttctctgagaattttgtgctctttagaaagacaattcccttcttctccaaaggaatccacagtctgatagtagagaaatgtcctgccataggagagtctctggtgtgatgggggaaaaggcaaatggggagtgcacactgcatctttgaccttgatactcaatcaggtagttgtgctccatgagggtcagctggctcttgaacatcttcattttcgtcatctcacgggcaaagtccttcttgtcctttttccacatggcatccttcaagaacgcattgaggtctgcgcctttctccagcaggtagtagatgcaggggagggccacggtggtgttgtccctgtggatgacgaggtgcaggggtgtctggctattgttggtcagcaggtccacgggaaacttgtactcctctaccaggacctgcaggcatgcaagcttgccccattgggcggcgaagtggatggcagtgaagcccttgtcgtcggtggggatttccctgaggctctggttcagacagaatcgcagccattccacgttgcccacagccgctgcgaacagctggtagtagctcccgatcgccgtctggtcgattgccgtctggtcggactccttgctggggctgggctgcttggactccgcgtcagtccaggtggccttcaaggagactttgttcgcctgctgnatggagccacttggagttggctgcggccgagcacctctcccttctcccctttctgagtgccagcttccggagcccgcccgccgagcggtgctgcccgcggaggccatcgcggggctggaactcggacccgggccgggcgggctactcacacacccgccggcgccccgcccccgggggccactccttgccagctggccgcggtttcccggccccttccaggccgctagggttcggctgcctctctagctggagggcagagcccgggggcctccggggaccctgcccgtcctgccgctcccca

SEQ ID NO: 441177 - DNA, 1625 bp, Homo Sapiens
ataaaccattccccccattgggggggcccgctttgacccggggggctttccttgtaagaatggggctttgggccatcttcccgtggggcctttggaatggcaattgcaggggggtgcattccacggagggggtgggaagcttcctggaaccggtgggatttcccgttgttttgggggtctttggagaggggcgttggcccggggcttgctgggtattggagaccagaggagtggcctggggtgcagctttcccgtggagccactttctgatagcagtttcttctgagaattttgtgctctttagaaagacaattcccttcttctccaaaggaatcccacagtctgatagtagagaaatgtcctgccataggagagtctctggtgtgatgggggaaaagggcaaatgggaaagtgcacactgcatccttgaccttgatactcaatcaggtagttgtgctccatgagggtcagctggctcttgaacatcttcattttcgtcatctcacgggcaaagtccttcttgtcctttttccacatggcatccttcaagaaccgggcacaggcacggtggttccatattttgcagaagtcaatgggtttgtagcccatggcatcttgggcatgcgactttggcgccaactctgcaccaggaccttcacacagttccagcaagccgtcacgggctgccaggtgcaggggctgtggagccgttgcatgtctgagcattgaggtctgcgcctttctccagcaggtagtagatgcaggggagggccacgttggtgttgtccctgtggatgacgaggtgcaggggtgtctggctattgttggtcagcaggtccacgggaaacttgtactcctctaccaggacctgcaggcatgcaagcttgccccattgggcggcgaagtggatggcagtgaagcccttgtcgtcggtggggatttccctgaggctctggttcagacagaatcgcagccattccacgttgcccacagccgctgcgaacagctggtagtagctcccgatcgccgtctggtcgattgccgtctggtcggactccttgctggggctggggtcagcgcggggcggggtgagcgaggcagggcggcgcggcctggcgagggcagtcgcctgcgcactgaggtggtctgcgaggtcgggcaggggctggctgggctgcttggactccgcgtcagtccaggtggccttcaaggagactttgttcgcctgctgcatggagccacttggagttggctgcggccgagcacctctcccttctcccctttctgagtgccagcttccggagcccgcccgccgagcggtgctgcccgcggaggccatcgcggggctggaactcggacccgggccgggcgggctactcacacacccgccggcgccccgcccccgggggccactccttgccagctggccgcggtttcccggccccttccaggccgctagggttcggctgcctctctagctggaggggcagagcccgggggcctccggggacactgcccgcctgccgctccccacccgccgctctgctcccggtctgagccaaaacccccactcaacctcccagtcctgctgcccgggaaactcagatcccgggaattccggaccg

SEQ ID NO: 441178 - DNA, 1837 bp, Homo Sapiens
  misc_feature (717)..(744): n is a, c, g, or t
ctttgttcctttttcagagtttcaaaatattctcatctgttaaattaagagtgtctcccatagaaaagcagtggaggccccacagggcaagtacaaaacagaattaaaactcccaagggtcttgtctttacaaaagaaaaggcaggaggcagcccctggacagctggtcatgctggccgctccggttggaccacgttgcataatcctcagtcgcatcatcacaacgtctctgagcgttttgatggggggagaaggggcagtgtagtgtgtatgggaggagaggcccagagggctctctttgcccccttacccccttttttatatcccagaggaaagtcgggggaacctggctacaccttgaaatgaggctatgtgtttcaaacctggggacggggtaagagaggatctgtgctttgagcaacctgagccagaggcagaggggtgttggaggggtaaggggaggatgcatgatgcttattgctttgtacctttcactgggaaggagggcagcagccaacagtagctcacaggtttgtaaactgagcctgttggctttaagaagggaggcaatgaaatcgaattaaatataaaagagtcatttgtgcaaaaataacttaaacaaataaaagacctggggaagggggtgttccccttagcgcctggtggggaaagggccatataccatcccccccaggccttttcagtgacatggcttcnnnnnnnnnnnnnnnnnnnnnnnnnnnntgaacttccctgccccctgcaatggctcaggatgggattgtaggggaaggagttgcatttgtgctctgagtggggagtagtgcccccacccactgtccacaggtgcaggtggctggcaggggctcccaaggctcagcactcagctctccccaatcagggtcagatccagctccaggtatggctgctatggggccagtttcctcctcttgtttttggcaggacggccagggcgggcccggggaggcagagggacagctgctcgggctgtagggctgggttccaaggtaatgtcctggcgggagctattgctgttccgggtagggttgtattttctcctacggccacgacgagactttctgactactcccgggggcaccttaaggtcctcagaatggggcccgggagggggtggatccttgggctcagcacccccttcagccagctccccattatgctgccaatggtgggttcttcttggggacctttccatttgtccattgaagccaccacgtgtcccccatttgagggccagtcggccaggctcccgccggctgccaggctttcggccccgggctggcctggcctcaccattaatgcccctaagtccccctcctcccctccggccccgtttccctgaccccctcccagtgagcagctcagggactggggggtcgggagaaccatggggtggggctaaggcactgaggggaggcctggcaggctctggttcgagggctgaggcagggctctcggggggtagacagggggcttctggctgctctggagggatctggagactctgtagcaggcaggctaggggactagaagcctctgagaggggtggaggagctccccccccagggaggagctgcagccccaactggccagagagaagagggccaggaggctgcaacaggctggggagggctccagggctgctggtcagtgaagacaggtcacccagcaggtctggcacccagacagagggctaaggtagttagaggggtcgtcctgagttggagggggcctctgcccagagaggagcccccgggtcagtagtgccgtgtacatggagtaggtgatcctcctgtcc

SEQ ID NO: 441179 - DNA, 881 bp, Homo Sapiens
cgcgtcagggtgccggctccccgcctcctatggctctcgggctgtctcccggcggcccgatcgtgtccctcacgtcgttggtttctctggccatcggacttggccgacgtgccgcggccccctggggtctcgctacgacgtggacaatccttgcctcggggctcgcgtaccgctgctgcgggtctcccgtatcgggtcgattgtgcttgtggtccgtggcagcctctgtcgcctgcttcctggcctatgggtgtcgtagtgtgtcgcccctatccgccgtcgccggagtcgtcttccgtgacctctcctccgccgtggtggccaccctttgtcggtccgtcagttatggggcgcccggtgtaggggtgctgcgactcgcttggctgctccgagcaccgcgcgtggtccagccaagtcgtgccccatgtatgctcgcctcgtcgtttggctttctgtcgttgggggacctgcgtcgcatcttgtcccagtttgaacgccagccaccgtgtccacccatttttgaggttcatgtcggcctagggttccctgcctggttcgccaggctttcggtcccggtctgtctctggcctcaccatgaatgcccctaacgtccccctcctcccctcctggccccgtttccctgaccgcccctccgcagtgagcagctgcagggactcggtgtggtgtcgggacgaaccatggtgtggggctaaggcactgagggggaggcctggcaggctctggttcgagggctgagggcagggctctcggggggtagacatgggggcattctggctgctctggagggatctgctggagactctgtagcaggcatgcgccacccaggcctcgctaccttagaaccgttatagttactgccg

SEQ ID NO: 441180 - DNA, 1151 bp, Homo Sapiens
ggggtggcctgccgcctggcgcgtagcagctgcggtggggttgttctcactcttgccgttccactgcgtgagacccctgatcgcaaggggggcgggtaggcgcgggtctccttccgttatcaccccgcaggcggggaggctaacaagagtggtaaagcctagattgaagtgacaacccggtcgggggaaggcccgcgggatgctaccccctgctggggatccccctatcggggggggagttggggccattccccagtttgggcaagagccgcccggagggccatttagaagccccccgtttcagttccaaaggccgttcccctgaagcccccgtgtgactctgacaggagctgggggtgtccaatgtcctctctggaccctcagttcctgtaaaaaggcccgttggccagatcggccgccgggctgctcacaggtgcacgggctgcacgtaactccgtgggaagaagccaacgcgcccgcaggaccggccccgccaccagtgggggtctgggcgctccaggacctcaatgatgtcgccacggcggaagctgagctgcgaggggtcctgggctgagaagtcaaactgggcctgggcaaagcaggccccaggtgacttgagcaagggctcctcgtcgcgcaggaagatctgccgcttcttggcgatggtggtggtgcggtagaagtcgaccagctcgttgagggagttgaacttctcctcccacaggaagtacttccccgaggcctcacgcagcaccttgaagtgctgcacctggtctccatagttcacagacacagagaactcccctggggagctctcactctcccggatcaggaaggctcccagatggttccgcttcatcagaatctcttcggccagctgccgggaaatcctgcccgagtaccacggatggggcttgacgcggatgtagttcttgggaataaatccctcgacaccccggagctcggccttgtaccagttctggtcatcctccatgttcaggatcttgagtgtgtctcccttgttgaaggccagctcgtcgctctctgtagcctgaaagctgtacagggccacggactccatgccgctgctcggggctccagcagctgggctcagagctgggccgacagcttcctgcttcctctgcagtcga

SEQ ID NO: 441181 - DNA, 1524 bp, Homo Sapiens
cgcgggggcggtggcgcgcggtcagctgacccggcgggccttgacccagaagctgggccctggcggcggatctggacgtggcggcccgcgccgggctgagtcaccaggagggagctgtggccgaggacgccgaggcctggagtgggtggtagccccgagctgggacgctcctccctccacaatctccccaggtctgcagggaccgagggcctacactgcctcctcccacgccgtgcttaggaacccttgctggcctcagaacaccagcgccctccctccggtgcagccctgcctggccgggggcccctcctccacagccatggtctggaagaaactgggctcccgcaacttctccagctgccccagtggctccatccagtggatatgggatgtgttgggtgaatgtgcccaggacggctgggacgaggccagcgtgggcctggggcttgatctccattctctgctttgctgcatctaccttcccccagttcatcaaagcctacaagacgggcaacatggaccaggcgctgtccctgtggttcctcctgggctggattggcggagactcctgcaacctcatcgggctccttccttgctgaccagctgcccctgcagacctacacggctgtgtattatgtcttggcagaacctggtgatgctgatcgctgtacttttactacaagttcaggacacgcccctctctgttgtctgcccccatcaactccgtgctgttgttcctcatggggatggcgtgcgccacaccgctgctgagtgctgctgggcccgtggctgcccctagggaagccttccgggtggcgggcgctcctgtccgtggagtcgggcagcaagcccttcacccggcaggaagtcattggcttcgtcatcggactccatctccagcgtgttgtacctgctttcccggctgcctcagatccgaaccaaatcgtgcacacctcctgtgtgccaggcacccagctggaccctggagccgtgagtgagcaagaacagccatgagtgccccagaagcttacagcccagacggggcgcagacgaggacacaaccgctatcatcaaagaattacattcattgcagtggaaccaagctgctgcacagagaaaataaacaaagaagagcgtctagccaggacccgtacctggttagaggggcagcaaaggcccctataagtctcatatgaacctgtgactgacagcagaaggagaagtcggcgcaaggcaggacacggaatgttcctaggctgtgcagcacctagacttgaagatgggagacgacacatgacttggtcagacaacccggagtaaaatcctggctcagccctgcatctagcgtgttaagcagggcaaaagcaacactcgagcagcgggtcaccctcaataaagacacgacgcagcagacgtgagcaaaaacgtacggaacaacccaggacccgctcagcaggcccaatgtagtcacgctaaaagtacggacatcagcacaacgataaaaagcactacgcagagaataca

SEQ ID NO: 441182 - DNA, 1760 bp, Homo Sapiens
  misc_feature (753)..(753): n is a, c, g, or t
ttttgaattaccatgcactttattgcctcctcttggaaacatccttatgtcattgcgctatggccagagccccgaaggacatctgctctccttgggagctgctgagccagggtgcccgtgatgtcttcagaatccttcagtcccgactgcaggagaaacttggcacaggccaagtgctgacctgcacaggccagatgcagggctgatcgatttttttcatctttagaattgatgtcagctcccaaggataagagagtctgaattgtacttgtatgtccttccttagctgcataatgaagtgctgtgaggtgggttgatgtggctctcacatctacatcgacgccaagttcagagaccaagaatcggatggcttcgtcctgccctgtgacagctgccctgtgcagagcctgggcacccaggctgtcttctgctgaaaggcaagccccatgttcatcggaggagcagcctagcgacgtcgatgtgaccacactggattgcgtccatcaaggcggtgacgccacagttgtctctgtagtctggttcatattggcacctcttaagaagcaccttgactgcctccaaatggccatgcattggtggagtatggagaggagtctttctaattttggtctctgtcttccagggacctggggaaacagtgagcaggtattggaggatcagagggtcgccttctcgactggcaatgtggaaactgttctagccatttttgttcttcaggagtggattggtgcnatgttccaccagctcctggatcacccccaggttcttccttgtgcaggccatcatcagaggagtccagtcggcacttcttcaggcagtcgaccgctgccccccgggccagcaggtagcgcacgcagtctcggtggcccatggaggccgcctcgtgcagaggccgcttgtagtctcggttggtggcctcgatgtccatgccccaggcctcggccagataggccagcacgtcccgatgcccgtggcgcgcggcgcagtgcaggagggtatccccggccggccccgggcagcccccggccgcctgcagctcctccttcagggcgcgcagccggccctcctgcaccagcctgcagaggcgccgcgggtccccgggctgggccatcgccgcgggtcgggccggctgcgcggggaggcggcgggcgggacaccggcggccgggcagggagaagccgagggcgagtgggactttccgcctcttcacgcaacctgccccgcgcgccccgaacccggcagaaccgcccctcacgcccccggctttgtccccggcagagccgcctcctcaaacccccggcctagtccgcaggcgggctgccccctcacagccccggcctgccccgcgtgggagaagccgcggttccgggcacggggcggtttttcctcagggacggagcggtccgggatgagcacggaggggcctggggatccgagagcgctggcgtccgccgtcctggagctgcagcggcccgtacgtgattcgggactgaacacgtaagggagtggggcgcgccgctacaccgcaaagccccaaagtggagggtccgggagggcgcgcacagcctcgcccggcgccgtgcagggtggctcctgaggcagccaggcccaagcgtgacctgccccgcacgcgtcctcagggccgccccagcctccagcacctgggggccggcgttcactgggctcacgcccaccgtccccgccacctcgaccgccgctgctccgcggggactcccgct

SEQ ID NO: 441183 - DNA, 1175 bp, Homo Sapiens
  misc_feature (1086)..(1086): n is a, c, g, or t
  misc_feature (1088)..(1092): n is a, c, g, or t
  misc_feature (1108)..(1108): n is a, c, g, or t
  misc_feature (1115)..(1115): n is a, c, g, or t
  misc_feature (1133)..(1133): n is a, c, g, or t
  misc_feature (1144)..(1144): n is a, c, g, or t
  misc_feature (1151)..(1151): n is a, c, g, or t
  misc_feature (1171)..(1171): n is a, c, g, or t
ccaggatacgtatgcgtgtacaatcacctgagtactatatattgtacccagtatgtagtttatcctatcccccttccctgttccgggtctccagtatctgttataccactctgtgtgcttacctgtagcttagctcccacttaaagtgggaacatttggtatttggttttccattcctgagttacttcactaagaataatagcttccaatactatccaagttgctgcaaaagacattttttatggctaatattccatgggatatatataccacactttatccattcattggttgatgggtacttaggttggtcccatatcttttattatgaactgtctagccagtttttaaatagaaaagtactgattaggtgaacagttccttaggaattaaattgtgaaggggaggggacacagcagagaagtaatctgttggttcttttgagatattgaatacatgtcccaaatttgctagctgcttaactagcaagttaacccaaactgtcagagtaactgaagcaaatatgtccaactgggacataaggaacatgagatttgtgtaataagtaggttatctaacgtgttcatgtgtctaacactttctagctattttcaagacagacttatcaatactgtgtttgctttccaatttaatctgttacaaatacatatgaagaatctagttggtacaggctcagggaggatagaaagataggtagacgggtttgtgctgttaggatcctaccattaggaaggattaggaagagaagccctccatgcccatactctgcaagggggaacaaggtaagagccacaggagggaacaaaatgctatggggactcagtagggataggtcagaacaggctggatcctgcaaagcttattactgagctgggcaacaacgagcatgatcagacaaggctggagaaagtcatacaattttatgatgccagtttagtgaatattaaactcttgatgtaaccatttaaacaatttcaagaggtctctcacaaatagatgtacaaaagttgaattagcacgtccaaagccatgtggttttgaggctaattccttgttacataattntnnnnntttttcccctcgaganaagagtntggctctgtggcccaggntggatcttggntcactanaacctccgccgcccgggttnaggc

SEQ ID NO: 441184 - DNA, 881 bp, Homo Sapiens
tatttttccacttgtccatctgtccagtaagcaggtaatggtgacccatgctggtccgctcggacccccatcctcctctccccacagctgggccctgctcagctggtcctgctggatgcagtgcccctttggacccccttgtcgcctggcctcccactcccggccacctggcctggccagctctgccagctgttgctctgtcccggtgggagaaagtccagccaggcctccacttcccctggggcatcccaacctcagccctgcacagacccagcgtctgcccttatttgctcccctgcagacaaggacgagtgctccaaggataacggcggctgccagcaggactgcgtcaacacgttcggcagttatgagtgccaatgccgcagtggcttcgtcctccatgacaacaagcacgactgcaaagaagccggctgtgaccacaaggtgacatccaccagtggtaccatcaccagccccaactggcctgacaagtatcccagcaagaaggagtgcacgtgggccatctccagcacccccgggcaccgggtcaagctgaccttcatggagatggacatcgagtcccagcctgagtgtgcctacgaccacctagaggtgttcgacgggcgagacgccaaggcccccgtcctcggccgcttctgtgggagcaagaagcccgagcccgtcctggccacaggcagccgcatgttcctgcgcttctactcagataactcggtccagcgaaagggcttccaggcctcccacgccacagagtgcgggggccaggtacgggcagacgtgaagaccaaggacctttagtcccacgcccagtttggcgacaacaactaccctgggggtgtggactgtgagtgggtcattgtggc

SEQ ID NO: 441185 - DNA, 1402 bp, Homo Sapiens
  misc_feature (579)..(579): n is a, c, g, or t
ttttggctgtaacactttcggtttattggctgcggtgccctggtgtggctgaccggccactgggcctgagagaagccctgtcttgtttctccatcccctccccatcggctccccacggtggctcctgggggacatgcacagacacttgtgccccaggaaactggggtggtggaatgggggctcaaaataaaaccaaatcgaggctggagcaggggtgggaaatgaacattacaatgaaaataatgcccccggtgatacacaatacagcgtgtagagacacagggatggcgatggggtcctgctgacattccctcttgccaccaggcagggccccctaagagaggaatgatgacttcgaaatgtcttgtggaagctctgctccctggccccagccccttgctggtgggggtttgtggggaagtggcttatgccggagtccagttcccccacctcctgtggacagtctcaccaggccattggccctgcaggtcctggggcctgggggagagggatggtgcgttgccttccgcccacccccactatccagtctaggcgaccaagggcagcaggctccagtcncccgcccctgctcaggcagtggtcacttcctgctgtggagtgtgtcctggaacttggtgctggtgtatcgcaggtggaaaccttttttggtgatggtgtcatccgagtggaacttcaccaggacagaatctcccgccgagtacacctcctcaggaggccctgagccacagtagcgccccagcctgggggctgtgctgtcgtagccgtcgaagagctccatgtagtcatagccgcagtcggtctcctcctccacctcaaaggtctggaacacgagctccacgccgtagccttcctcggccacaatgacccactcacagtccacacccccagggtagttgttgtcgccaaactgggcgtgggagtaaaggtccttggtcttcacgtctgcccgtacctggcccccgcactctgtggcgtgggaggcctggaagccctttcgctggaccgagttatctgagtagaagcgcaggaacatgcggctgcctgtggccaggacgggctcgggcttcttgctcccacagaagcggccgaggacgggggccttggcgtctcgcccgtcgaacacctctaggtggtcgtaggcacactcaggctgggactcgatgtccatctccatgaaggtcagcttgacccggtgcccgggggtgctggagatggcccacgtgcactccttcttgctgggatacttgtcaggccagttggggctggtgatggtaccactggtggatgtcaccttgtggtcacagccatccggagaattccgggccggttcctgcgaaagtgagagtcgggggaggttggtaggggcgaggtagggggggcg

SEQ ID NO: 441186 - DNA, 832 bp, Homo Sapiens
  misc_feature (19)..(19): n is a, c, g, or t
  misc_feature (37)..(37): n is a, c, g, or t
  misc_feature (48)..(48): n is a, c, g, or t
  misc_feature (79)..(79): n is a, c, g, or t
  misc_feature (99)..(99): n is a, c, g, or t
ttggggttccccataaacngactttttttaaaaaaangaagcttaagngggactttggaaattccggaaaaccaggacnccaaggtccccaaagacccnttgattccagggggttcagcgacgggggaccccttctggccagttactgatgccccccacctgccaaagagatgctgcaccactcacttccagtggagacagggacagcgacttccttgcagcctcttctccggtgccgactgagagcgccgccacacccccagagacgtgtgtcggagttgcccagcccagccaagctctgcccacgtgggacctcactgcattcccagcaccgaaagcatcatagttttccccagttatatgtagcataaatggtttaatcataaatgtctcccttaggcatgataaacattttaacacccacgcgagtcagtgtatgattgggctagctcctgtttgtgtgagtcacatgcaattcctttcaccagccaacctgaaaaaagacctttctcttactatgtcatcagaaaccagacagacccgggtccctgcaaaatctcaagtgagcattttccccacaggaaaacagaatcttccactgcagctagagaaactccgaggaagagggacttgatgctttagacatcaaaatgagaaggggagggaggaaagaaaggggggagtctgtgaggcacaacagagaattcccccaaactgacatgaccgtgaccctctgctcagagggcactatcgacagcccacaggtgccagacccatgtcccaagggagaaggaacatcagccatcatctctctgcatgagctcagtgtcag

SEQ ID NO: 441187 - DNA, 782 bp, Homo Sapiens
  misc_feature (439)..(439): n is a, c, g, or t
  misc_feature (443)..(443): n is a, c, g, or t
  misc_feature (457)..(457): n is a, c, g, or t
  misc_feature (461)..(461): n is a, c, g, or t
  misc_feature (479)..(481): n is a, c, g, or t
  misc_feature (485)..(485): n is a, c, g, or t
  misc_feature (490)..(490): n is a, c, g, or t
  misc_feature (492)..(492): n is a, c, g, or t
  misc_feature (503)..(503): n is a, c, g, or t
  misc_feature (505)..(505): n is a, c, g, or t
  misc_feature (513)..(513): n is a, c, g, or t
  misc_feature (516)..(516): n is a, c, g, or t
  misc_feature (531)..(531): n is a, c, g, or t
  misc_feature (536)..(536): n is a, c, g, or t
  misc_feature (539)..(539): n is a, c, g, or t
  misc_feature (545)..(545): n is a, c, g, or t
  misc_feature (547)..(548): n is a, c, g, or t
  misc_feature (555)..(555): n is a, c, g, or t
  misc_feature (557)..(557): n is a, c, g, or t
  misc_feature (560)..(560): n is a, c, g, or t
  misc_feature (566)..(566): n is a, c, g, or t
  misc_feature (604)..(604): n is a, c, g, or t
  misc_feature (638)..(638): n is a, c, g, or t
  misc_feature (662)..(662): n is a, c, g, or t
  misc_feature (664)..(664): n is a, c, g, or t
  misc_feature (675)..(675): n is a, c, g, or t
  misc_feature (678)..(678): n is a, c, g, or t
  misc_feature (700)..(700): n is a, c, g, or t
  misc_feature (702)..(702): n is a, c, g, or t
  misc_feature (705)..(705): n is a, c, g, or t
  misc_feature (718)..(718): n is a, c, g, or t
  misc_feature (733)..(733): n is a, c, g, or t
  misc_feature (757)..(757): n is a, c, g, or t
ttttttgaaaacatactagtttttattgcattttagggattatagattattgaaaattatttaggacacggaaaatatctaaaacatgaaacctttcttaacaaaagcatcatagtctattttggtgtgactgttcattacctacagaccccaaatagttcttcctcttttgaaggttacacttgtaaatctacactcttggttcaatttatcactgtccaaataaggtggagaagctgttcaaactgatccacagaatgcagtatgcctggaagaggcaaaacaagtattttcaagacataacaggccattacatcttaatatgctgccccaaattcaaatatattgtagacaataacaaatacagatgaagacattttgtgtaaagctcaaacctttagcatctaacaagtgcactctagttccagcatctatgggngggngggatcctccattnacanatacgacatgggtgggtnnncctnctctncngcttccataangntctctggnccngtgattacgtaatgngggtngtngggggngnngcttccncngtntcattngtccaaccggctccggctcaccttcactgggaattgtnatgatgcacattaccaacacagtgttcggggganatgggtgaacatacctttttttcncncttttcaaaanagnaccaataacaaaaccccataangngtnatgcgctggttcnacatcaataccagcnttctattatactgattataaactngatgtgtttggtgtcagcacaactt

SEQ ID NO: 441188 - DNA, 811 bp, Homo Sapiens
attggggctaaaatatacataatatttatcatttaaccacttgtaagtacacaattcaatgacattacatacattcacaatgttgggtaaccatcaccaccatccatatccaaaacatttcatcatccccaacaactctgtacccattaaacaatactcctccttcccccagcatctgacagcttttgctactttctgcctgtatgcatttgcctcttctaggggcctcaaataagggggaatcgtacaatatttgttctgtatctgtcttattgcactgagcatactgtttgtaagggtcatccatgttgtcgcatacaacaaaatttcattctctaggatagattctgaccccattgcaacctcatcaataaactcaggctgctgagtttgacagaatcatgatatacatcaccaagaaaacctgaactttggtttttacctgggcaactggttaacctctaaagcaaagcttcaaaaccgagggaaatggccccacgccctgaagtgtagccagctccctcactgcaggctgctgctgttccagtccaccctcacacccaccctaaggagccagagaattcttaaggttttgagacaaaacttaactaacttgctcagggttaaagagctaacaaaagtgtgacctacaactttagtcctcatctcatttgcctactaacctgtaatttaagcatacctctatactgcctcctcccattcgagagttgaaatcgccgcgtacaccccgaaagtcagcttggtctttttctcggataatctctagtaccatttctcttgcttgctgcat

SEQ ID NO: 441189 - DNA, 1500 bp, Homo Sapiens
  misc_feature (1361)..(1409): n is a, c, g, or t
tttgatgaggtgggcaggtggctggctgaaatggactctgttccgaaggctccaggtgctccgagattggtcccggccaactttctcatctatgacctgcctggccacctcgatctgctggggaacccccctgatggtgaatctccgcaggttggggtcgctgttgggaggggggttcctctgaagctccacgtgcgcccctgactgctggttgatgcttttgatgttctcaccccctttgcctatgacgaggccacacttatcggctggcaccgtgtatgttatctcctggacgccaccaggggctcccacgctccagtcgccacggccacgacctcttcctctggctgctgccaggcctccaaagccgtctctttcctgggctgtaagaatcagctcgctgatgatatgcgctgcatgctgacaccgatccggagggcccatgacctgggcagctctttctggactaatcccatcatctggtttaaactgaatcctcacaccagcatcattctggatctttttgatcatttccccgtttcttcctattacaatccccacagcaaaacctaggcacagatacctctatactgcctcctcccattcgagagttgaaatcgccgcgtacaccccgaaagtcagcttggtctttttctcggataatctctagtaccatttctcttgcttgctgtactttaaatgcattgtccagtgattacgaagaggccttgtctgctccccgtgggcaatgggccatcctggatcatgaccatcttcacccctgtccgctcctgcaactgcttgattgtttcccctcctctgccgatgaccagacccactttagatgcgggaatgagaatctcctggattgtgctgttgctgtctatgtcattatgaaagccaggtccatttcgacagcggtccacaatctgtcccaggagccgtttggcttgttcaatactttctggggttccggtaagtacacagggcctctctggaatcccagaactctctgaagcaatctgaattttgcaaccagattctgcttgaatccgtgaaatctgctcacctcccctgccgataataaatccaaccattttgtcaggcactttgaattcttccgttattaccgtcctttgatgtaccaaggcccctaactggttacctactccatcatccaagggccgtttttgtactccgtatccatatactgaggggtccactagaggtgtggaattattcaagtgaggaattgaatcaattttagcagcaatctgccggacccggtgcagggcatccacgaagccctcggccttcatccccacaggagcgctctgcccctgcaccagctccgccattannnnnnnnnnnnnnnnnnnnnnnnnnnnnnnnnnnnnnnnnnnnnnnnntcggctccccggtccggcctcccgctccgatcccgggaattccggaccggtaccagccgtgttggtgtgtgtgccgcggtgggtgggcgct

SEQ ID NO: 441190 - DNA, 945 bp, Homo Sapiens
taatggcggagctggtgcaggggcagagcgctcctgtggggatgaaggccgagggcttcgtggatgccctgcaccgggtccggcagaaagccacaggagtcattgtattagaagaaggtcttcactcgggcgcttgaagatatggtctttacatctctttccagtattccaggggagggaaccctacctgtttccctgataactgacttttcatgttatatattgatgctcctatagacattatattggatcccagaactttccaaacctgtggttccacctaaaattttatctgatgaattgttactttactgcctagctgccaaccagtacagtagtgagtatccatcttacttagacttcagatccacccatggctgtaatggatgaacatgccacccagctccccttccaccactctgcttgctggcgtgttacagtgctctcctctacagtacagggtcctgaaccttgtttctcactggctactaatatgtaatggctttcgctctgtgctgatgtgtgacagtcaccttgttggccttctatgtccgggaagaattatagtcactgccctaaagggctcagatcctcagtttgcagaaggcctgtagttgaacataaagtgaattttgaaccattgagaagaccattcccgttctcttgagccagtggttgaactcatattcttggacaagctggtccagagggagaacctctggtaaatggctgacctaatgtggattggtgaagcaggggtgtttactactaggccgctgaagacttcattgggacttggtctcagctctgaattccccatagactggagcagtaataagcccatggagacgggtgtcatttgttccttcgaatgttaccgtgaggtccactatctccaggattgtggcctataactagaaacccggtggggaatagggtcggatg

SEQ ID NO: 441191 - DNA, 763 bp, Homo Sapiens
  misc_feature (248)..(280): n is a, c, g, or t
cttttctttcttttctttctgttgatttgatgtcgaggtaggtgggatagtgctggttactgtattatagtaataggtaaagccatcttcacttaaaccttctacccaaacggtcttcactgctgtcttttttaagtctccttgaaatccttcaggtttctcccactgagatgctcctgagataagatcataatagtaatggtaaccctcagaggttatgccttctacccatctgccctgggaaggannnnnnnnnnnnnnnnnnnnnnnnnnnnnnnnngtctgttgattggatgtcgaggtaggtgggatagtgctggttactggtgttatgcttggctccaaaatttctgactctaagccaagtcttttcaaatcctcttggtatgctttcagggcagctgcctccattgcagcaaactcctttgatgccttttcttcttcctttgccttatccaggcttttctgtttaatctcactgatcctttttgccacattttccttatgattctttcctctttcatgaaattcaacactaggcctattgtctgctatccagcacttgcagtaatcacagaatttctttggctgtgacttccagtagtccgccatgactgcgccagccgctctgcaagtcgtccagggttccactcagactcgcgctttcccagcgggacgagtcgagctcttccagccgcccgatgccacacccgaacctccctccgatccagacaccttactcagtccccgggacatcccggga

SEQ ID NO: 441192 - DNA, 2048 bp, Homo Sapiens
  misc_feature (325)..(325): n is a, c, g, or t
  misc_feature (655)..(691): n is a, c, g, or t
  misc_feature (1584)..(1593): n is a, c, g, or t
ggcggagggatgtagagaaaatcgtgtgagcggataatggaaacaaaacgggagtaataggagggatgagaagggcgctttggcagatgaggcgggacgtttatggttgagaggcggtgagagctgggtacggttattatgcaaagcagcataataatatgggagtggtgggtgaggagcggggagagattatcttcatatttgaggcctcgaataccggtgcgcctgtatctttgggagggtgagctcttattacgcggggcgattttaccggggggtgttatgcttctaaggagacattcgctggataaaataatgcgtgggntggggggatttgcgtagcgggtggggcggggtaattggcgtatgtgaagattttatggggagttgggggaggcgaatgctgttcggtgttggttgggcggtgatttggatacgatcgttttccacatgctgatggggaaggaggggagggagatgaaattaggtgtggttggttttatgccaggcggggggtgcggggggaggtcttagccaagttccccttgagattctttcagggttctccccactgagatgctcctgagataagatcataataggtaatggtaaccctcagaggttatgccttctacccatctgccctttgaaggannnnnnnnnnnnnnnnnnnnnnnnnnnnnnnnnnnnngttgatttgatgtcgaggtaggtgggatagtgctggttactggtgttatgcttggctccaaaatttctgactctaagccaagtcttttcaaatcctcttggtatgctttcagggcagctgcctccattgcagcaaactcctttgatgccttttcttcttcctttgccttatccaggcttttctgtttaatctcactgatcctttttgccacattttccttatgattctttcctctttcatgaaattcaacactaggcctattgtctgctatccagcacttgcagtaatcacagaatttctttggctgtgacttccagtagtccgccatgactgcgccagccgctctgcaagtcgtccagggttccactcagactcgcgctttcccagcgggacgagtcgagctcttccagccgcccgatgcccacccgaacctccctccgatccagacaccttactcagtccccgggaccagcgttccgctgttcccaactacgggtgcccagacgatccaatccgcgttcgaaatcgcctcctctcccctccccctacaggggcggtactcccggctccaaagaggtggggtcggtataaaggggttgaggtcaccgggaaggggtaaaagcgcgacgggacctgagctgaaggacgggatctcaagcctcaagtccctgcgccatcccgccgtctctgtgtcctcccctggggcccaaaacctccatcctccttctaggctcgctggctcaaggccaaggagctcagcgcgccgcctccgcccggaacgcaaacagctgttcccagagacgtctccgctctcaactttgccaactactccgcacgcactttgaccagcggagcaaccgggacctgtgggtcggggtcctctggcggagttnnnnnnnnnngaggtgaaactgcgggaccggacgctgcgagtcgctaggcttcgcctcaaactttgctgttgcagcggagcggacccgcccctcctctcccctacgacagcccacgcgctacggatggggctagaacccatagctacgggagcgtgtgggcagaagcagcggacggcggacgcgcaggacggacggcggcagccaacagactacagtagcagcaacaggcggcggatggcgcacaggtagcggcgcaaccgaggccagagggcaacctcacactgcccaagatacagggcccaagaacagcatgaacgaaggaaggaagagaagtcacacagagacgaccggggccacacatcagggacctcagaccctctccacacggacaccccgggaaacacacagaacgcacacaatacacctaaacacacaaccaagggcgcactacacaacgaacaccc

SEQ ID NO: 441193 - DNA, 1081 bp, Homo Sapiens
  misc_feature (996)..(996): n is a, c, g, or t
  misc_feature (1037)..(1037): n is a, c, g, or t
  misc_feature (1039)..(1039): n is a, c, g, or t
  misc_feature (1053)..(1053): n is a, c, g, or t
  misc_feature (1061)..(1061): n is a, c, g, or t
  misc_feature (1064)..(1064): n is a, c, g, or t
  misc_feature (1071)..(1071): n is a, c, g, or t
agcggctggggactgggtttgggtgcagacgttgttgcttgggcgcttctccgctgcgtgtaggtgaagggggcttcctgaccgagacatggatttaggtgctattacaaaatactcagcattacacgccaagccgaatggactgatccttcaatacgggactgctggatttcgaacgaaggcagaacatcttgatcatgtcatgtttcgcatgggattattagctgtcctgaggtcaaaacagacaaaatccactataggagtcatggtaacagcgtcccacaatcctgaggaagacaatggtgtaaaattggttgatcctttgggtgaaatgttggcaccatcctgggaggaacatgccacctgtttagcaaatgctgaggaacaagatatgcagagagtgcttattgacatcagcgagaaagaagctgtgaatctgcaacaagatgcctttgtagttattggtagagataccaggcccagcagtgagaaactttcacaatctgtaatagatggtgtgactgttctaggaggtcaattccatgattatggcttgttaacaacaccccagctgcactacatggtgtattgtcgaaacacgggtggccgatatggcaaaggcaactatagaaggttactaccagaaactctctaaggcttttgtggaactcaccaaacaggcttcttgcagtggcacgatgattaccgatcacttaaggttgactgtgccaatggcataggggccctgaagctacgggaaatggaacactacttctcacagggcctgtcagttcagctgtttaatgatgggtccaagggcaaactcaatcatttatgtggagctgactttgtgaaaagtcatcagaaacctccacagggaatggaaattaagtccaatgaaagatgctgttcttttgatggagatgcagacagaattgtttattactaccatgatgcagatgggcactctcatctcatagatggagacaagatagnacgttaattagcagtttccttaagagctcctggtggagatngngaaagtttgatatngtgttgtnaantgcatancaatggaagt

SEQ ID NO: 441194 - DNA, 1528 bp, Homo Sapiens
  misc_feature (916)..(924): n is a, c, g, or t
tttttttacaaagactgtgccaccagttaattttattacgtctttgcgacaaattcattacaaatggctgtcataactaattatagaggatacatattttttaattaggttttcctttttcttcccctcgcacgtcttagtttccttcttttcttcccaaacacagatctggcggtcacgaggaccatcttctctttccctccatcgtcatcactatcactagagctgctggtggtcgcacctccattcttcacgggagcttccttcactgagttctgcgaatctgaagcactggtttttggctctttcgcagctgttctcctttgtacattcattaaagatgaactttcagcatgttcacttgaagatccatcagatgattctgaggaggcaggtctcccccaaaaatccaccgcatgtattctttcgtttagaatctgaaagcctctttcttttcaggcttgatgactcttttaaggaatttgttatgcctctcttctgggtttttcgttttgccttatcaagtagctcaaattctttctccatggcaacagaaactgcttctatttcgctggctgctgcttctttctctttccttagcatacatgtcacagctctgtttagtctctggctcttaatacgtttagcatcttctttctcctgttgtgctaatctaaagaaggaatcaattcggagctgtgtctgctgggcatcgagttgctttaatacaggaaacagagattcatctgtcttcgttctgttccagccgaaataccgctgacaaaattctctaattttgtcgagatcaggtttcccccacagaaaggatcccttcgagtcatccaccacgggtttgaggtaggcctcggcaacagctgggttaggaaagccaggggtgagttgcaatgtccgtaannnnnnnnncactttggtgtcatgaggattaggtcttatctttggatttttttgagcttcatgccaccattctgagaattttaggagaggttccaggccatgcccagggaattcattgagaatttccatggcggttacacaacccacagttggtattccttcggtataatcacttccaagcaaataagccaaatttattaacttattccggtccaatcccaattgattgtgaaagtccacatattgataatattctacaaacttgtttttattaaaaaagtttctatagacatgccgcgctccaaacagccagatatcactgtcatcagtgatggttccggaagtctgatcagtcaggtcccaggaatgcactgcgcctctgcttccatgggagcctggatgtagggaatgccgaacaggcgcaggagttcctggctttccaggaacatctgtccggtgacagtagcagcgatccgttcttgctgctgtttttgagctttcagtgaattctgctgtgctaagaggttgctctccagagtttccaactcctccaaattaatatcttgccattcatggagcgaatcttccgcatctttctcagcttcctgtggct

SEQ ID NO: 441195 - DNA, 261 bp, Homo Sapiens
cactttggtgtcatgaggattaggtcttatctttggatttttttaagcttcatgccaccattctctgtaaaataaaggaaacaattacttacacagcaatgagacattatagttcatacactatggatgaagaactaaacttagaacatgtaaactcaagttctaactcaaattgtatgctatatagaatattttattaattttagtactattagccacaatgtataatgatggcaaacatttatggaagtcttcctctgt

SEQ ID NO: 441196 - DNA, 1416 bp, Homo Sapiens
  misc_feature (1339)..(1339): n is a, c, g, or t
  misc_feature (1388)..(1388): n is a, c, g, or t
  misc_feature (1390)..(1390): n is a, c, g, or t
  misc_feature (1397)..(1397): n is a, c, g, or t
  misc_feature (1401)..(1401): n is a, c, g, or t
  misc_feature (1405)..(1405): n is a, c, g, or t
  misc_feature (1412)..(1412): n is a, c, g, or t
ctggaaagttggctggagctcggtcaccaggatgttccaggctgaagtgagctaagaatgcccactggactcccagtattggcgacagcgtgagaccctttctcaacctttcacataagcccgttactccaccaagaaggcgcttttgcaacattgttttaatgcttaacgccttcagatcgcccagcgtgacggatagcaagtaaccaaccaaggcatcaccactggcgctaaacttctcacttccggagtgctgcaagcgcagaaaatatacgtcatgtgcggagtcggagcttccgccctgcgcgtcgtattagacggaaaccgagcgggcccattgttcgtgggtttgcggacccaccagcgaaggcgggaggtgtcgcagggacatcttctggctgtttccgtcgcctgcgtggcccttgcaccccggtcttccattagcggcgcagacgtttgggcctaagcgctgggcgaggcgaggccctgcccctccccgccaacggccattctctggacctgtctttcttccgggaggcggtgacagctgctgagacgtgttgcagccagagtctctccgctttaatgcgctcccattagtgccgtcccccactggaaaaccgtggcttctgtattatttgccatctttgttgtgtaggagcagggagggcttcctcccggggtcctaggcggcggtgcagtccgtcgtagaagaattagagtagaagttgtcggggtccgctcttaggacgcagccgcctcatgggggtccaggggctctggaagctgctggagtgctccgggcggcaggtcagccccgaagcgctggaagggaagatcctggctgttgatattagcatttggttaaaccaagcacttaaaggagtccgggatcgccacgggaactcaatagaaaatcctcatcttctcactttgtttcatcggctctgcaaactcttattttttcgaattcgtcctatttttgtgtttgatggggatgctccactattgaagaaacagactttggtgaagagaaggcagagaaaggacttagcgtccagtgactccaggaaaacgacagagaagcttctgaaaacatttttgaaaagacaagccatcaaaactgccttcagaagcaaaagagatgaagcactacccagtcttacccaagttcgaagagaaaacgacctctatgttttgcctcctttacaagaggaagaaaacacagttcagaagaggaagatgaaaaagaatggcaagaaagaatgaatcaaaaacaagcattacaggaagagttctttcataatcctcaagcgatagatattgagtctgaggactnagcacctgcccctgaagtaagcatgaaatcttgatgatatgaagagttncnagcgcgnaganattnttgaagnatgc

SEQ ID NO: 441197 - DNA, 1190 bp, Homo Sapiens
actgtcttcctcattggcgccgtgcagagaggcggaatgttcaactcctaactgcggcggaaacgtgggagccgcgcgggccgctgtcgtcccaacccccgccgccctcgtcgcgcgcggggcctccgcgcccccggctgctgctcacgccccgcccgggagccagattttgtggaagtataatactttgtcattatgagatgtcgtctctcggtgcctcctttgtgcaaattaaatttgatgacttgcagttttttgaaaactgcggtggaggaagttttgggagtgtttatcgagccaaatggatatcacaggacaaggaggtggctgtaaagaagctcctcaaaatagagaaagaggcagaaatactcagtgtcctcagtcacagaaacatcatccagttttatggagtaattcttgaacctcccaactatggcattgtcacagaatatgcttctctgggatcactctatgattacattaacagtaacagaagtgaggagatggatatggatcacattatgacctgggccactgatgtagccaaaggaatgcattatttacatatggaggctcctgtcaaggtgattcacagagacctcaagtcaagaaacgttgttatagctgctgatggagtattgaagatctgtgactttggtgcctctcggttccataaccatacaacacacatgtccttggttggaactttcccatggatggctccagaagttatccagagtctccctgtgtcagaaacttgtgacacatattcctatggtgtggttctctgggagatgctaacaagggaggtcccctttaaaggtttggaaggattacaagtagcttggcttgtagtggaaaaaaacgagagattaaccattccaagcagttgccccagaagttttgctgaactgttacatcagtgttggggagctgatgccaagaaacggccatcattcaagcaaatcatttcaatcctggagtccatgtcaaatgacacgagccttcctgacaagtgtaactcattcctacacaacaaggcggagtggaggtgcgaaattgaggcaactcttgagaggctaaagaaactagagcgtgatctcagctttaaggagcaggagcttaaagaacgagaaagacgtttaaagatgtgggagcaaaagctgacagagcagtccaacaccccgctg

SEQ ID NO: 441198 - DNA, 1275 bp, Homo Sapiens
  misc_feature (323)..(324): n is a, c, g, or t
  misc_feature (327)..(329): n is a, c, g, or t
  misc_feature (334)..(334): n is a, c, g, or t
  misc_feature (336)..(336): n is a, c, g, or t
  misc_feature (338)..(338): n is a, c, g, or t
  misc_feature (347)..(347): n is a, c, g, or t
  misc_feature (355)..(355): n is a, c, g, or t
  misc_feature (358)..(358): n is a, c, g, or t
  misc_feature (370)..(370): n is a, c, g, or t
  misc_feature (380)..(380): n is a, c, g, or t
  misc_feature (383)..(384): n is a, c, g, or t
  misc_feature (388)..(388): n is a, c, g, or t
  misc_feature (405)..(406): n is a, c, g, or t
  misc_feature (408)..(408): n is a, c, g, or t
  misc_feature (413)..(413): n is a, c, g, or t
  misc_feature (419)..(435): n is a, c, g, or t
  misc_feature (441)..(441): n is a, c, g, or t
  misc_feature (454)..(454): n is a, c, g, or t
  misc_feature (1171)..(1206): n is a, c, g, or t
tttttaaattttcaattttattaatattcaatttacgtaacaggctcaaattttattaattgaattctgcatccatacgaatttagtcttaatttataaagcaacttacttcgatactcttccttgaagtatgttataaaatacaacgtttaaataaacatcacaaaaatattgtttgtcgatcatttttgtgactttaacagagaaatcttcaagtttataatccactcattcttgcttacagccagacactacataaatccttaccaaaacaaaacaaacccaggtaggttcactgttacccctaggtatgcttcgttggnnttnnnccagngncncccattttncctctaanggngtcaatgctttngttctctacnggnntctngggggtgactatgatgnngngatgngggttnnnnnnnnnnnnnnnnnaatganacatttaattaanggcaatagttgttcaaacagtaagaatgtatacacagtttatatatagatagatagatgggtatgtattttttccccagagaaagggctcaagagacaaaacagtaaaacacttcaactttccctaactcttgagagggtatctgattttgagtgagtttacgaagttcttattttgatgagccacttgtgtggggacacatatgcgtaagggctttttgtgaaagagccaaagcttgcatctgagttaaaacttgatagtcagtacacttgtactgggacatacgtgcccctgaagtttttattaaagagctaagatctatgtctggcttataacttaccaatcaaaacaagtcacacacatacataaagaaggaagccatacatggttactgaaaatacacaaattattttcacccagatgtgtcacttccaccatgaaagactgctaagctgaagccaatcttagttcaagtatgcatttgatctgtcactaaatgcccagattttaacataaccttctggtttttaaaactcagaggatggttcttccttttgactgttggtattctaagtgaggaggcaagataatcccacctctgatagttaccttaagaaaaaacactatttctttcataaagatacagcatggcagaagaccctttctgacccggccgtaatgccgaattcccgggcatatgtccggtaccgtcgactnnnnnnnnnnnnnnnnnnnnnnnnnnnnnnnnnnnncgccgcttcctcgctcactgactcgctggcgctcgtcgttcgctctcaacgctatgcctatatgagtag

SEQ ID NO: 441199 - DNA, 1687 bp, Homo Sapiens
  misc_feature (1257)..(1257): n is a, c, g, or t
  misc_feature (1284)..(1534): n is a, c, g, or t
  misc_feature (1543)..(1561): n is a, c, g, or t
tttgtttttaaactagaatttattggtatacaaaactccatttcatagataaagtggcacatctttgcagcttctattgcaccaagtatcgaagattaaaaacacaaaaaaagaaacatttggttttgaaaacactgcaaatagccaagtacagtactttggtaaataaaaaataaaatggttcagatgaacacaatccgtggaaagaaacaatctagggggaaggaactatggacatcagacaatggtcacaattctcaccatcgagctccatagataaggcaagacttgctaagtctatggatcacgaccccatggaggtcttaagtatctccagactgaagctagaacaagtatagtgcaattagaaagagagaaggcccctcctccacggatacatccacccctctgtaaaggagactgacgcatgccaacacttctacatgggaaaggggagcccccgggtgtgacgtctgactcctggcccttttcttctttcctctgagcttagtgctggtggaggctctggaagaggcactggggaggccaagggcccttcctactatgaaaaatgaactgtaagagtgggaaaatgtgttaagcctcttaccagtactgctcgagggacctgccagggatcaaaccgccagctgaggtctgtggctgagctcacatgattgtcatggatggctggcagcctgccgcaggctgacacgccaaggatgagagccaggccacagagagtctgtccggcaatcgccgccagccgcaaggactggcagtgagcagcagcagctctggatcacggctatgacctgcttagaataaattccctatgcaaaagttcgtagtttacaggaaatagattctttacactggtaccagccccttctcaagtaattctgcaaggatgctaaacattttcatggaaccacaaaacagtcctaacgaggacagtaaagagagggactctacaaagcagctgcttcaaagacataggtcagagcctgaggttttaaaggaatttcaccttgggagagaacttccaggccaaccacaaggcaccgctctttccggaggtccccatcagcggtgtgcggtaagctctgcatcctaagtgcacgtggtgactggtgctccgtgttctctccacgttacaaatatgactgtcccctttctaatatgcgatggcagacgtcgtaatttatgccatctagatcttcaaatccaatgatgtcattaaaaaaatacaatttnactggccgggcagggttgctcaacacnnnnnnnnnnnnnnnnnnnnnnnnnnnnnnnnnnnnnnnnnnnnnnnnnnnnnnnnnnnnnnnnnnnnnnnnnnnnnnnnnnnnnnnnnnnnnnnnnnnnnnnnnnnnnnnnnnnnnnnnnnnnnnnnnnnnnnnnnnnnnnnnnnnnnnnnnnnnnnnnnnnnnnnnnnnnnnnnnnnnnnnnnnnnnnnnnnnnnnnnnnnnnnnnnnnnnnnnnnnnnnnnnnnnnnnnnnnnnnnnnnnnnnnnnnntctgtctcnnnnnnnnnnnnnnnnnnntttactttagagccaggaaaacataacttataaaaagtccattattaaatcacctcagaacaactgtcaaaggccccggagttttagcaacacttgttctgaaagctgtgaataatgagaatggca

SEQ ID NO: 441200 - DNA, 438 bp, Homo Sapiens
ggataatgctgaaccattttattgaagacttaaatgggtggaatgaattgtattaagggcatcccatctctaatttcaggagagtgaatctatctcttgagctgcctgataattcggtgcctccctcacaagagctcttccaggagttcacttcacaaatgtgtactgagttcccactctgtgttaaccagaatggttccagcgatgtctgcaggaaacaacgtctgcttggaggagttcagagggtactggagggaggaagcacagttggagctagacgctttcttcaggagcttacccgggagcccagggtcctgtcggcgaccagcgcaaccaaatccgacggagagatggtgctgccaggcttcccggacgccgacagctttgtgaaggtgagttcgcggggcctcgggggtaccaggagtcgcccgcggccgc

SEQ ID NO: 441201 - DNA, 903 bp, Homo Sapiens
  misc_feature (33)..(33): n is a, c, g, or t
  misc_feature (58)..(58): n is a, c, g, or t
  misc_feature (92)..(92): n is a, c, g, or t
  misc_feature (105)..(105): n is a, c, g, or t
  misc_feature (186)..(186): n is a, c, g, or t
aaaggcctgtaaaaacggggttgtggcctttgnaaaccactgccacctgccgggggtnaaaatgaatttaagttccaaaatggataaagganggtgcaaaaacangtcctgcctccaaacctggctgggttcctcctgcctggatgggatgaaaatccagccagtgccaggggggacgtcccaaantcctccaggacgattcctggttgcgttccccgccctttccttaggagagagcttgagggagaggtttctgagcattgggtttgatgaagattttaggaagaaatggtgtgttggaattgtcaatcttctctcgaaacttgagctgaggtcggatgatattttttgcatgaagcagccggaaagtttcagattttgcttttttgccatattctgctgccttacggttccagctggacactaccgttttggggacctgcaagccggcagggaggacaggctgttgattcttgtttacacctgaggcttcatccagtaaaatacccactctctccagaattacatcattggcatcaactagtaaatcaaacttgtcttccagctcagtcactttacttcgatccttaatgttgctgcgacacccatggtactgcattactctgctcatgcactgaagcaacctgtctccctgtgtttcgcaaaatgcttggaagccaggaaaacttcggtaaaaatcatactcatcgccaaactgtggtaggcccccagatgccttggtgactgccaccacggacccaagagcaaacttcacaaagctgtcggcgtccgggaagcctggcagcaccatctctccgtcggatttggttgcgctggtcgccgacaggaccctgggctcccgggtactgggtggcgccattttttcagcctgcacggctcccc

SEQ ID NO: 441202 - DNA, 476 bp, Homo Sapiens
  misc_feature (395)..(395): n is a, c, g, or t
  misc_feature (417)..(417): n is a, c, g, or t
  misc_feature (433)..(433): n is a, c, g, or t
  misc_feature (456)..(456): n is a, c, g, or t
acttgttattagatctcctcagtctggaaacaagtattaaaagaacctctaatcccttacccataactttcatcttccctgcgagctgttttatccctccaggcaaacagcagctgaaaggctgtcaactgctgtgtgttaaggtgcttcttctgcttcctatagagttcaaggtaggactcatccgtgaagataggtttgatgaatttcttgaggcagatgtccctgctccgttgccacaccacctgcagctgcaccggctgcccgttgccgcgctcccacatctccagcctcattttgtcatagatatatagcaggtaatgggtgtcatcccggggcgtagttgaggcatctcctcgggcagaggggcacttttacggtggctggaagatgcngggcgaaaaggctggatggccnttcatttcaatgagcntgggtaggggttcaaacccaggnttttttgggacgacaggtta

SEQ ID NO: 441203 - DNA, 2800 bp, Homo Sapiens
ttttttttcttcaggaagaattttaatggtttaaaaatatgtatgtacaaaagcagcaccagcatttggtgcttccggtccacaggcgccacgtgtcttccaggactatctctgtggccagttgtacctgaagcctctgtctgactttccagttggaaaggacatgcttttgtttcccaccgactgtttaatttttttggctgcaatgcatttcttgccagacggggtctgtttatttggatcaaactgagaagaaactttggatttgctgtttccagcaaaagccttgaagtctgactggctgtagtcgtaaggcgtaaactctttttctggtggctctgggtcctttggcttcttggaaattttgagtcgtttcttctcttgtttctgttctgtggtccttgggtcgcttgttgctcgctctctcttctttgcagcattttctagcacgacctgctgtcggacggagatggcctgttctgctgcagctttgcacgcctcctttgcctgttcccgggcagctgtttgctcagctgccttcttcttgacagcttctttagagtctttttgtacttgtacctgggccagcttccaacggttgctgatttcatagattttggttgatggatcgaacttcgctgcctgagagacgggagcacggtgtcccagtgagggcagaaacatcctaaatggattttcaaaggactccatgatgttctgggcttttttctgtgcaactgtcaatggaccctttttactgtcttcagcactaggttcattaaataacgtgatgacagctgtggcaatcaggcatgtggtacccagcaagttatcttctttttcatcagggaagaggctcgcctgcttctgaactggcacagatccactggttgggatgattggatagccatccggaggggcatgggagcagtcgtgaggtccaaagagaacattctccaatctctcagcactgggcagcggtccgctcttcttcactccggctgcaacttcagacttgagcaggggcatctctcgggcctgctggattaaaaggtgcatttcgttgatctgctgccgcacaaggggcggtactgggttgcagcaagctatgatgccctgaggttccttaggcagttcttcagctattttcagcatcatgtggtttggcagtacatatccgtaactttcatcttccctgcgagctgttttatccctccaggcaaacagcagctgaaaggctgtcaactgctgtgtgttaaggtgcttcttctgcttcctatagagttcaaggtaggactcatccgtgaagataggtttgatgaatttcttgaggcagatgtccctgctccgttgccacaccacctgcagctgcacgggctgcccgttgccgcgctcccacatctccagcctcattttgtcatagatatatagcaggtaatgggtgtcatcccgggcgtagctgagcatctcctcgggcagagggcgtattctccaatcagccagctgatattgcttgtttgagtccacgttgcagtagagtttcaggagatgatcgagtgagtgcctgcccaggttaagaaggcgtgctgcctgatgagtatcaaacatgtttactacatacaacccaaagtctttctgtagccattctatgtctgaatcagcaccatgaaagaccttaacgatggctgggtctgtgaggctctcattgagaatgtacatgtcacttcgaagctcgagggtgtcaatgatgaagtcttccgtccgagtagaaatttgcatcaggcaggtcagtcccaggaagctcctgtaagagtggtgttccaagtcaactgcaaaattcctgacaattcaagagcttttcgttgagttccacgagttcatccagggaggatatgaaatggcatggtgtctcttctataggtctgtataactggggttgtggcttttgaagcactgcatctgctggggtaaagtgatttagttcatattgataaggatgtgcaaacatgtcttgctcaacctgctgggttctctgctgatggatgaaatcagccagtgcagggggacgtccaagtcctcaggacgatcctgtgggcgttcccgcctttccttagagagagcttgagggagaggtttctgagcattgggtttgatgaagattttaggaagaaatggtgtgttggaattgtcaatcttctctcgaaacttgagctgaggtcggatgatattttttgcatgaagcagccggaaagtttcagattttgcttttttgccatattctgctgccttacggttccagctggacactaccgttttggggacctgcaagccggcagggaggacaggctgttgattcttgtttacacctgaggcttcatccagtaaaatacccactctctccagaattacatcattggcatcaactagtaaatcaaacttgtcttccagctcagtcactttacttcgatccttaatgttgctgcgacacccatggtactgcattactctgctcatgcactgaagcaacctgtctccctgtgtttcgcaaaatgcttggaagccaggaaaacttcggtaaaaatcatactcatcgccaaactgtggtaggcccccagatgccttggtgactgccaccacggacccaagagcaaacttcacaaagctgtcggcgtccgggaagcctggcagcaccatctctccgtcggatttggttgcgctggtcgccgacaggaccctgggctcccgggtactgggtggcgccattttttcagcctgcacggctcgtctcgcgagagcttgt

SEQ ID NO: 441204 - DNA, 1695 bp, Homo Sapiens
  misc_feature (3)..(3): n is a, c, g, or t
  misc_feature (5)..(5): n is a, c, g, or t
  misc_feature (22)..(24): n is a, c, g, or t
  misc_feature (26)..(26): n is a, c, g, or t
  misc_feature (36)..(36): n is a, c, g, or t
  misc_feature (421)..(421): n is a, c, g, or t
cancngcagtggtgggagtatnnntnttgtttgacngtgacgctgtgcgtcaccaggggccggctcaggggctccggactccatgaccgacgcactcatggcacgcagggccagtcttccggggccacatcatgacctgggccgcaagctagtgatacgagatcaggtgtcgtgggtgtgtctgttgtgcgtggtcacgtgtccttacctacggtaagtgcacagataggtgcatcaagacatcaacgggaaaagccgattttcagtcacagccacagaccccgccccagagaccccacgtctaccgaaggtctagggcagtggggcatccactctgccctctctcagagcaccatcctgagaaacaccattctgtctgttccggggtggatcctccaggacaatctcatccagctgagangacggaacgaccacatctgttccttagatggggaaaccgaggctcagaaattataaaccaaggtccaggagccccagagaagggtctgagggctgccctttctggttttgagtccaggtcctcgttcagagcccagcttgaggggccttagcatttgctagactttgagcccactcctgagcagggataggggctgcaccgacctctggacatccctggctggcagcaaagctcttccgcccagagcagactatgtcatgggagctctgtgggggaggaaggcccctctgtgctggccctgtttccctggggttggtggcccttgggcactgggagggctgcctggctgatgaccaggcttgtgggggcaaagtttggcaggaagtgcagcgaataggcctgactcccctgggccccgttcttggtgagccgaaggtcctgtggttggagagggattttgtggggttcaaggaacccgtcaactcaacagccagatccaagcgactgcagatactgtagcattcgactctcatttctcagacggggaaactgagtccagagaaggcaaagtggctgaacacagcccaagaccaggtgtccgggtcctgggtcgacatggccggtgcaggcagccagcccagagcccatttccctggggcaaaggctgctctgagacagggaaatcccttgaagaaaaggctgacttttgcttcctgtggctcccagctcctggctggtcccggccagcttctcctgggactgtcttctcttaggcttaggcgaccttcttaagccaggggcctggctagtcatgtgctctgtggagcctggatcctagagaccaaggaggcgccagctttttcaactgcttggaggccggggccagggctgccgccgccagaaggtgacaaatgagtctgtgcctcagcccagggctgccggccagcggtgcctggacacaccgctccttctcacctgaagcctgagttcctgggacctggcatcttactcagagaccaggcaccatcgcccctgtcccacattccccttctcaaggccccaccctgaagccagctctgggcctggctccagacctcagcctgcacagccacaagcaaagcacacggaatgcgcaccccatcctggccacggccactcgggcaggtgctggagaccaggcacctgatccggcgtcccttctgccgagcccgagaggccacagctgaagatcttgaggctgaggcctgagccccctcccatgtggtgtcctggca

SEQ ID NO: 441205 - DNA, 891 bp, Homo Sapiens
ccaactgcttctttttgtgtacaccactgtactttttttgcctactggctgctcttgaagtacgatggcagagttcagtatttgtgacagaaaccttacggcctgcaaagcctaaaatatttagtatcttgtaccttacatagcaagtgtgctgactcgtgttctagattaacttgcctagggacaaatggtctcaagattacacagcttcttggagaacataagtccagtggtcatctcaatatgaaatgaaaattacataataggtgtagcaaatatacacatgttcatttcaaatataaattacaagataaaatcagatctcgttcaaaacaaatatttaatattttaaccattttacaggaaagaaaatttaagtaacatatttacttcgttgttgacgtcatcattttacaaaggtaacaaaaagagcagttctgtgaaactaaatgaaaagcctaacattggaagtttccttcagctttccactttaatggcagaagataccacacagacttgtgcgatgtcatcatattcatatgttctctttaagaatgtgtctgttagtcttaagccagagatgctttgcagtccctgtactgaagaaagcagagtaagggcaagacagagcgaagaacttggatgcagctttcccagctgtcttcctgaaattccacaccagtggatggaattggtattgcacatttccaaaaccagatccatagtcctttcactgcagtttgttattttacaggtaatatgaaaaggttcttcaaggtttacggtatctggtattgcctccaaagacaacctaacatctccataacctggagccattctttgaagttggctggtctgtaaccttcccctttcacctagatttgttttcca

SEQ ID NO: 441206 - DNA, 1590 bp, Homo Sapiens
ttttttctttagacacatctgtgtttctggagcaaagggaaaccacagaaggccaggagtttgggtgtgcactgggtgtctttcaactgggtggaaccaaactgagtccttgaagtctcgctcctgaggctgcagaagaatagatggcttttccctgcctcgagggtgggataagggaggcaaagctgggagaaagaaagggagagagagaaaacgaatggccggcacaggtgcctgggccccagccttcaagtgcggtcagagcagatccggtggcggagtagggcctagatgaccacggactgcaggaggcggaagcacatcatgaggtccagcgggatgggcggcttcaagtagtttccatccagccgcaggtagcgcaggtgtggcacgttctccaggtccgaggagaagtcatggaacgccactaggtcgttggggcaaatctgggttccgttgattttctcgatgctattgttgttgaggtacaggtgttccagcctgttgttgatggcgggcacactgctgatcctgttgtgggacaggtggagcacaagcaggttggagatattaaaggagttcttggggagtcccctgtctgtcagcttgttgtagttaagccgaatgaaggcaagattgggaaagctcttgaagtatccgttagggatggtctcaatcttgttactgtccaggtagagctggtgaatggcggtggggaccctgggcggcatctttctcaggatgttgtgggccaggttgagctgcatgaggttcttgaggccatggaaggtgtcgggcttgaagacgccgtcgctcagcctgttgtgctggagatccaggagcagcaggttctccagcttgctgaagacaccaggcgggattctggagatgtggttctggctcagcctcagctgctccaggttccggggcagggccgaggggacctcttccaactggttcttctccatgtagaggaacaccaggccgggcagtttctccagcaccctctggtctatcttgcggattcggttgttgtccaggttaatccatcgcaggcctgtggcattctggaaggactccaccgggagctcagtgatgaagttgttctggagatagaggtaatggatgcggggcgggatgacagggacctttcgcaggttgcggctatcacagtagagggcagatgggaaatcaggggggcagtagcattcgcggggacagtcagggaagatagatggagggcctggagggaggggaggaggcaggtctgttggctctgctggttcatcaggctgaggaaagctgggtgtgggcctgggcctgggcctgggtctgcgcccgggcccagtcccgggtcttggtcgtcttgttggctggccttgggccactgaggccaagatgagaagtgggaggagccagcagaggggtgacctcatgatccaggtgatgcacctgcacacacctgcctctcctctcagctctgagtttagtcctcctcttccaccccctcccttcggcggagctgtggcagcagagagccagctagaagatctgatctcccagtggtgtgtgcgtgcttgtgtttgccat

SEQ ID NO: 441207 - DNA, 1026 bp, Homo Sapiens
ttctgttcagggttttttgtgtaagtttaaaccccgaaattaagggccaaggattttggggaaaagcttcctggaaagttatcccggttagggaatgtttttcaaagtcttggtttactgttccaaggaaaaactcgggtaaaatgggcggtgggggacccttgggggggcttttttttccaggaattttgtggggccaggttgagcttgcatgagtttcttgagggccatggaagtttgtcgggcttgaagacggccgtcgttcagccttgttgtgctggagatccaggaagcagcaggttctcccagcttgctgaagacaccaggcggggattctgagagatgtgtttctggctcagcctcagctgctccaggttccggggcagggccgaggggacctcttccaactggttcttctccatgtagaggaacaccaggccgggcagtttctccagcaccctctggtctatcttgcggattcggttgttgtccaggttaatccatcgcaggcctgtggcattctggaaggactccaccgggagctcagtgatgaagttgttctggagatagaggtaatggatgcggggcgggatgacagggacctttcgcaggttgcggctatcacagtagagggcagatgggaaatcaggggggcagtagcattcgcggggacagtcagggaagatagatggagggcctggagggaggggaggaggcaggtctgttggctctgctggttcatcaggctgaggaaagctgggtgtgggcctgggcctgggcctgggtctgcgcccgggcccagtcccgggtcttggtcgtcttgttggctggccttgggccactgaggccaagatgagaagtgggaggagccagcagaggggtgacctcatgatccaggtgatgcacctgcacacacctgcctctcctctcagctctgagtttagtcctcctcttccaccccctcccttcggcggagctgtggcagcagagagccagctagaagatcgatctcccagatcccgggaa

SEQ ID NO: 441208 - DNA, 904 bp, Homo Sapiens
  misc_feature (689)..(756): n is a, c, g, or t
  misc_feature (855)..(855): n is a, c, g, or t
gaggctctccccttcctctgtgtgttcatttacacttcgcccttcaatgagtaactttcgcacagcatttacatctccttctgacgaggcttctgccaagctgcggttgtccgactgccctgcatgtgctgtgctttcagctctcatacgggtaagtgcagcagcagcttcatccaacgcacaactaacagacgatgtcaacctccgaagtacttcaggatctgcaaaggctttaccatcagccgtggacaattttcctattcctgcagcttctagtaaagcttccagtctagcctgtgtttctggatgtactgtcctgaggtctgcaccatcagcagtacctgataagagcaacttggaagctgtttccagcattggattttccaaatcatcctgatccaaaatgaaagactccacctcagaaacctcctcttcctcgtcgtcgtcgtcctcttcttcctcgctgttgttactgctggtgccgccgccgccacctccgcctccaccgccgcctccaccgccgccgctgttgttcgctgtcgctgctgctttcgctgctgctggggggtcggcaagtccggttacgcttggccttgtggtgctgctgctgcggcggcttcttcttgaggagcaggtcgcagactcgcaccatcccacgaggagacgaggccgagcgagctctgctgctnnnnnnnnnnnnnnnnnnnnnnnnnnnnnnnnnnnnnnnnnnnnnnnnnnnnnnnnnnnnnnnnnnnntcccttctccttctgcagccgtcgccgccgccaccggaaccgtcgccttctccatccccagggaaagagggagggcgcggacgggggaggggcgtgggntacgctctaccgcgacttcggccgcactggggccgacacagcaatcggt

SEQ ID NO: 441209 - DNA, 2303 bp, Homo Sapiens
  misc_feature (853)..(853): n is a, c, g, or t
  misc_feature (939)..(939): n is a, c, g, or t
tttttttggttccatcggtgattttaagaatttcatttaggctacagaggttcataggaggactcagagttccaggccctccaaggagactctggcctgtaactgatttaatcccagggcagtaaggtgagcagcatgtaaccccttgtcaaataaggcagtggaataagggttgacagaggccagcactcaggctgtgctgctcaatgacagtgaactcttccaggcacagatgatgagggtctgttgctctcagacttggaacatgagaacagcaactgtctcttgtccattaagagaaggaaagccaaatttcttctctgggcaatatccaagcccaaggtgtaagaagaaagcttccttacactttcagcactcaaagtgggattccaaaaatcgtaactacaaaacatgcagctaagcaggctctagcaagtccagaaacatctccacatggtcagaccacatgacaaatgttgcttttggtttgatcaaacctggagctggtcagttgcacagctaatccatggcatccatgatgtcttccaggcttctcttgatttttacaccaacctttagccaaacttcactgagggcctgaagagacttgattgggaaggccatggacatgccaatagacccaagacccatgctagggaacagtgatccaaagcagaaagccatctccctagggccacctaatgaaggccagtgaaacgcaggtgtgttctgcagccccaggccccaacagagaggcatccaaatgcctttcccagctcaggttgcacacagagaggacaatgaatggagtgaaaggaaggtaaggcagggaagaagtttccatcctggtttncaaagaaagctcctcaggtaggcagagggttgggtcaaatgcaaaacccaacgaatggatggtcagaaagcctgtggtgttaccanttttttattctttgtggattcaaaactgaagtagaagggccttctgagtcaaacaacacggcagcctgggctatgaaattctgttctgtgattttggcatcacaaccacgtaaattctcttcacacctctgctcccacatggaaggactgcagggaaaggcacatcacagcagcattgccctggggtgggtggcttcccagaccagagttagatgtccccatgcacaaccatgggaatgcggggtccctgcattcaaaactccagtgacagaatatagtccccaaccagctgctagagacaagaacactctccaggctgcatgctcaggccagtgcctgctccttccatacctcatgggtgacagtcacaaaagtggtggcagcaggagggctcagtagaagcgctttcggctctgttcctgccatttgttgtagagtatgataccaatgactatggcaaatacagaaaacaccagggagaaaaagacgatgaggaagagggccaggccactcaggggcggcagtggagctgtcatctcaggcagcttcatattgtccactgagggcaagaacacatctcgatggagcttttcctcttctggggttctctccactgtcagttcaaacaacttcaaggaaatgacatcatgattatctgagagatccccagtgatggaggaggtgccgaagtagtagccgcggggcaggcggactccgggcacttcaatgcagtccctccactcatgcttgccatcaatatccatcattatcgtcaaatgcctcttgacgtagcgaatcaccaggaaggtgtcgtaatgaagattgcggacaatggctgtgcagcctcccagctctgtaggccgcccatcccgctcatgatcatagctgagggagccgttgttcaccatggctgagatgtaggggaatacccgctggctgcatccgatcctttgtgtaccagatttgccaagccatccccatgcagattcttctttccttgtccatggattttgaagtgcacctgcaactcccagtctctcaggaaacatggcacccggttccataaggcaccctgtttactttgcatatctggggtaaggcggatatactgggtcatcaccatggcattgcccatcagatttccacagtgaggaactgcctgtgcccacacctggtagggcttcgacagcgagtgctcccgtttcaagtactcgaacgtttgacccgccccgacttgctgtggcccctgcccagaccccaacaaaagaagaaggagtaacatcctggacccatcccgagccgacaaacatcgccgccactgctgccacgacccaagtggtcccagagtcgccgccactccgctc

SEQ ID NO: 441210 - DNA, 886 bp, Homo Sapiens
agcggatggagggtcgttggtgggaaagatggcggcgactctgggaccccttgggtcgtggcagcagtggcggcgatgtttgtcggctcgggatgggtccaggatgttactccttcttcttttgttggggtctgggcaggggccacagcaagtcggggcgggtcaaacgttcgagtacttgaaacgggagcactcgctgtcgaagccctaccagggtgtgggcacaggcagttcctcactgtggaatctgatgggcaatgccatggtgatgacccagtatatccgccttaccccagatatgcaaagtaaacagggtgccttgtggaaccgggtgccatgtttcctgagagactgggagttgcaggtgcacttcaaaatccatggacaaggaaagaagaatctgcatggggatggcttggcaatctggtacacaaaggatcggatgcagccaggcctgtgtttggaaacatggacaaatttgtggggctgggagtatttgtagacacctaccccaatgaggagaagcagcaagaggcccagaagaggcgatattctccaggagtccagcgggtattcccctacatctcagccatggtgaacaacggctccctcagctatgatcatgagcgggatgggcggctacagagctgggaggctgcacagccattgtccgcaatcttcattacgacaccttcctggtgattcgctacgtcaagaggcatttgacgataatgatggataatcgatggcaaagcatgagtggaagggactgcatagaagtggcccgggggtccgcctggcccccgcggctacatactttcgggaccttcattccaatcaactggggatcttctcagacatatcatgatggtcatttccttgaagc

SEQ ID NO: 441211 - DNA, 933 bp, Homo Sapiens
cttgaagagtagtatcccagggttcggcaaatccggaaccccgggtgagaaaagcgatggagaaagaggcccagcccacttcagggccgtcagggagctgttcatctcagccagcttcatatgctccactgggggccaagaccacatctcgatggagcttttcctcttctggggttctcttccactgtcagttcaaacaccttcaaggagatgacatcatgattatctgagagatcccccagtgatggaggagtgccgaagtagtagccgcggggcaggcggactccgggcacttcaatgcagtccctccactcatgcttgccatcaatatccatcattatcgtcaaatgcctcttgacgtagcgaatcaccaggaaggtgtcgtaatgaagattgcggacaatggctgtgcagcctcccagctctgtaggccgcccatcccgctcatgatcatagctgagggagccgttgttcaccatggctgagatgtaggggaatacccgctggctgcatccgatcctttgtgtaccagattgccaagccatccccatgcagattcttctttccttgtccatggattttgaagtgcacctgcaactcccagtctctcaggaaacatggcacccggttccataaggcaccctgtttactttgcatatctggggtaaggcggatatactgggtcatcaccatggcattgcccatcagattccacagtgaggaactgcctgtgcccacaccctggtagggcttcgacagcgagtgctcccgtttcaagtactcgaacgtttgacccgccccgacttgctgtggcccctgcccagaccccaacaaaagaagaaggagtaacatcctggacccatcccgagccgacaaacatcgccgccactgctgccacgacccaagtggtcccagagtcgccgccactccgct

SEQ ID NO: 441212 - DNA, 457 bp, Homo Sapiens
  misc_feature (44)..(44): n is a, c, g, or t
ctgcatgcctcaagcccaatgcctgctcccttcccatacctcangggtgaacagtccacaaaaagtggtggcaagccaggagggcctcaagtaaaaagcgctttcggctctgttccctgcccatttgttgtagagtatgatacccaatgactatggcaaatacagaaaacacccagggagaaaaagacgatgaggaagaggcccaggccactcaggggcggcagtggagctgtcatctcaggcagcttcatattgtccactgagggcaagaacacatctcgatggagcttttcctcttctggggttctctccactgtcagttcaaacaacttcaaggaaatgacatcatgattatctgagagatccccagtgatggaggaggtgccgaagtagtagccgcggggcaggcggactccgggcacttcaatgcagtccctccactcatgcttgccatcaa

SEQ ID NO: 441213 - DNA, 1518 bp, Homo Sapiens
  misc_feature (486)..(498): n is a, c, g, or t
  misc_feature (1504)..(1504): n is a, c, g, or t
  misc_feature (1510)..(1511): n is a, c, g, or t
cataaacatttcgaaaggggacagagagttctatgtaaacacggtgaccctttgtctccaggccccatatttgaacgggccttcactcctaaaagggggaaaaaatccagttagacaattcctaccttatgtgtgtccggaaaaaaaatgggaacctcttacgctgagaccctcaatttttcttttaccctttgttccccggccccttgcttaacccaggaaatatacagtggttaagggtaaaaaagagtggccataaccctttcctttagaaaaggttcaactcagggcagaaaaaaaatgtgtagggattttccaagcctagttatgatcactgggtgaccaaatttccaataattttgggccttggtttggctatagtctcaattagaaagggtatttcccaatccaaaaagtggaagtgttgtcttttcgttaattcaatctgaagggatcatattatcaaaaaccattacatttctttcnnnnnnnnnnnnnaacctgcttagaaaagctatgtagttcaattcatcaaaaagtttctccatccacggtggtcccctctggctctctctttattggttttggcgggagatggcctgtggggctttttccggtattccacttttgtccagcccccttcgctgactttgctgtcctcttcactggctcttgagtcagtctcagggtgcaaaggcatccctggtatggtgttgggttggtggaggtccctggggcttctcttgaagtcaggcgactggtgaggattgagtgctgactgagaaaccctgtagaactttccagggtatcttcctcttgaaggagtggaatgctgactctttccactgtatcttcctctaggagaagaattgagtgatatactaccacgtccatatttgttcctgcttctgtctgagtatcgacccctctctgaagaggtgtcagtattgccactggaaaagccactgtccctagagttgagatgtagggaagagaagtttttggtcagtccatactgagtaggagacgagcttctggactggttcacaggtgtaatctgttgatacttaatgggcacctggggccgtctcacagcagcagcgtaggaatcctggccatcaaagtgtgagaagaacggtgaccccagaataggattgctctgggaacgctgtaaagaagtgttggatgcaatctgccgcatcctcagagtatctaaccactggcaatcagcacttgagtcggacctgcttccagggttgccatctgaattggtgaataatgtctgaatggcaagttggactgctttcacttcatcctgaggttttgttctactccactgaatcaaatggacatgtttagtgctttttggagttctaacatcactctcatatgtgacagtgcactccacagtctgactttttgctattcctacaatccacttctccattacaaatggtggctttgtcatctttaaaatctccgcatcaggtaggttagtgttgantgtcanncttttat

SEQ ID NO: 441214 - DNA, 723 bp, Homo Sapiens
  misc_feature (6)..(6): n is a, c, g, or t
tgctanaaaaataggtctttattcttaggaaaatatagtcagagctagcttccttatgctatacataaaatcttaacatcagaggcagtacagatagtacagatagtttttgaactgatctccaaacaagcacaaacccactacgttgaaaagaacaggtaatttgaggtttttggcaaaagacagtacttcacacatctaatccaaatcaaagggcctgcagacagttttcagtgagatgaaaggaatgaaataaatataaattctacggataaataaaacacaatttaaataagctaacagaactaatttttttaaataaaaatactagtcaggtacaagcttttgtttctcaatgccagacttctaaatatttaccagactactgttaatattaaaaacctaatctttgacccagagcgttagtaataatactggtttgcatctgcaaattttcaaactgaatgcttctggtcctgaaaaatattttaggtgtattactgaaggcagactgtggtgctaatagaatttaagtcttaaatacttttaaaaagtgacagaccccaaaagtccatctactaatttgctagttaaaacatgcctgtgagcactgcttcataattagcatcttaagaaaagtagtggcatgccctattgagtggtatcatcactgagtaattaatacaccttaaaacaatatccccacaagtgtgtttcttttat

SEQ ID NO: 441215 - DNA, 1378 bp, Homo Sapiens
  misc_feature (3)..(3): n is a, c, g, or t
  misc_feature (5)..(5): n is a, c, g, or t
  misc_feature (24)..(24): n is a, c, g, or t
  misc_feature (32)..(32): n is a, c, g, or t
  misc_feature (46)..(46): n is a, c, g, or t
  misc_feature (52)..(53): n is a, c, g, or t
  misc_feature (57)..(57): n is a, c, g, or t
  misc_feature (59)..(60): n is a, c, g, or t
  misc_feature (64)..(64): n is a, c, g, or t
  misc_feature (93)..(93): n is a, c, g, or t
  misc_feature (95)..(98): n is a, c, g, or t
  misc_feature (128)..(128): n is a, c, g, or t
  misc_feature (134)..(134): n is a, c, g, or t
  misc_feature (144)..(144): n is a, c, g, or t
  misc_feature (268)..(268): n is a, c, g, or t
aananagttggtggagtgtctttnagttttantctattagttcttnctcagnnactntnntatnatatatgatgttgtcagggtgtgtgctantnnnngggggttctccagtgtgtatgtatcagggnctgggnggggtgagcntctatgtatgtaaggcggggagcgcctgtgtctgttcttcttcttccatgcagggcaccctccccgcctccccggcctgaggagcctccgccctgggtgccctggcttccgggagagagcggancctgcaacaccaggctcagaaggggcctgcactctccctctggagggctcacaggtgtgtcccaccggacgtgcagcaggggcccagctgctcctccagtcctgggaagcagctcctccaccctcccctggacaagaggaacaatgtgtggcaaacgggctgacaagggacgtccctgggtaccacagatgtgccctggttcctccgtgcccaccagcagccgggagaggcgaaggcactggcctggcctggcccctgctttgagtcttatcatttctgcatcattctgagctggaaacctccccaaaatcattcaaggacccacataaccacacaatggaagccttgcagccaccttacagcaggaaaggccatagccaggtccccccagctgcctcctgggctccgacccacccaccgtagccacagcctatttacacacgtggcgtcaaagccacggcccgtcaattactgcgtgtcgctcccagctgcagacgctggacaaaagggcgacggggtggcagcccccagcgaggacggatgggccatagggctgctctctgggcatctctgagcaagaccctccggcgccacagcagtaatggccagacgggcctgtacccaaaaagccagcggcgacagtgttggaggaaaacaggccaggagagccgtctcctccccgcggacctctgccaagacctcctctgctccgactgtggcagcggctgctccctccgcgcccaccctcgtcagggcaccctcgcctggccccactccccaccggagcctgggaagctggggtctcccagagccaagcctgacccctgggagggggcgtcccgggcagagcctgggcctggtgtggccgcgaggccctgctctccgcggggtggggactggatggcggcaggctgtgggggaggaagacacacgtgcagtgaaggagactgtgggctccaagacttgtcacctccctgtccacggccccgccctggccacatgcacggattcctgaacccctgagaacctccttctagaactctgcgtgaaaggcgcgaggcagtgtggaggggcaaagggggaccctctgccccgcgaagtggccccatc

SEQ ID NO: 441216 - DNA, 1775 bp, Homo Sapiens
  misc_feature (399)..(409): n is a, c, g, or t
  misc_feature (1497)..(1686): n is a, c, g, or t
  misc_feature (1702)..(1716): n is a, c, g, or t
ttaggtttctccaatacaatttattattattacattttagcttgcatttactaagtgtcgtggaaatattatactcaaaataacagagctccagagaaagacagttaactaagaaagaacagtttcactttcttagcttgtcaactcctagttagcctgcttgcctccgcaccacagatgcttgtcttcttgtggttgttaccacaagccaaagcttgaatttacatgggcatcaggccaagtctgtaaatccgtgaagacaggccatcaactgcattgagggtacagccttgctgaagggtcctttcttgacagtcaatgatgatgaatctggaaaaactgtctattctcttaggagaagaaaatataccccacctaaagtcgcagctaccattaacnnnnnnnnnnnttagcaaaggggaaagaatcaatggtaaggacagtaaatatactctgagaatagagtaagtacaatttacacacgctggagtaaatagtgaagcttctactgagttctactgagtctaagctcttttatttttaaaattctgataaaaatttactcaattacattttatacattaatatttagtgaatttgtccaaaaaggctatgtttaatttatgtgtaaaaataacaaaagatgtatcagtcagtctctgggcaataagaaaggaagaaagccttgctagaaataataaataatctcacgcaaaaggccaggtgacataagaatactacaataatcaatatgttttctttgtatttacaataaaatccatctgttaacactgtgatagaaaaaataatcagtccacatcatgtaataaaaacaggctttgaggatgattatacctcttataataaaaacatacaaggatttctcacagctaaagtacttttcaactttgacaactaatgacagtcatgggtgaaggtaaaactgacagagtactttagatcagctatgtcctacagtcaaggaatcaagggcattacccatttaccaagcagcaaaaagcactttcatttttccagaactatttaaatacagtagttgccatgtgatcagttaattttactttgtgagttagataaagtaaagactaaattgggaaactgcaataagtaatcaaaagtagctccaaacaacaaagccatcaatagaaacaaaaggcatttttctaggtgtatcatgcataaaaagaataattacataatattattaaatatattccttaatgaccagattaataaatgaggtaaaatttagtcattggaacaaataaactatatttaatcacttgtgttttgctgtcactgtttaaaataattaacttaatgtctaaaaactacatactcttgaatgtttgctttttagagccccttgtgggatattaaagagccataacaaattatctgaatataaattatcaataccaggctgggcacagtggctcatgcctgtaatcccagcactacaaaaaaatacatgannnnnnnnnnnnnnnnnnnnnnnnnnnnnnnnnnnnnnnnnnnnnnnnnnnnnnnnnnnnnnnnnnnnnnnnnnnnnnnnnnnnnnnnnnnnnnnnnnnnnnnnnnnnnnnnnnnnnnnnnnnnnnnnnnnnnnnnnnnnnnnnnnnnnnnnnnnnnnnnnnnnnnnnnnnnnnnnnnnnnnnnnnnnnngcaagactccgtctcnnnnnnnnnnnnnnnttatcaataccaaatatgatacagttatgtaatacccattttgcatatgcacagtggcc

SEQ ID NO: 441217 - DNA, 412 bp, Homo Sapiens
  misc_feature (218)..(218): n is a, c, g, or t
  misc_feature (257)..(257): n is a, c, g, or t
  misc_feature (380)..(380): n is a, c, g, or t
  misc_feature (391)..(391): n is a, c, g, or t
ttttttttaggtttctccaatacaatttattattattacattttagcttgcatttactaagtgtcgtggaaatattatactcaaaataacagagctccagagaaagacagttaactaagaaagaacagtttcactttcttagcttgtcaactcctagttagcctgcttagcctccgcaccacagatgcttgtcttcttgtggttgttaccacaagccnaaagcttggaatttacatggggcatcaggccaaggtctngtaaaatccgtgaagacagggccatcaactgcatttgagggtacagccttgctgaagggtcctttcttgacagtcaatggatgatggaatctgggaaaaactgtctattctcttaggggggangggaaattttnccccacctaaagtcgccggct

SEQ ID NO: 441218 - DNA, 796 bp, Homo Sapiens
taaaccaggattgaggtttctgatacattgcacagcattacacagagttatatgtccaaggttatctacatcaatttcactaaacatttgtgaaacccaagaagtcctcatgttatcttggctactttctaacatatcaagtgtatgttttccataagaaattaggtaccgcagtcctgtaaccccagatggtttgcaacatctgcggagttggcaaccaaatccagtgactcataattctctccatatatgacggaaaacgcacaatcttcagatatctggtcagaaatgccattgctgcggaatatgtctgtgttttttcctgttctcacttccttgatggatttaatgtcaatcttggctttctcagaatccttcttagatggctcccaccttaggctctgcatgtcagcatccagtagaaagtacctatgataaattctagagttggagcgaacctttttgagttctgaaccttcaaccacttgaattaatacagtcacttgcactgctgatcttcttctctgttggcatgctgctgaatgagactgtctttttccgttccctcttctgttttgtaccatcaatttccagtgctcttgaacaagcctgtggagacggtggcagcggtgtcttccctgcccggtgatggagcacgtcacaggggagcacctgctgccttctctctcgggtctgctttgctcctctctttgcagtccattcactcgaaatttcctgagcagcaaccactgtaaaatactccggctgtccataatacttaggtacgtttcccgct

SEQ ID NO: 441219 - DNA, 910 bp, Homo Sapiens
cgtgtgctgttcttgaggatccctgtggctactgctggagcctcaggtgggattgctggggtgctctgtgaggagagccctggccctggggacttcccacccgggatctctgcctggaggactccttcagtcccgcccctacctaaggccctgcccagtgctccactccagctcctgcttccctttgcaccctccagccaatccagctcctcgcagctcccagggtgctctgcggcttcattagctctggcctttgtaggtgctgctccttttgtctgggaggcttcttgccttctcccctccccattactgtttgtcaggctatcctccacttgtccttccaggtttagcataagtgtttcttattttgggaaacttctgaccaccaccgtccccatcccaaccctcacttaagtgcctcaggtgggctgccctggcctccgtattcccgcatcagagcacgatcacattgctgtgcgtagaacctcttcacatagttttttttcctccaccaaacagaactccaagctcctagatccttgagggcagggtctggggatgcattcattttgtttcatcccacagatacggagttcctcctgcggcaccattgtgctgcaccccactgctcagctgacggggtccaggcctgctctctgtgtagtgggcagtagcagtatctaaataaattcctgatagagcatcaggcagtaatatgcaccctggagagacctacagcagggtcaggactgcgaaacggagtaggggtactgcctgctctgggaccaaccaggccccacacaggcctgagtgtgggcttgctaaatggagtcgctgagcctttgaacattctcagcaggtccgttcttgaactggttctccagcagctctcagtgctgtttccacctga

SEQ ID NO: 441220 - DNA, 1360 bp, Homo Sapiens
  misc_feature (852)..(852): n is a, c, g, or t
  misc_feature (880)..(960): n is a, c, g, or t
  misc_feature (1035)..(1035): n is a, c, g, or t
  misc_feature (1042)..(1042): n is a, c, g, or t
  misc_feature (1105)..(1105): n is a, c, g, or t
gccggcccctccaggtttattagtgttgcatcagcaccttgaaatagtccacacggtcacatacgtgacattagaatccgttccccaaaaagctatttacattaatccagggtttcattaaaaaaaactagcaacacatacatcctagaaaccaaacaatgcacaatgaaccgcatgggggtctgcagaaactacagtggtgcttctttggcccacagggtcagattccagaggtgcccagcaagcccagctctcagtcccctacaggccacacacccgcggacggcaggacaggtctcggggagggggcggcctggccctcggaagaagtggcctggtcattttcatgaggaattcattcccggaggaaggcgagaggcactcaggtctttccatctgggaatgaggacagtgtggcaaggctgccagtaccctgcagagacacccccagctctcacccagaggcccctctcctgccccagctctggccgaggcactgaaccaggacactggcttgcatgcccagagacagtggccaaggggaccaacatggaagaggaaggcagcagaccagattgcagggcgggactggcccacagctggcctgggttgagggtggggtctgtctacgtaatagtggacagtggccaccaggccttaagggtgcctcggtggtgactggtggcttaacctttgagactgatggggctgcgccctagctctacaaggggctgcctcctgtcctgtgaggccagttcagggccaggttctcggggggtgtgcacacctcacacacacatcccccgcccttaccgcactggctgtcagatggctttggtttctagttgtccnttggtgggacagagtgctcctccatgcnnnnnnnnnnnnnnnnnnnnnnnnnnnnnnnnnnnnnnnnnnnnnnnnnnnnnnnnnnnnnnnnnnnnnnnnnnnnnnnnnctggcatggcccaggtcttgtctgcccaacctccctggtgctgggcatggtgtgggggatggaccgtggggctcntgggtgnagggcagacccacagcccagcagcagcaggggcacagggagtgccaccagaacccccagctgntggatggagactctgcccatgttctccccttgcgtggctaaggatggagctgtgcagccagatgggaggtacggggtaggcaggagggctccaggaaaggggctgcccacagccaggatgcactaggcagcctgtggccccttcctctaaaacctgctctgaggccagaaagccacagcaaggatgtttccaccttcatctccctactgagtgtgacccttgggaaagaaacaggaagagcaggcaggacgcggt

SEQ ID NO: 441221 - DNA, 1515 bp, Homo Sapiens
attgttccaaagttgttttttattttatattttttgaaagaaataaaattatatttaaaaaaaatagagaaatctcacaaactgatgaaagccaggaacaaaaagaacaagttagtactttttcctgagaggcagatctaacagctgcagaatggacttcttccttcccagcttttgtgaaacaaaacaattctcctaaggcatcagaaagcactgagtgcaaaatgggttgttcaggtacaaggtctcaagccctctaatggggactgggaaacgtgaaaagctgctacaatttcctctcctttaataccaaatgttaaactgtctatacttctactttttatgtaaatttgagaatttcacactcatgacctgcatttcggacctggtcgtgtttgattaaaatcttactacttagtgatctgcactggcatcccaacaactgattgcaggggccagcagcaggaagagctgctctgatctcaccatccgcagccaaaaccagccaaagagcacccatcccaggagactcagatgcagctagaaatttatgctaaagcctaactcctaactatgctggacctgcccacaagggcagatcacatcctagtggttcacaggtcacacacagaacaaaagttacaaaagtcacctcacaattcccgaagctctaaattgattcattccccacacgtggtttccctaattttatactgataaatctatcaaattaaaagctttcatttccaaccacttcaataagatagacaacaccatgcttaacatttttgttctctgcctaattgcttgcttctgctaaactttgcatttccatggctaataggaaagcttgaacccatttttccaaaagttccaatcttgtgttctgatttgaaatactgagtacacacccctgatgctttctctaaagtttctttttcaagatacttaagtcaattcatataactggtataaattccatgggagcatcgaattcccaagagatttaaatgtctgtagcgcctaccataggtgcttgcttatacattcaagtgacctaatgcatctccaattaagttaattatgtaacaccaatcagctgctaaggagccagtaggatcctgtgggtgtgtcctggctagtttttcaaaacatctctcatccttcatgggtagattcatactccaaggtaagctggtgttggaccctagaaacccctatcctgtctcctggctctatagggagttaacagccctcctgggacagcttctcctgggctccagttttacattcagaaggacctcacgactcttaagaatggctttgctgagttgctggacaccatgatgtcttctcctgcccagaaacggcacggtcagcaatcttccaccaacaggagggtgcaacttgagttttattctggctacatcatcccaagtcctagtatgaaacagcaatgtggccaaaaatgaccatgttcaaataagatacctgataacacaaacttttaaatca

SEQ ID NO: 441222 - DNA, 1173 bp, Homo Sapiens
  misc_feature (116)..(136): n is a, c, g, or t
  misc_feature (138)..(138): n is a, c, g, or t
  misc_feature (142)..(142): n is a, c, g, or t
aaagccagcttattgcgcccaggtttcactttaccctaccggggccccgcggcggccaaaacgaaatggtcctagaaagtttcttggaggggccgaggcggcccgacatgtttttnnnnnnnnnnnnnnnnnnnnntnttantgggaagtcaggatttattaagaacatcgggatcccagatatttctttttttaccatataccttaacatttgggggattttgattcccacaaaaacctctatcatttaaaaccagatattcgaattacaaggctaacattttttagctaatcaactcttcagtgctgatcccagaaaatagcctccaatgggtctttgagtcatggaaatggacaacttttcagccattgacatgagtggtgtcggtggtcacacctttaacattcaagccacaagctctaaagtctggaaagggtgaggtctactgtcctgcattgtcgccatctgctgtcgtattttcagtgctaatggactgtacgttgtctgcaaggttgtgtgcatgctcaagaaacaaatctttgagtacacttaattccttggtcagcaatttgatttttgcttccaaccgttcattctcttctttgagctgattgactctctgcagtgtgtcttgtgctttctgcttgcttttcaaccggctctttttcacagccatgttgttcctctctcggcgttgccgatactcgtcactgtttcgatccatgggcgaactctttttgctctgcttgctgggagccacagctttgcctcctcccccagggccagcaggcaccagctgaggaacctgctgtaagccgctggcatgtgcctgggtatggataacactaattccgttcacccctggagtgctgttttgctgcgatatcttgctcatttgggcactctcccttgccaacacagaacaggtagaaatgagagcagggtgatcaatggtttccacgctaagctgccaaaaaatcttcacatgtacctgctcctctagcccgcctgcccccaggcggcctccactccgagcggccccgcgcggtgcggcccgagccgacccaggcctcacagcccgcgagtcagcgaggaggagcgacggttacgaaaccggcagcctccgcccgttccgcagccgcggccaccggcttcccctgctcgccggggcc

SEQ ID NO: 441223 - DNA, 579 bp, Homo Sapiens
ctggattatttaccaagaaagactacttctgcttataatagatatcaccagttcagcttaaataagttaaaaaacttttaatgaaagtatgcacatgttcttctttaaataacccaaaggctcataatggaaaatagtctcctaccaccattcacggctacttatggcttttagctgtttattcttatacttggctccaaattttaaattgcttatttaaattttattttttcttagacatattgactttataatattaacttgtatatgcctgaatctccctaacaagcatttgagatggctactatgtgccagagaccaaggtggatgcactacatgaatattgttaatttcacaaaaatccagtaagacttatatatgttgtgtgcatgtgtctgtgcatgtccctggtgtgtaggggcagggaatgacatttatatagagaggaaactaaagatctaagagacatgtgctttttagaaaacttgtatgaatcaccaaaagttaaagtgaacaccaagagaagttaacttttgaaaaaaataacacttgtgagctggtcaataaactgatttgctg

SEQ ID NO: 441224 - DNA, 1143 bp, Homo Sapiens
tcacagggagtctttctggccttcttccaagtaaagaagccgctctttataatagcggcattcagattcaccagtcttggtgttgatttctgccacaattccctgaatgatatttatagcttcttccaagtgctgctgatctggattatcatttggtgtgtgcctcaagatttctcggagaagcagagggtattttaccaggcggcttcttggaatatcgaggaaattccagagatctagtttgcggctaaagggggattctaaacatcgctgtaggaaatcctggactcggtgatcttgctttttgtggtccagcagagctttggcggctacttgattgctgcagtagctatcataggagctgaggcaagggagccagcccacgaggatgggaccaacatgttcagtcgagccatcaggcttcctaacatctcgaagctgactaaggagctcttcatgtagaggaattagagagtccagtgttccaaaaatttgattcaactcttgttctgtcattatggagagtttcagcatggggtcatgataggccttttttgctaatttcaagtcttctatcaagtcttcttctccttgggaaagctcaaagatcgcctcctgacgtttgatttccttggatgtaagcatctgattgacgcacacatcgaaggtctcactccacagcttgctatctctccgtttcgtgctcgagggggcggcatttctggaccagggtcggggggcgaggatgtcagggcggctctcactgcggaagctaatggagcgctgcagggtttgactgaagcgctttaatggcgtggccttcacgggcgggatgaggtttgctagcgacgtgactcgggaaaggggtttgacccgtttattactaggctcctcagcgtccttggccggaccgctggccgggggtagctccaggctgcagttcgctctcttgaccgtgaggtagaaggggtaatccttggccaccatggcggctgccgggcctgccctttgggatgtcaccgctgaccctaggcgactacaaaactcccaggcaaaagggggccccagctccacgatgccgggcggcggcggcgacacggagaccgacagccggcttctagccgggcaggactcgactccgct

SEQ ID NO: 441225 - DNA, 1798 bp, Homo Sapiens
  misc_feature (588)..(595): n is a, c, g, or t
ttgaatatactctttttatttcaaaacgtgggaataactcaaaatttgagcctccaggaccaaaacacatttgaaccaaacgttcagaagacaagccaggccaccattttggcaacatgtttcacatggacaagtggatattagagaatgatgcccgtgacacggctaaagctatagcacacccacaaatagattcatacttggttgtctaatttgcatgcatgagtatggtgcattctccatgccactagtacatatatgccttttccagagtcagtgcaggatccgtatttgtgcaagtctttaaaagtctgctcccttacaaaattttaccataatttatctgagacagccttcctgtgacaaattctttatgctgcttttactttcaaaaagtcatttctgaataataattatagctgtcaagagttccagcatcacataaaagaatctgtttgttagttattttaatgtcagttcgctggctgtgagtaaacgtagctaaacatatccacatgcttggtatctggactttgaaatcggtaacctttagcagcaatggcaaccttagaccaaaatgacaaggtnnnnnnnntcatcaacaataacagaagatgtcccagggaaagctgggcttttctactttccaaagtaaagttcttccccagcgtgcaccaaacactgacagcctgacacgcttgtgtatgagggcccactttttcccactaatgctgaattgttggaaacccaaacagcattgagagccaagggggaaaatgcctgaatctgaaaatgaaccaaaagaaattgtaccagagaaaggagatgggaactgcaaagaagttcccagagtatctctctctgtcaacaagcatgtagagtctttattactagaatatgcagagtcccgggagaattgttgcatccttttttgccttaactcttttcttgccagtctttccctggctggtcgaactgcctctacagttgtcccatccagaagccacacacagcagcgggcctcaggaattgcattcctcgcagtgacaggagaggatgtaccggtaggtggcagtgagtcgcatgccccctgagcatcgcagccgcagtgccttcagcttggaagtctggggccggcagcagtgacaggaggaacggaagggttgcttgaggacagtgctgaacgacaccaaaggctcggagcgtgacgcctggctgcagtgcccctcgcacctggccaggagcaccatctttgagctacacttgtacaatgggtgactgatagaatccacatagtggtgcctcatgcagcgtcgagggtccgagtccattatgaatgagctgtccgttttactgtctgtatctcccattatcaccagcagggagagcatagaaaaggatgcagctagtacatgttttctcattgttgtaaggaaaaacttctctagaagaacagcagagggaggcagaggacaaaaaattggaaatggcttcacctcctaggatccagtcccgttcaaggaaagggcaggatcgggctgaagctttctggttgtcattgtcctttatgtgctggagttttgtcttactctttgcacttgcaatccatcatcacagtatctgctgcacagcttaggggaacgcagggctcctttcttctcagacttttctgagagctagaaagaggtcctgttacttccaaatgcttttgttcttctgtccctctgtcacatggcttgccttttatatttgcaacacacaaaagttaggactgttgtttaagcgacacagggagaga

SEQ ID NO: 441226 - DNA, 1020 bp, Homo Sapiens
  misc_feature (7)..(8): n is a, c, g, or t
  misc_feature (11)..(11): n is a, c, g, or t
  misc_feature (22)..(22): n is a, c, g, or t
  misc_feature (24)..(26): n is a, c, g, or t
  misc_feature (35)..(36): n is a, c, g, or t
  misc_feature (41)..(41): n is a, c, g, or t
  misc_feature (100)..(100): n is a, c, g, or t
  misc_feature (102)..(103): n is a, c, g, or t
  misc_feature (121)..(121): n is a, c, g, or t
agggggnnccnagaagcggtcntnnntcaaaggcnnaaaanacatttctggggcactctctaggctgagtgcaaatactcaaagatcctatatggatttntnntgcatattaacctgtctntttgcaccaattcctcatttggggcagcctccctctcgctcatggcacactccgcttcctcgaccagcacgtactcatggtcaggccctctgtccccaggatgcaggaggccgatgtgctggctgccgtcgttcatgatgaagtccacgctggaggatgagagcatcttgtttgcaggcaacagacatggggcagaggtgaggcatcctctcgcacgcttttctcaaagctctctgttgttgggtggcagccagagccctcctgcaggcagcctaatggctcacggggatcacccacaccacctgactttccagagtccccgtttaccacagaaggtctctctccccctgctgtgccttccatgttggaaaccattccagagttaagcttgtcatgcacttgagcctcttcattccttttcacaggaggatgctcaagcggtttcgtgtaatccttgaggattctgcgcactgtactctcatcctgcccctgtctacgcatcagctctgctgcccactcaacactatgctgatacctctttgatgtgatgataggcatgtttgtcttcatatctttccatttagcaaccagtttaggatctgaaattgtgaagcttggacggcttcttgaaagaataccttttccaaaataacctttcccatagagctgctcaatgtcctccgcattcctcacaatcacattgttgttaatcatttcagcacggaatatcttgaattctttcagaggaccatggtcctgaccaaaagggattggcaatggagactcgtaagtctcatacactcttcttttcctctttggggcatggaaaactgcttctgccatttttcagaggaggtattctttcttggccccacgcgctcgccgttaccccggcaacg

SEQ ID NO: 441227 - DNA, 1144 bp, Homo Sapiens
cggctcggcgcccattgtggtgtccccgtttgctatgcgtcgccccccctgttgtgcgtgtgacggcgtctttgttctctccgcacagtgctcgggcgccgtgtgtgggcgctcctttgtggcgacgctttgtgctccggcgcctctgtgtgtgtgtggggtgggagcctcagcggctctcgtgtaggcgcagccttttggcttcaccggggtatcaccttatccgccccgtggactgtcccggagtcccccgttttgccaccagaaggtctgtttcccccgctgtgctcccatgtggaaaccattccagagttaaggcttggtcaagcactgtgagcctcgtgcagtgcctttgtcacaggaggatgctcaagcgggtttcgtgtaatccttgaggattctgcgcactgtactctcatcctgcccctgtcttacgcatcagctctgctgcccactcaacactatgctgatacctctttgatgtgatgataggcatgtttgtcttcatatctttccatttagcaaccagtttaggatctgaaattgtgaagcttggacggcttcttgaaagaataccttgtgtccgaaataacctttcccatagagctgctcaatgtcctccgcattcctcacaatcacattgttgttaatcatttcagcacggaatatcttgaattctttcagaggaccatggtcctgaccaaaagggattggcaatggagactcgtaagtctcatacactcttcttttcctctttggggcatggaaaactgcttctgccatttttcagaggaggtattccctttgcttctttccttgactacccccacacccgaccgaactccaccagaggctgcggctcctctcgggcattgtcagctgcaccttgcgccccagccccaccagccctgaacaaggcgccggcgtttccaagaaccaagggctgcaggcgcacgaggaaagcgcggaggagtcagtgaccgggcgcactcggaagcctggctccccgtcccggcactgtctcggccggctgtgcgaccccagcacagtacctaggccctttcctctctcgccctggaggactttcggaagagcgagatttcctttcgctgcaaaacaccaactcggaaaggccgcgctttcc

SEQ ID NO: 441228 - DNA, 1147 bp, Homo Sapiens
  misc_feature (285)..(285): n is a, c, g, or t
  misc_feature (288)..(288): n is a, c, g, or t
  misc_feature (293)..(293): n is a, c, g, or t
  misc_feature (296)..(296): n is a, c, g, or t
  misc_feature (394)..(394): n is a, c, g, or t
  misc_feature (916)..(916): n is a, c, g, or t
  misc_feature (919)..(919): n is a, c, g, or t
  misc_feature (965)..(965): n is a, c, g, or t
  misc_feature (992)..(992): n is a, c, g, or t
  misc_feature (1005)..(1005): n is a, c, g, or t
  misc_feature (1015)..(1015): n is a, c, g, or t
  misc_feature (1021)..(1021): n is a, c, g, or t
  misc_feature (1030)..(1030): n is a, c, g, or t
  misc_feature (1033)..(1033): n is a, c, g, or t
  misc_feature (1051)..(1051): n is a, c, g, or t
  misc_feature (1055)..(1055): n is a, c, g, or t
  misc_feature (1057)..(1057): n is a, c, g, or t
  misc_feature (1064)..(1064): n is a, c, g, or t
  misc_feature (1068)..(1068): n is a, c, g, or t
  misc_feature (1074)..(1074): n is a, c, g, or t
  misc_feature (1082)..(1083): n is a, c, g, or t
  misc_feature (1086)..(1086): n is a, c, g, or t
  misc_feature (1091)..(1091): n is a, c, g, or t
  misc_feature (1102)..(1103): n is a, c, g, or t
  misc_feature (1109)..(1109): n is a, c, g, or t
  misc_feature (1111)..(1114): n is a, c, g, or t
  misc_feature (1129)..(1129): n is a, c, g, or t
ctcaccactcacattttattgagaacagtgggcaggggggctgggagaggagtgctgaccgttgtgaaggagtaagaacccaatgggtaaggggccagacaggtttcacctggctccatggtccaggaaagggcctgtggggtgggcacctgccctctctgggatccctcagcaggagaatgcagcaggctcctccaggaaagggaggcattgggagtgatgggttgtaattcccatagcatccaacccaagagtgagaggggtggtgctaatctgggggtaggnggnggcanganagggctactctcgaagtatctagcccagctcctcgaggtttctggaagacttcaatgttagtctgtggagaccctaaagatggagattgaggccaggngagcccctcactgacccattttaactggccccaggaataccagagcatcctaatctaaggagcgcaggcctgtcaagccccaggtctcagccatgctgctgagtgctcattgggaagcaggtgtgagaaagggtgatgacccactatgtgtccctcctgaggaaggcagaggccttttccatactccataaggccagccactgtgccaggtcctgagaggcaaggcacgagtctgggggaggggttaatctccacttccccagatgtccaaatgggggtgtgggtgggggaagtaatccccctggtccagcattcccaggagacagcctcagggaaggggctcaggatgcccagatcctcctgcccgcctctgcttgctgggccagtggtcaagcagttgccttaccagccacagctgtggtgggggggaggtgaggacgcctcaccacctcccatctctgcttcaatgaactcggtctttcttttaccctcaaaagaaatcaacagcaagttgagaggggngancctcaggtgaaggggtgagtatgggccgtggggcgggggggagaanactgttaggccctggccctgattccanccctcaaacctanagtggagganctccangggaggcanttntgaaggctcagtgcaatncaantntggccantcanagcatntccaggcnnagnttggnggggttgggcnnaatcangnnnncctcccctacaaaanggtggattgggaacagca

SEQ ID NO: 441229 - DNA, 1663 bp, Homo Sapiens
gagacagtcaacgcgattggtggtgggaatagacaggggagggtggatcaaaatagtgtatccatgggaccgggagcgggcacgtacaaaagatggtgtgcggagattgtagagcgtgggcgggaaagaaaaaattcatggtgcggggccggggagcaaaggtttgttgatgagggttatcaaacggcacgagcgggtttactaagtgcggagcaggcgggggagggcttcccaagttctggggagggcacccggggctttagccaggaccttcaaagggatgccaggcggaccgggcctttccaggaggccagacgggcggggttcaaccggggaaaaagcacgcggcaccaccttctcggccggggccggcggggtgccacaccagcagggcgcacacagaggccagcgtgcgctcggcgccggcggagggcgggtgcagcacatacatgtccagccggcccacgcccatcttctcgaagagcacggtgggtttggctggcacggggccgcggctgagtggcagaggcgtgatgcccagctgcgccaggaggctcagcgccagctccgcctcatcctcgccgcgcgccagccgcgacgcggcctcgcaggcgttgaagaacacgacccccaggttgggggagatgagcctgcgcagcctgtcgtcccaggagcccccaccagcagccacctcggagcgctccgccagtttgcgccgcagcaggctgttgaggccggggatgttgtcggcgccagggtggttcaccagcacggcatccacgcggtccaggtgccgcaccagcttccagaaactggacttggggtttgagccaccgttgaccagcacagtgaagccattgacggcgaagaaggcggcatccccgaggcctccagggaagatgtagcagcagggccggcccagcctgaggaagcccccggaggtcgggggctccagcagctcgaagggggacggtggctccagagactcagccacgtactccaggaattcgcacaggccctcagagttgggcagctgcgccggggggttcagccgcagctggagccggagcgccccctgaaggccaggcacagcgggtgccagctgagcccagtcaccgaaggtggggcaggtgatggtgagtatgggcggctgcacaggtgggggcgtggtggccaggatgtcccggatctctctgtccttcaggacctggaggaagtggtgaggcgagaagccccctgtctgtagcagcagctcccccgtctcctccaggcagggcccagccaacaccagtagcttgtgagaggcagggtccaacagaaggttccggagctcatcatacagggacttgtctgatgggttcaggaggaccagggtctccaggttgtctccacggtggtgcaggctccgctggcctttcacaatgctggagaaggtggcagagtgtcgggacacaaagaccttgagctgttcatcaaggttgcagacgccaggatcgacatcccaagaccggatgcctctttcgagctcctccaggacgtaggtgaggagccccgggctcccgaactcgctgcccaccacgaggagcagtgagctcggagccgcggcagccccagatccagccaccgccgccatcttcggatcccgggaattccggaccggtcc

SEQ ID NO: 441230 - DNA, 1153 bp, Homo Sapiens
  misc_feature (87)..(173): n is a, c, g, or t
  misc_feature (845)..(845): n is a, c, g, or t
  misc_feature (978)..(978): n is a, c, g, or t
  misc_feature (988)..(988): n is a, c, g, or t
  misc_feature (1060)..(1060): n is a, c, g, or t
  misc_feature (1062)..(1063): n is a, c, g, or t
  misc_feature (1073)..(1073): n is a, c, g, or t
  misc_feature (1084)..(1084): n is a, c, g, or t
  misc_feature (1087)..(1087): n is a, c, g, or t
  misc_feature (1092)..(1092): n is a, c, g, or t
  misc_feature (1112)..(1112): n is a, c, g, or t
  misc_feature (1117)..(1118): n is a, c, g, or t
  misc_feature (1130)..(1130): n is a, c, g, or t
  misc_feature (1151)..(1151): n is a, c, g, or t
aagccaggtgcccccgcccgccctgtcctctcgacgaggcggaggcgtcgccgcgggccaggcctcggactgccgcgtcggagtggnnnnnnnnnnnnnnnnnnnnnnnnnnnnnnnnnnnnnnnnnnnnnnnnnnnnnnnnnnnnnnnnnnnnnnnnnnnnnnnnnnnnnnnactcggcggacgcgggcggacgctgggcggcccctccctgcccgcgcgcccgggcgcccctggccggcgctgggccccagagcgatgacatcgacggggaaggacggcggcgcgcagcacgcgcagtatgttgggccctaccggctggagaagacgctgggcaaggggcagacaggtctggtgaagctgggggttcactgcgtcacctgccagaaggtggccatcaagatcgtcaaccgtgagaagctcagcgagtcggtgctgatgaaggtggagcgggagatcgcgatcctgaagctcattgagcacccccacgtcctaaagctgcacgacgtttatgaaaacaaaaaatatttgtacctggtgctagaacacgtgtcaggtggtgagctcttcgactacctggtgaagaaggggaggctgacgcctaaggaggctcggaagttcttccggcagatcatctctgcgctggacttctgccacagccactccatatgccacagggatctgaaacctgaaaacctcctgctggacgagaagaacaacatccgcatcgcagactttggcatggcgtccctgcaggttggcgacagctgttggagaccagctgtgggtccccccactacgcctgccccgaggtgatccggggggagaagtatgacggccggaagnggacgtgtggagctgcggcgtcatcctgttcgccttgctggtgggggctctgcccttcgacgatgacaacttgcgacactgctggagaaggtgaagcggggcgtgttccacatgccgcactttatcccgcccnactgccagantctgctacggggcatgatcgaggtggacgccgcacgccgcctcacgctagagcacattcagaaacacatatngnntatagggggnaaaatgagccnaancagancagccattcctcgcaagtgngatcnntcgctgccagcntgagaaatcgacccgacgtgntg

SEQ ID NO: 441231 - DNA, 1146 bp, Homo Sapiens
  misc_feature (136)..(145): n is a, c, g, or t
  misc_feature (956)..(1103): n is a, c, g, or t
gcaatattaagtaaataatttaatgatagaacactgaaatttctttagacacagtattttcaagttatatttctgcctggagtacagatatgaaatagcacaaactgtactctgaattaagcaaacagaatgaatnnnnnnnnnntattctcccaacctaagtttccgttcctcatttccacttgcctcagactctttctattgaacatatctagttaaatctctaatggacggcctgtgggaagatttactgccaacagggatgactgacttctttccggacactgagcaggggactgtgggctctgaagcagtttacttcctgtggaaagccagtcccatttctattttacttcgatccaggcctattcagataaagcaccactcagtagctactgaccatttaagtatggagagaaaagcaaagtagaaaaatggttttcacttaaagaaaaagcaaatggaagaccagccataatagctccatggcacaagagacatgacagggatctcctccccagatgtcccctgatgtttgtcagcctctcatatccctggccctctggcttctggctctgtgattacagttgccacagaggattcatggacagcaaaaagcttaaggaacctggaggttttgtacaacatgtacattctgctgacagaaacacatacatggtatggactattattaaaattgatagcctgcttgcactcagtatacaggctgcttaggaacactttattgggagataccctgctggtgttggagcagcacaaaatgatgaggctaacttaagtagtgacaagaatgatcctcttataccatatggccaaagaacagctgtccatccccaagtctatgggggatcagatgaagtgtggagtttggttggttggtcagtgaatttttggtcagtgaatacatacatatggcatagtgaagtacaattgcnnnnnnnnnnnnnnnnnnnnnnnnnnnnnnnnnnnnnnnnnnnnnnnnnnnnnnnnnnnnnnnnnnnnnnnnnnnnnnnnnnnnnnnnnnnnnnnnnnnnnnnnnnnnnnnnnnnnnnnnnnnnnnnnnnnnnnnnnnnnnnnnnnnncgtaatggccgaattcccgggcatatgtccggtaccgtcgact

SEQ ID NO: 441232 - DNA, 1053 bp, Homo Sapiens
  misc_feature (16)..(16): n is a, c, g, or t
  misc_feature (25)..(26): n is a, c, g, or t
  misc_feature (39)..(39): n is a, c, g, or t
  misc_feature (48)..(48): n is a, c, g, or t
  misc_feature (51)..(51): n is a, c, g, or t
  misc_feature (58)..(59): n is a, c, g, or t
  misc_feature (66)..(66): n is a, c, g, or t
  misc_feature (79)..(79): n is a, c, g, or t
  misc_feature (97)..(97): n is a, c, g, or t
  misc_feature (101)..(101): n is a, c, g, or t
  misc_feature (105)..(105): n is a, c, g, or t
  misc_feature (111)..(111): n is a, c, g, or t
  misc_feature (113)..(113): n is a, c, g, or t
  misc_feature (115)..(115): n is a, c, g, or t
  misc_feature (117)..(117): n is a, c, g, or t
  misc_feature (132)..(132): n is a, c, g, or t
  misc_feature (139)..(139): n is a, c, g, or t
aagatttaaaaggttntaaaaaccnncctttttccaganatgaaaganttnaatttgnnttgatanatccactggtatnccgcaagccagaggaaancccnccancccacnantnanatcaaaggtacaggncctattnattttttgatctccctgatgcaaaaaaggaccggctcagttcatagccaccgaagaagtagaaatagcctgtacttctcgaagtaaagtgcttgagagtccatggtagaaccccaagggccatctttcctaagaatacttttgatgacagaccacactgtattctggctcttggctatcttccctgatgtctccatctcatacatggtctgcagccggcacttcacgagctccgtggggcagagcaccagtgcagcaaaggcagaggcgaaggaaccggcggctgcattctgcagatcactcagctttgcctgcttgtccaatccagccactttccgcaccacctgctggcagaagccgtagcacatgaagaggactgagttctcagcgatgttggcgattagtgctggactggtacccttgtagaagccacggaagcccacctgggagtaagtcttcaggcagcagtcggtgaggccccggtacaggtcagggaacgtctgcatcttcactttcattgtgtcaaagggctgcccggtcagtacacatgctgtacctcctgcagcccccgctgtgaggtcaatggcagcctggatagcaggattggatttcatgtttgcccactcttctgctggtcttgtggaaggcagctctctggagcttatgacaggcaccacatatcccgccgcgccggcgtggccgcgtccagctcaggctccgccgcccgctctcggctccgggtcgccggctggggcggccacttaacacccacgtcggcaacggccggcccttcgcccctcccttcgcgcaggcatcccggactgcggccccgcgaagctaaggagcgcccctgcggctggcgggcggcctgcccagggccgtgcccgggccgagaccgggagccgccaccccgct

SEQ ID NO: 441233 - DNA, 1204 bp, Homo Sapiens
ccctttcccagaatgggttttccaacggggtttcattcatcaaacttccctgggtaatatttcgtaaggcccaaaaagaagtggttcccattgggcaggggattgctcggaattcatagttagggtttccagttccagaaatataaaggcccgttattcccttcatttttccccaccatttaaaaaaggtttctgataaatcctggcctgttttccagacctggaaagaaacttgaatttctggatttgatacaatccactgggtataccgcaagccagaggcaaatcccaccaaactccaccacttaacatcaaaggtacagggcttaattcatcttttgatctccctgatgcaaaaaaggaccggctcagttcatagccaccgaagaagaagatatagccctggtacttctcgaagtgaagtgcttgagagtccattggtagactcccaatgggccattctttcctaagaatacttgttgatgacaggaccagcactgtattctggctcttggctatcttccctgagtgtctccatctcatacatggtctgcagccaggcacattcacgagctccgtgggtcagagcaccagtgcagcaaaggcagaggcgaaggaaccggcggctgcattctgcagatcactcagctttgcctgcttgtccaatccagccactttccgcaccacctgctggcagaagccgtagcacatgaagaggactgagttctcagcgatgttggcgattagtgctggactggtacccttgtagaagccacggaagcccacctgggagtaagtcttcaggcagcagtcggtgaggccccggtacaggtcagggaacgtctgcatcgttcactttcattgtgtcaaagggctgcccggtcagtacacatgctgtacctcctgcagcccccgctgtgaggtcaatggcagcctggatagcaggattggatttcatgtttgcccactcttctgctggtcttgtggaaggcagctctctggagcttatgacaggcaccacatatcccgccgcgccaggcgtggccagcgtccagctcaggctccgccgcccgctctcggctccgggtcgccggctggggcggccacttaacacccacgtcggcaacggccggcccttcgcccctcccttcgcgcaggcatcccggactgcggccccgcgaagctcaggagcgcacctgcaggc

SEQ ID NO: 441234 - DNA, 1133 bp, Homo Sapiens
ttgatggtctatgtgtattctgtatttccgtggtttcctaatctaggtgttgctagtctctctggggttgggtcctcgtgtttaaacatttcagggtatgtggtccatgcttgtatcttactggtgggcaccttgggaaattgcgtggcattctggaaccggtttctttccggctttgggttaatctttgtacccggcccagggccctttggttaccttttgcactcaaatgccacagcggggttagattctgccccaccgcggtccttggttgtcttcatggagagcacaggtagcacatcggaaaaggcacagatctgtcgaattctcgggcctgtagcttctccactgtggcttcgctgatgaagttggttgagtgagatccacttcttccagggtggcatatgggtaaggcccccgaggaactggttccagctcctggaggttggccctcatggcctccacctcagactctggggctggggacaggtctacctcttccctgagtgtgctccagcgcagcactgtcagcccccgctggtgcaggctaaggaagaaacccatacgagggcctacttccttcggattagccttgtccacagagctgtagtggaggaagtggatgcctggagggatcatcttcacgccccggaacttgggcccgacctcccaggagttatagtcaatcccaaactctgttcccttgggcatgttcaggatgaccacagtggccccttcaaagaagaggcgcttggctagctcaggatccatctgcacggcagccatggggccagtggtgggtgaccaaaagaaccctttttctttgatgaacagtggaagtcacgcagagagtagggcagagccaggtcgagtgcaatcagggtctccggcccccaggctctaaagttaagaaaaccgcgacgtaactctggcgacggcttctcaggaagggcctccagagacaccagcgtcccacaaacagagaaccagccgccccggcgaggtgggcctagttcaaggcactccgtgactctgagccgagaagaggggcggcccacgccacacatacacaaggaatcaggaaaggaaaaagaggccaggaggccacactcaccgcctcgccccacgttccg

SEQ ID NO: 441235 - DNA, 1697 bp, Homo Sapiens
  misc_feature (78)..(78): n is a, c, g, or t
tttctgagtgtccccgagaggctgcgtagtgggagaccaagccaaattcacgtttctttccagggaatctgtggggtntgaacattccgttcatcagtcaaaggggaaaataagaggtgccccctgatagggcaagaatgttttcctaaggaagcaggttgtgtgttaagagtcctgtgtgaaaagtacagcccaggttagcctcccagggccctggctgaatgggggaatcccacaaatggggcctttcaggaagggggtccagccttctttgggcaaatgaaagaaaatttggtttatccagtgaaaaaagggaatttctggctcccatctttgcaggccctgggagagattgctgcccctggcaggtccccaggatgggaagaagtaaatggagaggctcaggactgcagccctgtggggaaggggtccctcgcagctgagagcgctccccgagttagcccatctcgatgccctcagggagctccaccaccaccggggcacagtcctcaggttccgcagcaaagtcccaccggaacttcttggtcaggtgagcttggaacttttcagctttctttctcagggtggcatccacggcaatgctgcaggcagaggaaaagaaaacctgtaaggtgctggtgaggaagttgtcttgggagacaatgtctacgaagaagtcagcggggatctcaccaagctggtggtacaggatggagatgaggttgatgtagagggtgtggtgcttcatcatggctgcttctgaccggcacaggaggttcaggagccgcttccaatgctcaaatgcctcgtacacattccccagcaggaagcacacaaaagcaaactggagttcaccaagcacatcctgggggctgctggggaactgcttgttgagcacagtctccagggcatagctcaggtccatgctgtgcttggttatctcagctggcgtggcaccctctgggaacatctgcgtgggcagctctgagaagcggatctctgtcccggctctgggcttcatctctggtagccgggccaggccctcttggtagcttttgcactcaatgccacagcggggtagattctgccccacgcggtccttggtgtgcttcatggagagcacaggtagcacatcggaaaaggcacagatctgtcgattctcgggctgtagcttctccactgtggcttcgctgatgaagttggtgagtgagatccacttcttcagggtggcatatgggtaaggccccaggaactggtccagctcctggaggttggccctcatggcctccacctcagactctggggctggggacaggtctacctcttccctgagtgtgctccagcgcagcactgtcagcccccgctggtgcaggctaaggaagaaacccatacgagggcctacttccttcggattagccttgtccacagagctgtagtggaggaagtggatgcctggagggatcatcttcacgccccggaacttgggcccgacctcccaggagttatagtcaatcccaaactctgttcccttgggcatgttcaggatgaccacagtggccccttcaaagaagaggcgcttggctagctcaggatccatctgcacggcagccatggggccagtggtgggtgaccaaaagaaccctttttctttgatgaacagcgcctcgccccacgttccggtacagcggaaacccgct

SEQ ID NO: 441236 - DNA, 1578 bp, Homo Sapiens
  misc_feature (6)..(6): n is a, c, g, or t
  misc_feature (14)..(14): n is a, c, g, or t
  misc_feature (17)..(17): n is a, c, g, or t
  misc_feature (19)..(19): n is a, c, g, or t
  misc_feature (25)..(25): n is a, c, g, or t
  misc_feature (32)..(32): n is a, c, g, or t
  misc_feature (40)..(40): n is a, c, g, or t
  misc_feature (45)..(45): n is a, c, g, or t
  misc_feature (53)..(53): n is a, c, g, or t
  misc_feature (58)..(59): n is a, c, g, or t
  misc_feature (70)..(70): n is a, c, g, or t
  misc_feature (79)..(79): n is a, c, g, or t
  misc_feature (87)..(88): n is a, c, g, or t
  misc_feature (102)..(384): n is a, c, g, or t
  misc_feature (1014)..(1022): n is a, c, g, or t
  misc_feature (1230)..(1285): n is a, c, g, or t
aagttntgaaaatntancncatttnaacagcnccagaganccaanatgccgtnctggnntcacacttgcnatcactgcntactgagnnacatttttcttccnnnnnnnnnnnnnnnnnnnnnnnnnnnnnnnnnnnnnnnnnnnnnnnnnnnnnnnnnnnnnnnnnnnnnnnnnnnnnnnnnnnnnnnnnnnnnnnnnnnnnnnnnnnnnnnnnnnnnnnnnnnnnnnnnnnnnnnnnnnnnnnnnnnnnnnnnnnnnnnnnnnnnnnnnnnnnnnnnnnnnnnnnnnnnnnnnnnnnnnnnnnnnnnnnnnnnnnnnnnnnnnnnnnnnnnnnnnnnnnnnnnnnnnnnnnnnnnnnnnnnnnnnnnnnnnnnnnnnnnnnnnctgagtagactttctaatgagcgtaatatgggagaaagggcaggggtggttgtggaactctctctccagcgtttgagactcacatgaggtaaaagccacttcatcttatctggaggtcttgaggcaaagttggctataggctaaactatgaagctatctctccattacagcacctcactgaagcttaaagtgctaaatagtagggcaatatttcagaatttcaggtgtttgggagatagggaaggaatttttctggaattctgtcagcatggaggtgagtggggtctctatgggtaaacaagtctgtgggtttttgccttgccctccattgtcttctccactccacagtttatcccagaaatgtttccccaacactagcttcccagtctcactttgttctttgttcagggggaggataacaggagactatgaagatgactctaccccactggtgatcctggcctcaggatttatttcccatgtgacgcagagtgaggaggcacattcccatttttgagacctcatttcttgcaacatcaatttttctgattagcaccataaaaagttttaacaccatgaccgtttaggttagattactttgaggaaaaaggtagacacaatccaatcacnnnnnnnnncatttatagaagagcctacaattattttagtttttcattcatatgtgcatccttcacatgtcactatactttcagattaagctcagtggcacagagcttatttaaacaattctgaactgcaccatgaattaataggcttcccaagctttttcttccacgcccaagaaacttcaggcctttacctgagtaaaaactaaacttgactttnnnnnnnnnnnnnnnnnnnnnnnnnnnnnnnnnnnnnnnnnnnnnnnnnnnnnnnngcaataaacctgagaacaagcatatatattgtggtggttctgtggtagacaaacgtaccagaggcctttgaagcttaacattattgaaggtttctgtacattactgggtaactaaaatcaactttcacttgatggaaagctgaaagttctgaaaaatgatttatactgactgtgggacggttaaacctggggtctgatttaaagagggtggaggataggattgatagagagaaaacagagcccagatgtaaaagaggtatctctggtgcacagtgatatgcaaggcctataga

SEQ ID NO: 441237 - DNA, 465 bp, Homo Sapiens
  misc_feature (272)..(357): n is a, c, g, or t
gatatcactgcacagagatactcttttacatctagggctctgttttctctctatcgaatcctatcctccagccctctttaaatcagaccccaggtttgatccttcccacagtcagtataaatcatttttcagaactttcatgctttccatcaagtgaaagttgattttagttacccagtaatgtacagaaaccttcaataatgttaagcttcaaaggcttctggtacgtttgtctagcacagaaccaccacaatatatatgcttgttcttannnnnnnnnnnnnnnnnnnnnnnnnnnnnnnnnnnnnnnnnnnnnnnnnnnnnnnnnnnnnnnnnnnnnnnnnnnnnnnnnnnnnnctcaggtaaaggcctgaagtttcttgggcgtggaagaaaaagcttgggaagcctattaattcatggtgcagttcagaattgtttaaataagctctgtgccactgagct

SEQ ID NO: 441238 - DNA, 1172 bp, Homo Sapiens
  misc_feature (343)..(385): n is a, c, g, or t
gtcgaagcttctctggtttcgcattacatttcccagagggccttggggcacagtccaatgaggagcgagccgggtggccggctgaggggcgtgcttcatgctcgcgggatttttaaaaatggtttctcctggatcttatcccaactgcgcctgagaccttgtttcacctcctgatgtgctgggtgtggttaggcctcgagccgggagctatttgcctcccaggaggaagccagggcagggttccgcggggaatggcggtgagggagccactcgggacgcggaggccctaaaatgaagaagcttcggcctgaggcttcgggagcggcgagcagggaagtgggannnnnnnnnnnnnnnnnnnnnnnnnnnnnnnnnnnnnnnnnnnaataagccagaggctgcctggtggggccccggcgtggcccagtgactgagataattgtcttcgtctgtggggtaatgcgaacaagccccgttcccctaagccgtgatgcatgcggggttgacgcggccgggctctgtccccataaactgtgacacaggtgtgtgtagacgtctatgagggccatagcgccgggctgtaagggcatctgtaggggtgacgcagccgggctgtgtctctgcacctccgttctgtgcgaggtcaatgctggtggggtctgcagaggtggcacggccaggacgggtctccgtgtctctgaaatgtgcctttgcacttctgtcaggttgacagggacaggcagtgtccctctggtgtgagcgtctgtgggtgtgaaagggccagcgagtgtgcggctgtgactggtcgggatcgggcctgggtgcatggccttttgagtgagcacaggtgtgtgcgaccatgtcacctgtctttctagtgtctccgttgcttcctgtgccttggccttccagccatgtggtacctgctagggagcagtggtcccaaagtgacgtgagaggctctacgctattgtgaaaatgaccaagaagaaggcttcacaagtcacgagatggcagttttggagccagaagtgctctccgtgcacactacctggacgacaagaggaagtaacctcaagaatagaattccttttggggaagaaagagctggccttcaggaaaagcatcccggaggaggaagaagaagtgttatatgtcctaaagtaaggttt

SEQ ID NO: 441239 - DNA, 1116 bp, Homo Sapiens
  misc_feature (4)..(4): n is a, c, g, or t
  misc_feature (10)..(10): n is a, c, g, or t
  misc_feature (14)..(14): n is a, c, g, or t
  misc_feature (20)..(21): n is a, c, g, or t
  misc_feature (44)..(44): n is a, c, g, or t
  misc_feature (51)..(51): n is a, c, g, or t
  misc_feature (56)..(56): n is a, c, g, or t
  misc_feature (99)..(99): n is a, c, g, or t
  misc_feature (101)..(101): n is a, c, g, or t
tctntctccngctnccagtnnctcacaattctgtgaggccgtgnagccacnacatnttctctcctggtcgtttggttttaccaggagagagggcctcangnccccccacaaacacacaggtttaggaaacggcaccttggatcaacatggcattcctccagccgtactctgcgcacaggtacttcagcagcacagtcattaggaacgtaccgaatccggtccccgtggtgctgaggccctgggcgagggcgcgtctcttctggaaatacctgcccaccatgaccaccgctggcaggtaggccatcccgctgcccaggccagctgcgactccaaaagtaatgaagagataatgcacgttttgcagcataggcactcaacacccagcccagggagttgacgagccctccaatgatcgcagtctggcggcacccacaggtgttaatgaacaagccgatgaaagggcccactatcaaggtgatgcccatgctgagggagctgacccaggcggtcaggccgcggctctggtggaattcttccagccattccacgttgaggacacccagggccatctgggagcccatgatgaggatgtgcacaaagaaagaggagagcaccatcatccaagcccatccgccatcaatgtttgggtggggcttcagtgtctttttgtctttggggccatcttcaaaatcatacccaatatcttcatgactggtatacattttccaagatttttcgcccgaggcccgctgggctgcggcctcactcggctccacgcccggatcctcgaacttgctgctctgcttggagccccctgagctgctgggtgtagagatttgttgcaatgtcgcctatcatcctggagacgcgggtgcctgcggctcagctctccgcccggctcggtgcgctctgtgaggggctcccgggctcttccgccgctcgctgccaggccaggtgagcgtttggtggagctgaaagctcgacgcctcagtccaggtggctttaaaacgggtgcgtttggaggtgcccaaacctaacctgggcttccttccaatcggagcaatttcaaatcttcatgctcgttcattcatcaacgggattcgcggacctgtacca

SEQ ID NO: 441240 - DNA, 1499 bp, Homo Sapiens
  misc_feature (960)..(960): n is a, c, g, or t
  misc_feature (1018)..(1018): n is a, c, g, or t
cttcaaaataaagtgtcatggaactgaaaatagagtatagtctaacaattattttgatacactattgaatagctaacaagtgtctaaagaattttttatttttatagaataggaagtttctaaaagaaaacaattaagagcaaaattggttttgagtatagaaactgaaggatggcagtcttaactcctaagttttttacagagcacagattggtaaactaggcatgccacctgttttttgtactatctgtgaggctgagactgggttttttacattttttaatggtgaaaaaagtcaaaagaaggacattttgtgacacatgaaaacatattaaattaaaatttcagtatccagaaataaagttttattggaacagctgtgcttattgtctttagctgctttcctggtacagtggctgagtttagtagtatagcagagtctgtatggcttccaacagtcaaaatactgcctggccttttaaagagtttgtcaatcccttttatggaggaaggttttgctcatgcatggcatgttagtcaatttagttatttgcttctagctggcagaatgtggtcttgattacttaatttctgttacccctgtgttttccagaatggcttctcctgattttacttacgtgttttactattgctcaaattacagatactaggaaacactactactttataagtacacttctttttcctacttaaactctcaaactacagttacgtatttgccatgatgttaagggaccttgatggtctgtgaattatcagttgctttctgcactacctcctgtagatagacctgactgatagcacttacaaaaagactgatagatgccaaatcagtcatttattaaccctctaatattgttgtcccgatcatttggtaaacgctaagagagcttagttttacattcacaaagtatttgtatttgataagtcttaaaaatnatttaagttgaaccctaacagaagtacttgttcattcctcagttacctgcaaataacngaaataatggtgcagtcagttttatttgattgtgtaatgctttatactaggggtctcaaacccctgggtggcattagattcttacaggagcgtgaaccctattgtgaactgcacatgcaagagatctaggttgtgcgctcattatgagaatctaatacccgatgatctgaggtggaacagtctcatcctgaaaccatctaccccaacacctgtgtctgtggaaattgtctccacgaaaccggtccctgttgaaaaaaggttaggggaccactgctttatacagtgtttgaagtaggcacacttacagttactatttctggttctttatgactgttgaggggggcagaattctatgtttgattcacagtaaaacttttcatgaatcattgagggttaactgttatcacttgccaatggaaactggatattgaaacatttttttaagaaatgcacttttacctgaaataaaactataaaaact

SEQ ID NO: 441241 - DNA, 493 bp, Homo Sapiens
agtttttatagttttatttcaggtaaaagtgcatttcttaaaaaaatgtttcaatatccagtttccattggcaagtgataacagttaaccctcaatgattcatgaaaagttttactgtgaatcaaacatagaattctgcccccctcaacagtcataaagaaccagaaatagtaactgtaagtgtgcctacttcaaacactgtataaagcagtggtcccctaaccttttttcaacagggaccggtttcgtggagacaatttccacaggacacagggtgttgggggtaggatgggtttcagggatgaggactgttccacctcaggatcatcgggtattaggattctcataaatgaggcggcacaacctaggatcttcttggcatgtggcaggtttcacaattggggtttcacggttcctgttaaggattcttaatggccacccgggggtttttgaggacccctaggttttaaaggctttacacattcaattaaaa

SEQ ID NO: 441242 - DNA, 964 bp, Homo Sapiens
gcggctggtaccggtccggaattcccgggatggcgcgggaagcacagcccggccctccaggtccccaaggagaccccagcctcctgctgcccactgtgagcgacctccccggggctcctctggaagcggctccggcaagtatcgagtttgcctgtgcggagctgggggagcctccggctttcctgtttgctttgttaattattttcgtccccagaggaaggcgtacctcctaaatggctctactttgaacctgctgggcaaggaagagattttcaaggaaaccatctaccgtgtgcaagctcctgccggccaaccccagaccccagcacggagccaggcgcctgtgcccgccgaccctcagcatcctcctcagaaaggctggtggcatcaggaagcccctggccagcctccacctgagcccagtgagctcagctttaaggatggagtcaggcagggggtcctcaacccctccaggacccattgctgccctagggatgccagacactgggcctggcagttcctccctagggaagcttcaggcgctccctgttgggcccagagcccactgtggggaccctgtcagcctggctgcagcaggggacggctctccagacataggccccacgggagagctgagtggtagcttaaagatccccaaccgggacagcgggatcgacagtccctcctccagtgtggctggagagaactttccctgcgaggagggcttggaggctggcccaagccccactgtacttgggggcgcacgcagagatggccctggacagccaggtcccgaaggtcacccgccaggaggaggccggacagcgacgtggggtgaggaacctgactcttgaggaaacacccccagaagggctgacaaggatgccggcctggcccaagaactctgggccccaaaaaagcttctccacatcggccaaggagcttcctgcacaccggaggagaa

SEQ ID NO: 441243 - DNA, 229 bp, Homo Sapiens
ttattttaaataaatattttaattctattgttgacatttacaagtagaaagcatacagtatgttacaaatatcaaaatgagaaaaatatgaatgttacataagtaacaaatataaaaaaagtattttcttaccttccctgaaagtaagaaaactattcagcataggaaaatatcagtatcaaaaacacagcttaggtgtaaaaaaagtttttacacagtatttaaataa

SEQ ID NO: 441244 - DNA, 737 bp, Homo Sapiens
  misc_feature (41)..(41): n is a, c, g, or t
  misc_feature (92)..(92): n is a, c, g, or t
  misc_feature (167)..(217): n is a, c, g, or t
atattttaattctattgttgacattacaagtagaaagcatncagtatgttacaaatatcaaaatgagaaaaatatgaatgttacataagtancaaatataaaaaaagtattttcttaccttccctgaaagtaagaaaactattcagcataggaaaatatcagtatcnnnnnnnnnnnnnnnnnnnnnnnnnnnnnnnnnnnnnnnnnnnnnnnnnnntgatctacaaaatgacaaagtaagtgttgaaatctgatttcatataaattataaaaactgggtacttagagtaaatgttatctggttggaaaataagtccaatcataagctttccttaggtcaattctttaaaatattaaaagcatacgaaaaattttcaataaataacttttaagagtgtttcttagaagtgctgctgagaacatcattcgcatagcaaggtggcagtgttctggggacaacatgcaatcattctgttcctaatggaagcctcatgaaagtcaggagactataatcatttgctcaaggatccagaagttttaagacaattctataagaaagcgttaaagtgctgaacaaaatgacttaatttcagtacccactgtcatgtaaaacttactcaaatactcagacatttctgagcaacatcaaatacagaaactatcattctgaaaagtgttaatatacttaatctttcattccacgataggagggttcctttttacactttacaaggatt

SEQ ID NO: 441245 - DNA, 1714 bp, Homo Sapiens
  misc_feature (416)..(463): n is a, c, g, or t
  misc_feature (784)..(784): n is a, c, g, or t
  misc_feature (1049)..(1049): n is a, c, g, or t
  misc_feature (1277)..(1330): n is a, c, g, or t
  misc_feature (1352)..(1414): n is a, c, g, or t
  misc_feature (1462)..(1508): n is a, c, g, or t
  misc_feature (1555)..(1555): n is a, c, g, or t
  misc_feature (1592)..(1631): n is a, c, g, or t
ttttttttggagttcataaaatcttttccgagccagcggtatgcagccagagctccaaagttcaaaggcattgccttgggttcaagtgccccccaaggctgttgctcagtcacagcttccagagcttccttcccaccacactgccaggagctgccagagcccccatgcagcccctgaccccagttccctcccaagtcccagggcctgaccctgatatctggggcaaggtgctcgggacatagataagtgaaatggtgtgcagaggcccagtggagagtcacatctcggtctcagccaacagactgtcccctagtcctgacgtcattagcaccatctgagagctgggatcgctggggcacatccaggagctgctgcctctctggtgggcagcaggctcccgccctctctcccattcnnnnnnnnnnnnnnnnnnnnnnnnnnnnnnnnnnnnnnnnnnnnnnnnagagaggaggtcacagatctgttgctgcagctctgggctaatgctgttctcagccaacaccaggctccgcaaagctgtggggtaattttctaccatgtccagcagggtctgagctgactggttggtgagccctgtgccctccaagtctaggacctctagggtacgactagaggccacagctacagccagcattcctgccacatggtcacccagggggttgtaatccagattgaggacgcggacctgggagctgtgggccacggcaatggcaaggcggctccagcccttaggggtgatgccagggttggcactcagcgttantcccttcaagccagatttggccccatctgggggcaggaggccacagatgaggttgatggcttcatcacccagcatgcagtcccccaggtccagagccacgagggcagggtggagggccagggctgggttcagcaaggccagccccgcatctgtcaggggggctcccatgcaggaagagggactggatggagcggttggtccgcagagcctcagccagctgcttgatgcggctggggctggacacgacgcccaggttaaggttgantgcgccagggacgtggccccggccagggcccggcagatgcggccaaagtcgcggtcgcagaggcggcagccgcgcagtgagagcaggcgcacggcgttgtcgcgaaggccgcggcagatgtcccgcacctcggcgccggacagcggctcccccgaaatctggatggagctgggcagcatcgtgcccacggctgggcctccgggtacggggccggaacggaggttggtnnnnnnnnnnnnnnnnnnnnnnnnnnnnnnnnnnnnnnnnnnnnnnnnnnnnnngcgggcggagtggggccggggnnnnnnnnnnnnnnnnnnnnnnnnnnnnnnnnnnnnnnnnnnnnnnnnnnnnnnnnnnnnnnnagctaccgggactgagccggagccggccagaggtgcggaggcgtccannnnnnnnnnnnnnnnnnnnnnnnnnnnnnnnnnnnnnnnnnnnnnncgcacggtccgtgtctgggcgttggggcgggtgcgcgttccgggggntgggcaggcgctgctcggcgcttgtccttgtccctcnnnnnnnnnnnnnnnnnnnnnnnnnnnnnnnnnnnnnnnncaagggcttcggcttaccggtctcggctaggaggccgtacccgctccctccttctctgccgcccggctccccccgacatcccg

SEQ ID NO: 441246 - DNA, 688 bp, Homo Sapiens
  misc_feature (584)..(620): n is a, c, g, or t
ttctatgtcctgtctcttcttttttcgtcgtgtatgttctctgctgtgtgttgctgcgtgagtgatgtgatttcctggatttttggcaccggatgaagtgagccttacctctgtgattcttggatgtctcagtgatgcactggctcaagtactgctcttgactggtactggtctgtttccaatgcgtgtcctccggtgtctctgggtgcttgaaacgctgggtccggcctgcggcgtgtggcaggcccgcacggtccgtgtctgggccgttggggccgggtgcgccagttccgggggttgggcaggcgcatgcatcggcgcattgtccttgtcccatcgcaggtcagcggcaggcaggcaggcggcagcggcagcgagcggctcaagggcttcggcttaccggtctcggctaggaggccgtacccgctccctccttctctgccgcccggctccccccgaccaccccgcgggcctggccgcacggcatggcagagagagcctgaggcgggcggctggcaggcagctccggctccagctccagagccgctctcgacgaattcgagctcggccgatttggcctgatnnnnnnnnnnnnnnnnnnnnnnnnnnnnnnnnnnnnncgccgcccccgtagcgctcacgttcccaagtgtgctagtactccactgggcccgcgcttgtccgtccg

SEQ ID NO: 441247 - DNA, 934 bp, Homo Sapiens
  misc_feature (434)..(434): n is a, c, g, or t
  misc_feature (440)..(449): n is a, c, g, or t
  misc_feature (455)..(455): n is a, c, g, or t
  misc_feature (460)..(460): n is a, c, g, or t
  misc_feature (484)..(484): n is a, c, g, or t
  misc_feature (853)..(853): n is a, c, g, or t
  misc_feature (870)..(870): n is a, c, g, or t
  misc_feature (876)..(876): n is a, c, g, or t
  misc_feature (886)..(886): n is a, c, g, or t
  misc_feature (890)..(890): n is a, c, g, or t
  misc_feature (897)..(897): n is a, c, g, or t
  misc_feature (901)..(901): n is a, c, g, or t
  misc_feature (903)..(904): n is a, c, g, or t
  misc_feature (918)..(919): n is a, c, g, or t
  misc_feature (921)..(921): n is a, c, g, or t
  misc_feature (930)..(930): n is a, c, g, or t
  misc_feature (933)..(933): n is a, c, g, or t
cgataatggggatagattttcatctgtttatttttagagagatcttgtacttaactcactagtctgggatgttttatttatgtcacctaatattaactattgctaaatttcactttaataaaaaagtagatacaaagactcattttacttagcaagactgcaaataaaactaagacataaattcacatgttagtattgtccaaaacaattcctccagctatcaacccacggcaatcaatccagcagtatcatttatagaatgattactaaaacaagaatcatttctcagttacaaatggggtcattaagcccttggggctctttgaaagtagaagtagtttgcctacttaatcatcagtctacacaaaggcagaaataaaaaggaatggaaatacaaacacaaaatgattggttattacctgttttataaggtnacaagnnnnnnnnnncagtgnttttnttttcaaaaaagcagtggctggtnccctactgaatagagcttaaagaagtactggttacattcacagacacagtagccactagccaagatatagtttatctccatcaaacttaaatagataaagtcagtaagtatgaccatcttactttcactatttacgctctttaaatagtaaaggtatcggtttgaaagatacatagaaccataggaacagtgaatgatcatttataaaacagctccttttcctgaatcaatatattgctaaaattctttcagtaaccctccctttttatatgatcacagatccctccacatctattttattttagttatataaaaattattaataaactttggtttccttgcattcggtccttatattttaaaaagtgnttaaaaaaagtaatgcntatgcntaaattatgnaaantttaatncctncnnaaaattaaaaaaanncnctttttaantgnc

SEQ ID NO: 441248 - DNA, 1832 bp, Homo Sapiens
  misc_feature (11)..(11): n is a, c, g, or t
tgtcgcaagancggaagaaggccacgatgtgggcaggctcggtgctggtgaaggccactgaggtggggaccccgtgctcgctggctgtggggaaggtgcagaggcaggccgggctgctgctgctggggtcccagatgcggacggtgccatcagcagaacaggaggccaggcgctgggaggtgggactgaaggccaggccccacacggcgtccccgtggccctccaggacgtggctcagcacgcttgggtcgtagccatcatagggaatcccatgctgaggtctggaatcttccaacctatggatgcaggcatctgccccgcccactgtagcagtattcactgttgctgcccatagccacagccaacactgggcccctgtgagcccggaaagcatgtataggttccacatctagcgccgcattcttcttggccgtgaccgccttctgcaggttccagagcttgagcgtgccgtcctcggaggcggtgagcagagccgactggctgtggtggaaggccagggaacgaatgccgtcgtagtgcgagcgcagggtgaacttggggttccacgtcttcttaaaagcatctttgctgtcagacagatcgcagctgaggtcgttgtcgttggtgacggtgagatctgccaagtcccccaggctcacctccccgcccccgatagtgtccatgatgaagacgtcttcatgtggccggggctggggtgtgccaggaggcgggccagtcacttttgggggcagcccatccacatcccgcaggtcagccagaatgccttggagtttgacccgacggctttccagctcatgggggctcccatccacagtgcaccgccgagggtctggagccccttccccatcctctcctgagcccaggaaatcaaactcattgatagcatcctcagagtcgtcttcctcatcctcgtcttccatttcgggcaccagagccttggatgggagcttcacacgctgcttcttgtgctgcacgctgtccagctcatcgtcctcgtcgctgtcttcgtcctcgcagttctgcaggaaggggatctgccccagcactgagccgcccaagcgctctttgccatctttgcctgccgcgttcctctttatctgctcctcgatctgtttcaccagcagcgactccccaccactgagccctgcagggcctggtggagccctgggggccccttcactcggctccactgccccgttgagctccagcgagcggcccagcagggaacggacgcgcttggaccgcatgtcgaggatggtgtctgtgtagcccacctcttccaggtactgtcggagaagctgccgcccctccttccacaccaacgggctgttctccagggtgaccgattccacggggccattggagacttgttctgacacatctgctttcttctccccctggttcaggtctgtcccaaacttcagtttatgatatttggccctttcctgcttcagcgcatactctagcatcttgatccgccgcaccaggtccgtctttagattctcctgccctttcctctctccctgaaggaaggccacctgagcctgtaactcggcgcgctcggcctcccagcgggctttctcggcttcgaagcgcgcccactcgtgctggataaagtgcaggatccccggcaggctcaggggctccgggcccgccgtgggcccggggctgcctccgccgccgcctcccttacctgccgggcccggcccgggggcaggggcggagaccggggccgccccagtggggccagggcccgcgcctgagccgagcggacggcaggaggaggcggcggcggcgaccgcggcggccgc

SEQ ID NO: 441249 - DNA, 1737 bp, Homo Sapiens
  misc_feature (18)..(18): n is a, c, g, or t
  misc_feature (23)..(23): n is a, c, g, or t
  misc_feature (29)..(29): n is a, c, g, or t
  misc_feature (31)..(33): n is a, c, g, or t
  misc_feature (42)..(44): n is a, c, g, or t
  misc_feature (61)..(61): n is a, c, g, or t
  misc_feature (85)..(85): n is a, c, g, or t
  misc_feature (156)..(180): n is a, c, g, or t
  misc_feature (223)..(223): n is a, c, g, or t
  misc_feature (320)..(320): n is a, c, g, or t
  misc_feature (341)..(341): n is a, c, g, or t
  misc_feature (361)..(361): n is a, c, g, or t
  misc_feature (499)..(499): n is a, c, g, or t
acaaattgtatataaaancgaanaagaangnnnggaggcctnnnatcaccccttctctgtntccccaagcatccccctctaggcnccagcaggcaccacccccttcctgccttgtggtggggtggggattgacaggcatgaaaatggtgtgatttnnnnnnnnnnnnnnnnnnnnnnnnntgaggtgttgggggtcaaggatggagggggtcaaggagtaganagagggccttccctcatcccccatcagtggcaccctgagaggggtcttaagagggttatgagggtccacagatgtgcctcagcctatgagacggtanaagatccagcatccaaaagtnacccagtgactggcccagcngaactctgaccacttgtggacagtgtatgccatgccgtagccctgctcctctgtggtgtcatccacatcgacatcaaacagggagcccaggtaggccaggtggaagatggccagaactccaaagagcaagtttaaagntcgcacccccaggccccaagcgatgctggtgcgaacagtctggcgggcaccgctttgacaagacacaggcactgaggatccgagccaggcgcttccggaggacatgctccacgtaagtgataaaagccagggacagcaggaccgcagccaggtggaaactgaagccatgtaggagggcgctggctgcataggtgaccagcacagccgagaaggtccccaggcggagagcattcttgaaaacatagttatttagccaataagacatgggcaggttccagcttgtgacaacttccaccattgaccgaggcagctccacattcagtggcttggacaccgtcaggtcccattccaggtgatccttctcctcggtaaagccagcccccgccaacgtggccgtggcctcggaaagaaagcccacaaaatagttgctgaagtggaaggagacagcactctcgtaggctcgcagccacttgcgaaggaggcggtcaccgttgagggggatgaagtacgggaagaggtaggggcccacgcaagtggacagcacaaggcacagcagggccagtgccaggctccgggccaccttctgcagccaccggcagctcagtgggcggccttggacagcttgtaggtagctgtggaaggatatccagggcccgaagacgatgatgcccacgaagtagaggtagcccatgaactccactggcgagggcaccgtacccacctcgccccggtccaggtcgaagcccagagacactgccttcatggccacaatcatctgtgcccctcgcatcttgtgccatgtcacggtgtctaccatgtgcatctcacccatgagtaggtagatgaggatggtgacggataggaagacgcctcgatgggaggaatgtcggcagaggaacagcacgaggtagcacaggaggctgagcagcacgacccaaaccatgtgcagcgagcctccagaggaggcggcaggcgaggcagatggcaaggagcagccagatctggtcaaggccctgctgggcagtaggcaggagacagccttgcagtagctgctggaaaaattcctggcggctaaaggtggccattgcagacccccacggatggatggccagatggatagatctggcaggaaagaagccgtggtcctggggaccgaggacgcgctgccgccgccgctgcctcctccgggcagcctcccccgcaggccgcaaggcccgccacccaggcctcgctaccta

SEQ ID NO: 441250 - DNA, 885 bp, Homo Sapiens
ttaggcttcgcagcccacttgcgaaggaaggcggtcacccgttgagggggatgaagtacgggaagaggtaggggcccacgcaagtggacagcacaaggcacagcaggcccagtgccaggctccgggccaccttctgcagccaccggcagctcagtgggcggccttggacagcttgtaggtagctgtggaaggatatccagggcccgaagacgatggtgcccacgaagtagaggtagcccatgaactccactggcgagggcaccgtacccacctcgccccggtccaggtcgaagcccagagacactgccttcatggccacaatcatctgtgcccctcgcatcttgtgccatgtcacggtgtctaccatgtgcatctcacccatgagtaggtagatgaggatggtgacggataggaagacgcctcgatgggaggaatgtcggcagaggaacagcacgaggtagcacaggaggctgagcagcacgacccaaaccatgtgcagctggaagaagtggtagaggctgaagaacccgcctgccacggtgcttgcatgcttcaggtaggatggcaacccgagcctccagaggaggcggcaggcgaggcagatggcaaggagcagccagatctggtcaaggccctgctgggcagtaggcaggagacagccttgcagtagctgctggaaaaattcctggcggctaaaggtggccattgcagacccccacggatggatggccagatggatagatctggcaggaaagaagccgtggtcctggggaccgaggacgcgctgccgccgccgctgcctcctccgggcagcctcccccgcaggccgcaaggccgggaccagcagcggctcccagagatcccgggaattccggaccggtccac

SEQ ID NO: 441251 - DNA, 979 bp, Homo Sapiens
aagtgggggctttgggcccccccgttccagggttccccctttttccaggggggatcccttttttccctcgggggtaaaagcccaaggccccccggcccaaaacgtgggcccgtggcccttggggaaaagaaaaggcccccccaaaaaataattttgctgaaagtggaaaggagaacaagccactttttgttagggtttgccagcccacttggcgaagggaggcgggtcaccggttgaggggggatgaagtacgggaaggaggtaggggcccacgcaaagtggacagcacaaggcacagcagggccagtgccaggctcggggccactttctgcagccaccggcagctcagtgggcggccttggacagcttgtaggtagctgtggaaggatatccagggcccgaagacgatgatgcccgcgaagtggaggtggggcatgaactccactggcgagggcgcgcgtacccacctcgccccggtccaggtcgaagcccagagacactgccttcatggccacaatcatctgtgcccctcgcatcttgtgccatgtcacggtgtctaccatgtgcatctcacccatgagtaggtagatgaggatggtgacggataggaagacgcctcgatgggaggaatgtcggcagaggaacagcacgaggtagcacaggaggctgagcagcacgacccaaaccatgtgcagcgagcctccagaggaggcggcaggcgaggcagatggcaaggagcagccagatctggtcaaggccctgctgggcagtaggcaggagacagccttgcagtagctgctggaaaaattcctggcggctaaaggtggccattgcagacccccacggatggatggccagatggatagatctggcaggaaagaagccgtggtcctggggaccgaggacgcgctgccgccgccgctgcctcctccgggcagcctcccccgcaggccgcaaggcccgccacccaggcctcgct

SEQ ID NO: 441252 - DNA, 1235 bp, Homo Sapiens
  misc_feature (792)..(832): n is a, c, g, or t
  misc_feature (934)..(1007): n is a, c, g, or t
  misc_feature (1191)..(1191): n is a, c, g, or t
aaggggcgcctttatgcccccccagggggtttttaagtttgtggggcttggtttggaaaaaggcccatctttccaagaccagtgttttaaggtttccagggagagggggcccatttttttgttgaacagcaagcaccccttaattaaaaaggtttgcgagggggaaagggggaacattatccccttgggttggggaaagtttttccgccggttttgttttagtttggacaaaattaggggagttttcaaggttttgttttaaaggcaacttttagtcaagatgggggatggcttttatggttaaaatgaaaaattttggatttttttgtttctgtaaccaaggatatttcactagaggactttggggtctgtgaaggaatttgataatataaagtatgttgggacgcttacaaagtagtccttattcctgctctagttgaggcaaggaggggatgttacagaagtttgcatggctgagacaacattttgcttggaggatgaatgggagttactcaggtgaagaagagggagaagggaattttaagcagaaggagcagcatgagcaaaggcaaggaggtaggaagtacatgcttcaagcatgaaagaaaacatgcttttggaatctacattagtagcttttggcaaacagacaggtactagctgcagtatggcttttcagcctttagaacccaacacgtgattttgaatccagcatgcatgtttcctggggctttgaccttccttaagatacttaatctctttcagactcatttttactatctttactcatcnnnnnnnnnnnnnnnnnnnnnnnnnnnnnnnnnnnnnnnnnaccactcctaaactaggagtactaatcatttagaattcaaaaagttttaaattggataatgccccacatcctttatggtacatactggatatctggcaaatnnnnnnnnnnnnnnnnnnnnnnnnnnnnnnnnnnnnnnnnnnnnnnnnnnnnnnnnnnnnnnnnnnnnnnnnnnaaaatctaaagaaaatattatagccaaagtacctaatatactgaatagaacatattagacactcaacaaatgtcagttctgttacaatcccagaaggaaattacatatgtaagaagcttctcctataaaaatattttcggacagggtattcctgggccacacttggcatcagctgggccacttnggtaggaatgcaactttgtgggcccaccctagatctactgaatc

SEQ ID NO: 441253 - DNA, 2774 bp, Homo Sapiens
  misc_feature (82)..(108): n is a, c, g, or t
  misc_feature (488)..(488): n is a, c, g, or t
  misc_feature (2543)..(2543): n is a, c, g, or t
  misc_feature (2626)..(2660): n is a, c, g, or t
ttcggaaaaaaactttattaaacactcaagagtatacttctcaaaatcacagaagagcctccaaatacaagtgttagaaggnnnnnnnnnnnnnnnnnnnnnnnnnnngccaatcagaaacagtttgggtgtggaggactggcggggggggacagggactgcacatgggatggagccacttttgtattccataatttcatcttgttgtgctagaatgcatgctttttttcctccaaatgaggaattcatttcaaataggaatttcttttattctcctggaactgaaatgcttagtactatccctaacaacaaccatgggatttttgaagttatcccaaattcaatgcaaagcacttttatgtatcttccagttgtagattggaatagcaaaagtgaatgctatgaccaaaatttttgccctcctaaataaagacgtttccttctagagagcaaatctatcataaaatgtcaaaactagaagagaatanaatgaaaggaaaaaccctagaaaaatatcctaaaatatccaaatgcagtcatttctaaatataagccataattatagctttacctattgttcttattgttcctatgctgcttctacaatgttacatcaactatacttagctttactctcccaaaatcttggtgatgaagccttctgagtgtgctttccaatgtgccagaaccagaagggcattccaaggcttccccacatttcctccatttacggagacagctgtttcactaacttgcagcacttgtaaatgctttgaaagctgatcacatattatattcttgacttaatactttggtaagcctggatatctatctttctataaacctcacctaatctttgatgttactataaccttatctttgatttaacccatacacatttactcatcataatcttgatttaaactcatgctacgaaactgtagcacaaaagacatttctctttagtgtttcaggaaaatcagctcatggaatgctgccaaccaaagtatagtagattctttaaacaatgtaatgctttctatctgcagactcccacagacctcacatccagggctcccatccttcccaggttctgccaaggatgttggggtctgttgcctggtccatcaggcacttcacttgagtctcttctgaaagcccactctctggttcttgggcacgaatgttgtgatctttgcttcctcgtgccacagccacatagtctctgaaggcaggggccttctcatgacccaggagtagctcatcacaagtaatgactgctggattggcacctgctaactttctcttagcgtaacatattttctgtcgggggtaccaatttttttcagcaacatttatttcttgaatccatgaccctccttttttcagcattttctgttcaaaatttttccaatcaaaggagggctccttgacaaacacatccatggtgttggtgagcaggccagggtctgagcggaaggcccggagtgcgtgtaccatgatgctgtacataaggcccgtttctttcattggtaacatcagattgataaactggcgagttagccgaaaaggcatcaactcagggactggcagaaactgtgtagcggatccaaacgcatgcccaaagtcgatcccgatcacgccgccagtctccatggccaccataaagttgttcagatgtctgtctccaatcccgaggatccagtggctgatgcatatcagagcgtgagagctggcgaagtgggagcggagcgccaggaaagcctcagggcttgtactcatcctcacgaaggcccgctttaagagatcagcaggcactttactttctcgttttctaaaagacgtgactgtttcagtacgattagcgcccttatacattagcatgtaagctccaacatcatgttttcctgacatttttgtcagccaatctttatattcacacggcggtgccctgggatcactcaggtaagccgccttctcctcttgggacatggtgttcaaaagaaggtccttcaaggtaacagtattttcaagccactcaattaatcctaacctggaggtcatgggcacaacgctataggtcctcagctgcagggccctctggctgcaggcggagtcttgggccaggatcccattcatgacctggaagagctgctccacgcgctggtcctgccgcaggtcctcgccacccttcaccaggaaagggtgttccctctcgtcatggccacggatgatgatgcgcttgggccttcgcagagacgccatgactgtcacccgctcatcaaacccggcgattcgcacgtggtactctggcaatggctttcccctaccgtcatactgaccgggaatctccagctcatttctcaggaactccactttgaagtcgctcatccagggtgaacattctttcagattcccagggggctttgagtctttgttcatttttaaaagtagcatgttggtaatgtcgttgaagtcactgagcttcattctcagtagtttagaacctcctttcccaaaatgtttatcaaattcttttccanaaagtctgaataaacttccttctaaaggcccccaggcctggagcctttgggtcacccaaggctgcatacattctttcatacannnnnnnnnnnnnnnnnnnnnnnnnnnnnnnnnnngctagttcagctcttacatcattgctccaatccttaaagagcagttcaggattagagagctgatctaaggcattaataaaatcttgaatcactcctccttgatccaacttcgct

SEQ ID NO: 441254 - DNA, 875 bp, Homo Sapiens
gagctcggtacccacacgttacgccttcgcagagacgccatgactgtcacccgctcatcaaacccggcgattcgcacgtggtactctggcaatggctttcccctaccgtcatactgaccgggaatctccagctcatttctcaggaactccactttgaagtcgctcatccagggtgaacattctttcagattcccagggggctttgagtctttgttcatttttaaaagtagcatgttggtaatgtcgttgaagtcactgagcttcattctcagtagtttagaacctcctttcccaaaatgtttatcaaattcttttccaaaagtctgaataaacttccttctaaaggcccccaggcctggagcctttgggtcacccaaggctgcatacattctttcatacattttttcaatgtttttcttatttacaggggtttttgctagttcagctcttacatcattgctccaatccttaaagagcagttcaggattagagagctgatctaaggcattaataaaatcttgaatcactcctccttgatccaacttacttttaatccttgccacaaactccttattcttatgaccagtagaagtatccttgaaggaatagctttcgctgcttatgatgaagggataaacaatagcctgcgggtagttatcagtgatttcttccacagagtgctgaacagcaacggcttggtctttgtccagtaaggccaccatgtggctgatccagctgatgaactgccagcagggaacggaagagatctcttttgtcatgaggctcaaagtctcctctggataccgttctataatctgaagtaatctaggaaacttcaatctggcttcattggaatttaattttaaagctttcaa

SEQ ID NO: 441255 - DNA, 1570 bp, Homo Sapiens
  misc_feature (1113)..(1113): n is a, c, g, or t
  misc_feature (1475)..(1488): n is a, c, g, or t
ttgtaggtagttacagattttttaatttgtcagctatcaattcactgactttgtttctcataggttttagttggctgacttagatttttaagttatgtggttatatcagctgcaaataatgtaatttttatgctttttaaaatatgtatatgcttggcaattaaatgtttatgcgatcctttttttagttgtattcatttttagtgtttaagtaactatttcctagttacatttccaattgtttggaatcttttttttcttattcatctccagttttgtgcacagagggtgggtgtggcatttgtgatctattattgttaatggcctccatttaaaatcattttattggctgtcatttgcctgccatgtcaagcctattttaatgaagcacttgcttttctagctgcatagaattatttgaagaaagataatgagaaatggggactctaagtggcctacagttcaatagaagaaagctaaaagcccacccaaacatgatagtaaccactgttttctctgcactaggaaaaatcagccgtagaattgttgattagtcttgcagaaggctatagttctcgctgtcatccggtttttcagcttaaaaaacaggtgctgagctgtgaggagagcatcagggtttgggctctgctgcctttccccgaagaactcactcggcaagccgtcagattagaagataattctgaaacaaatgcctgccactctttgattacaaaaatgacggatgagctgtatcaccatatgcctgagaatcgttgtgtgttaaaggacttggatcgtcttcctactgagacgtggccccagcttctccgtgagctctgcagcacacctgttcccaccctgttctgccccaggattgtgctggaagtgctggttgtgctccgaagcatcagcgaacagtgccgccgtgtgtccagccaggtcaccgttgcctcagagctgagacacaggcagtgggtggaaaggacgctgcggtctcgccagcggcagaactacctgcgtatgtggagtagtatcagactactgtcccctgtgctcagcctgatactgttactcattgcgctggagttggtcaacattcatgctgtttgtggnaaagaatgcgcatgagtatccccagtacctaaaggtttgcaaaggcaatcttgcagtatacggcacaccctgccgggtttaaacccattaccaaaaaaaccacgcggaaggcaacctattcaaccttcccccttacacgctttggtcaaaaatgcgggaccttctagtcgacaaagaaacaaagcgctaagtaacatcttcgcccccctaactctcaccagtctctcctctccctcccttgccccaccagcgactccaccaaatccccacccctctcccaccgctcattgcgccccgtcgccccgaatacacagatctctacataattagaccgccgcccactccgttattactagatgagnnnnnnnnnnnnnnggcggaccatagttgttatagacccgcccctcgtctccccccggtaccgcccaccctatcacccctctacgccctacacaag

SEQ ID NO: 441256 - DNA, 838 bp, Homo Sapiens
  misc_feature (47)..(92): n is a, c, g, or t
  misc_feature (159)..(159): n is a, c, g, or t
ggaggaaaaaaggaaccatggggaaggagccaaataccgtgccggtnnnnnnnnnnnnnnnnnnnnnnnnnnnnnnnnnnnnnnnnnnnnnnctacccaactgttatggatcccggtataacgtgcaattgagtacagaatgtaggaagattgagaggnaactggggatctggcgcctggattgctcaagagaggtcagggaacccctcagaactcctgagacccagagattgagggagggtttgaggcggagtctgcaatggggcatgtccagcagtagcaagcagcgggccgatcctggtggagggttgggaggctgctgtcattttatgggtcggcagccagagtgagagtgtccctgctgccagaggactacggcgggctgggcgcggggtccccgcctctcgctcaccacacataccccgcgcctcctctggcagccgcggtggtggcggcggcagagcctcgcccactccaatccccaccctctccatccttagtcattaaagaacagcagcgcctggcacgttcttggaggaccccgggcgcagaggaggaaagggagcaggcgcagggggactggaaaggcagcatgcgctcgccaggagcaacctcggcgcccagggtctgaggctgcagccccagttcgccattgtgagccgccgccgggggagtccgctagcgcagccgtgcccccgagtccccgtctgcgcagcgatggggcacctgcccacggggatacacggcgcccgccgcctcctgcctctgctctggctctttgtgctgttcaaggtaggggagctcctccacccctttttcccagcggtccgaccccgct

SEQ ID NO: 441257 - DNA, 1883 bp, Homo Sapiens
  misc_feature (1611)..(1635): n is a, c, g, or t
tacattaaggaaaacactagtatgtccctagtacctgctaaacactcaacaaaagttaactgtacatactgatgtctcaaacagggacggaatgtttaacacagaaaacaggaggttttagcactcactcgttctcctggctcccgaaatatgagctgccctgccccagttcatccaagcccatcaatatagttgtcctcgtccttaatctccacaggtgttcaatgtgagccaactgtcagatggctttcatttgcacaactgaataaacccatttatgcctagtgttccattactggaacgctaagcttatgggaagttatttatatcttactgctcgaggtcctcaccaagatctgattttttcacaaaaaaaatttgtaatctccagcataaatggaataatcaaagcaattgtggcagttttggggggacaaaactctagagtttaatcttccagcttgactgacttggaagcgttcctgtcaatgtaaaagatcttgttgggggcggtggagaagccgaggcccggctccccgggtgtacttccagctcatggcccggtcgtagtcccgctgcagattctgctgcaggctgtcagccgccttcttgccgagggccatgttgggccttgcaatcgtgctggcggggcggctgaacgaaggggacaggtttttgaagccacccataagtctgagaaatttcagtttttggtcctcgttctcaaaaccagcagtatcccactggccaaactgggttcccgtccacttcctggtttcagaagcttccgttttgcctgactcgcgatcgatctcttcttgcaaggcctttcgcctcacctggtctatgtgcgcctcatccatgttgccttttttttccaacaccacctctaagtccgtgtctgtttcctccttccaagggtctcctgctaccccactctctttcctcttcttctttttcttccttttcagagctggctcctcgatgactggctgctctaccttctttttggacttcatctttttctttgcggaggccttagggtcatcacttatggggatgtattccggagcctcaactttgactggcttctttttacttcctttcctagggctgctctccatggacctggagggcttggagtggcctgggagggcatctccctcctggtggatttttttgttcttcttcaccttcccattgtgttctctggggctcttccgcttccgtttctgccccaaggctgcctgttcctcatccttcttccccactgagcaagtgtccccaacatccctggcctccctggcctcacagaaccaagggtcctggaccgagaaggctgtggggtcctgggccccctttttttccttcttgtgttttttgagcttcttgccaactctggtttcctcctcaccctgtctagggtctggggaggttttcaccccagaggcatgggacatggctagaggtgacttcttatttttcttttccccactgaggaactccaagtggccaaacacctgcttcctgaggctgggtgacttctctgtccgtctagcaggcagcgtggtctcaggttctacatgctcctcgcaaagggtgctgacaccnnnnnnnnnnnnnnnnnnnnnnnnnactagaggcatctcaggtgcctgcccatgggccacactcttagagggggatgtagctcttaaaggagaaacatcagcaaagtaatcatcattgtttaaaactgagtatcgagtctctggttctttgaccactttcttcttctttttcttctctgggagcccaaggtctactttgtgtgtcttggtgatcattccggtgggcgaaatttccccgcctccacgtgagagccagctccgccgtgacccccc

SEQ ID NO: 441258 - DNA, 1502 bp, Homo Sapiens
  misc_feature (150)..(158): n is a, c, g, or t
  misc_feature (161)..(162): n is a, c, g, or t
  misc_feature (164)..(166): n is a, c, g, or t
  misc_feature (1218)..(1218): n is a, c, g, or t
  misc_feature (1412)..(1412): n is a, c, g, or t
  misc_feature (1415)..(1415): n is a, c, g, or t
  misc_feature (1475)..(1475): n is a, c, g, or t
gggcttatcgaaattaattccgcccccctatagggaagcccgccagatcttcccccttgtccaagaaaaggtgggtcagggaaccagctatgccccatgtcccatttcatttcctttttttccgccacccgccatagatccctggagttnnnnnnnnntcnntnnnttaggagtacaagagtagctttatcatggatttagggctgtggttacaaggaagctgtaaggaataaaatgactcccatgaagacgtaccgtgcggacgagtggaaggagaaatttggccattacaaagacacaggaatatgttaagaagtgaggggcaggatgaaatcatctagggtaggtatttagagggagggcgccgtgcaaaataaaatcctcactatgaaacaaaggcggaggcaggaggctgcgttaggtggaagcagcggaggaaggagacgaaagggattgtcattttcatgtcgtggctttttagaagacagccatgtcctctactctgattctatcaaaatgtgttctcggggtgctggtaacgttcagccaacgaaataattcctatggcggcagtaggaataacaaaacgcagaagcgggaacgatgtctttttattcctccccagacgcaaacgtggatgcatgaggtttggtaacaggcaaagtcatctggttaacgtgactgatgcaaaaagtccaggcctgggcaaaaagaagtcactgggtgaatgggatggatcagactccctgtcctgagggggagatggtttcttgcagaacgaggtgaaggaggtggttctgctcagcagtcaacagtggccacatctccacctgcagcgacttgatggcttccgtgtccttttcgtgggtagccatgaccaaagactggagcagcagaaagagctcctcgggaagctggccgctgctctcctgcccgtggctgtcaaaagcctcccaggagtacttctccagggtctgggcgtgctccggcagcagcttggcgggcggtggttgcaggaggagcagcagcagcacgcgggacacctcgcagcggaccagcacgtccgagaaggcgcccagggcggcgggagagggcgccgccgagccggagttcggaggaagcagcgcggccggtagggcgggcgtcgccccgggcccgggctggggtgccggcggcgggggcggcggcagtgactgcaccgggtggctgccgtgctcnccgcgccaggcgctgcatgcgcgtgaagaccgccagggcgccggtgtagtcgcgcgccagcagctggcaggaggcggcctcgccaagcgcctgcagcgcggccaggggcagctggggcagctggagctgggcggcgcgctggaagtgaccggcggcggcggccggctggcccaggtcgcgcagggcggcggccngcncgaggcagagggcggcggcggcggccggctggcccagctcgaggtgcagacgcaccgcgngcccagggcgctggcggcggcctgcag

SEQ ID NO: 441259 - DNA, 959 bp, Homo Sapiens
  misc_feature (701)..(763): n is a, c, g, or t
  misc_feature (870)..(870): n is a, c, g, or t
  misc_feature (952)..(952): n is a, c, g, or t
  misc_feature (957)..(957): n is a, c, g, or t
gcctgggtggcgaattcggcacgaggcgagcatggcggcagcggctgcaggcctgggcggcggcggcgccggcccgggacccgaggccggggacttcctggcccgctaccggctggtatcgaacaagctgaagaagcggttcctgcggaagccgaacgtggcggaggccggcgagcagttcggacagctgggccgggagctgcgcgcccaggagtgtctgccctacgcggcctggtgccagctggcggtggcgcgctgccagcaggcgctcttccacgggcccggggaggcgctggccctcaccgaggccgcccgcctcttcctgcggcaggagcgcgacgcgcgccagcgcctggtctgccccgccgcctacggggagccgcttgcaggccgccgccagcgccctgggcgccgcggtgcgtctgcacctcgagctgggccagccggccgccgccgccgccctctgcctcgagctggcacgctgccctgcgcgacctgggccagccgtgccgccgccgccggttcacttccagctgcgccgtccagctccagctgccccaggtggccctggccgtgctgcaggcgcttggcgaggccgcctcctgccagctgctggcgcgcaacatacaccggcgccctggcggtcttcacgcgcatgcagcgcctggcgcgggagcacggcagccacccggtgcagtcannnnnnnnnnnnnnnnnnnnnnnnnnnnnnnnnnnnnnnnnnnnnnnnnnnnnnnnnnnnnnncgctgcttcctccgaactccggctcggcggcgccctctcccgccgccctgggcgccttctcggacgtgctggtccgctgcgaggtgtcccgcgtgctgctgctgctncctcctgcaaccaccgcccgcgaagctgctggcggagcacgccccagaccctggagaagtactcctgggaggcttttgacanccacngg

SEQ ID NO: 441260 - DNA, 1200 bp, Homo Sapiens
  misc_feature (823)..(833): n is a, c, g, or t
  misc_feature (848)..(1017): n is a, c, g, or t
aattcccgggatgtttttgggctgttacgataagtgcatatttagttctgtaggaaactgttagactcattttgcaaagtggccataccattttgcattcctgctagaaatgtatgactgatccagttcctccacactctcgacagcacttggtgttttcatctcttgtgattgttgagttgtgtagtaacatctcttgtggttttagtttgcatttctctaattagacattttttatgtgcttgtttgccatccgtatatcctcttcagtgaaatatccattcatgtcttttgcccattttctacctagattgtttttcactgttgaattttgagagctttttatgtattccagatacaagtccttcgtcaaatatgtggcttgcagagattatctcccagtctgtattttgttttgttcaacctcttaacaaggtctttgaaaagcaaaaatttctaatttttatggtttattaattttttcttttatgaattgtgcttttggtgtcaagtctaaaaattctttacttatccctagatatcccaaagattttctactatttttcctggaagttttatattatgttttacatttaagtctgtgattagtttatttgaaggctttcctgttttctaatgtaagaattaagtgctataaatttctctctcagcacttctttaaggctatgcctcacatattttgatatgctgtattttcattttcattcagtcctatgtatttttttcttttgagacttcttcttttacccatacattactgagaagtatgttattgaatttccagtagtttagatattttacnnnnnnnnnnnccttttgagagaggnnnnnnnnnnnnnnnnnnnnnnnnnnnnnnnnnnnnnnnnnnnnnnnnnnnnnnnnnnnnnnnnnnnnnnnnnnnnnnnnnnnnnnnnnnnnnnnnnnnnnnnnnnnnnnnnnnnnnnnnnnnnnnnnnnnnnnnnnnnnnnnnnnnnnnnnnnnnnnnnnnnnnnnnnnaactgggttgccaagcttggtcttgaactcctgacctcaagcgatctgtgcacctcaggcttccgtgctgggattacggacctgacccactgtgtcttgcaaggattttactattatcttagggtactggatttctggtttgattcattatgcctagaagaatactctaggattcgtctcttc

SEQ ID NO: 441261 - DNA, 924 bp, Homo Sapiens
  misc_feature (388)..(388): n is a, c, g, or t
  misc_feature (542)..(604): n is a, c, g, or t
ctaaacgtttgtctgaaaatatgcatatttatatacacatacaaccttacacatgtgtttatacgcaatcgataggtgcctatcttttaatttatacccatctatatctccatttaaatattccctctcttctcccagcagaggctgtgtgcaattgcaatccaggattatacaagcagtattctttccttatgatttctagttgtagacctttatcctcctttctctgccttcttcgcagctgtagaattggcatctttccctgaggttttccgagtggcaagtggcaccggctgtggcatgtattcatgccgcttcctatggcatttctcttccgatgtctgctttttctttgtttgttgttgactaggctgaatggtggggtttnttttaagttaattataaacgaagttgaaatagcaaacaagccaacagcttgtcccccccaccaaaagaaaaattagccccacacaagcgccttctgctgcaacagatgcccagatcacccctggcacgggcaaacgggcaaacgattttggtgnnnnnnnnnnnnnnnnnnnnnnnnnnnnnnnnnnnnnnnnnnnnnnnnnnnnnnnnnnnnnnnttcgaggagtccagaatcccggcctctgcttggaacggaacagtgtcatggcggagacgacggcctttgtcttgctgggtgtgaaaacatccgctgtgctggctccactgcggcagaatcaagtttaaaggaaaaaaagtgattaaagtcagctttgtgcctctgtggtgtggaagacccccaaaccccaagtagccgagtcccagggtccgaggaagggctcatagttggagcagcctaggctgtaatcctggcacttgcgcttcggttgctgcttgctgttcgctcctgggggtctggataatctcccttggctttac

SEQ ID NO: 441262 - DNA, 1101 bp, Homo Sapiens
  misc_feature (1)..(1): n is a, c, g, or t
  misc_feature (5)..(5): n is a, c, g, or t
  misc_feature (19)..(19): n is a, c, g, or t
  misc_feature (22)..(23): n is a, c, g, or t
  misc_feature (25)..(26): n is a, c, g, or t
  misc_feature (33)..(33): n is a, c, g, or t
  misc_feature (35)..(35): n is a, c, g, or t
  misc_feature (40)..(40): n is a, c, g, or t
  misc_feature (46)..(47): n is a, c, g, or t
  misc_feature (51)..(51): n is a, c, g, or t
  misc_feature (54)..(54): n is a, c, g, or t
  misc_feature (56)..(56): n is a, c, g, or t
  misc_feature (61)..(61): n is a, c, g, or t
  misc_feature (64)..(64): n is a, c, g, or t
  misc_feature (72)..(72): n is a, c, g, or t
  misc_feature (75)..(75): n is a, c, g, or t
  misc_feature (90)..(90): n is a, c, g, or t
  misc_feature (103)..(105): n is a, c, g, or t
  misc_feature (107)..(107): n is a, c, g, or t
  misc_feature (114)..(251): n is a, c, g, or t
nacanatctcgtttccccnggnngnngcagtgngnatccngtcacnnaacnctncncccanatnaagcagtntcncctcaccccccaagngctggatacaggnnncnccaccannnnnnnnnnnnnnnnnnnnnnnnnnnnnnnnnnnnnnnnnnnnnnnnnnnnnnnnnnnnnnnnnnnnnnnnnnnnnnnnnnnnnnnnnnnnnnnnnnnnnnnnnnnnnnnnnnnnnnnnnnnnnnnnnnnnnnnnnnctctctctccttgttgctactacgccatccagactccagtcactcaaagcaactacatctctcatgccaagcaggtaccttcttcctcactctaatcccacattgtcttcacctctagactgatgatcatttatctctgacattttttgttcaaccacagcccacttatacctgccttctcacgtgccgctcaagctcgacaactctacaggtgctaagatgaaatatagtgtagatgttaaaaggatttctctggagcctgatctccacatgtggttctatcttctgctagttgagttaccttgggaaattagcttagttttctgctacctctgtcttctcctctgtaaaatgtagtaacagtaacataaaaattccatagggttataattagaattagataaaataactaaataattgcaaataatctattatgtagagagtgataggttatatatgtagtgtctagagtgcagacttctagtgaaaatactgacttttggtcttcagtaaactagtaatatgtcaatgttggctttttcaaagtaatttttagcaacccttactagtgcacttagaaggtaaatattagcaaacagtacttaattgaacataccaccaccgacaatgaaattatggattacctacctgtaagaacaaaagaaaaggtgtgaatttttggattagtttatggctcaccagtgttacccctttacaaggtatacgcccacggtcgttatgttcaaaggttgaaactctagactactatatttaattctcctcaagaatcttagatatgaaaggaacagcaaaagtcattttatcaaaatttagtcctggtacaagaact

SEQ ID NO: 441263 - DNA, 1970 bp, Homo Sapiens
  misc_feature (1469)..(1469): n is a, c, g, or t
  misc_feature (1488)..(1488): n is a, c, g, or t
  misc_feature (1490)..(1490): n is a, c, g, or t
  misc_feature (1494)..(1494): n is a, c, g, or t
  misc_feature (1496)..(1496): n is a, c, g, or t
  misc_feature (1500)..(1500): n is a, c, g, or t
  misc_feature (1504)..(1504): n is a, c, g, or t
  misc_feature (1506)..(1506): n is a, c, g, or t
  misc_feature (1509)..(1509): n is a, c, g, or t
  misc_feature (1518)..(1518): n is a, c, g, or t
  misc_feature (1524)..(1524): n is a, c, g, or t
  misc_feature (1531)..(1532): n is a, c, g, or t
  misc_feature (1537)..(1537): n is a, c, g, or t
gccaagataggttttgctttgttgtttttttctaaattgtttttgcaaaacagggcataacaggtaaaaaaatactttgtaagaatattattttagaaaacccaacacaaaactgcaaatacagctccggaagcccttctcttcaactgtggttagtttgtttttgtaccttttaccccaaaggaaaaaagttggcatcttgttacttatttttatccattacattcagcacctcatccaaaagtgagggcccaagatcaagctgcagggagaggagggaacctgtaaggtcagagagggactcctctgacttagtctttcccttgatgagctcgcatggggtgggatggtcaaacatgtcctcggctggccagtcggggtactgttcggacaggctggaggagtggctgtctctgccttggctggactgagatgcagaaccgctggagccccacgaggtgtctccctggtggactgtcccattctccaacagactgcttttctcctgagctttttcctccatgacgggctcgcagctaagcctgggcagctttgctggcccgaaggactcctgtttggaattaaatgtcactggtgacaataagggcaacatgagagcttgggatcctccaatggtcgggagggagatggcatttttgagcaccggggagggcgtttctgtgaacacagagtccgaggtgctgttggcccggaagaactcattatgcccagggaactggcccaggtgtgctttctcctggtttccaggtaaaagctcgtagttcccttgaagaaaggaaatatctccaaagacatcgtgctggccctctttgccaatgtggatggtgtggcgaaagtctccaagcgggggactgatcatatcaggagacagaatgtccctcagtttaaatttctttcctttcttgttattggctgctttcaggtaaattggggtcttggctggcattttggaatttgagaatgtctattttgcaagcgggagaaagggccactttcttcacagatggtatatgtttctgaatcctttttgataggaactgtcacatcatttttctcaagtggcttcagaagtggcttcgaaatgagatggggtcaaagagaaccttcctgaggttacggccaagtgaggcttcctagagagccagttacatcatccagtcttgaccacaaccaggacaaaccggccgccgctgaggatcccagccgctgccccgggcctcccgcgggcgcacgcaatccctgccgctgtgcgcagatccagccgagtctgccggcgtggtgcctgctcaccgcattatccgctccgagacggcgtgaaggcgccccaggccggtggccgggtctccgggctagccccgcgctgcggtcccccggccgcgagagaaggtgcgcgcgactgagcgcggggcggccggacgcgaggactgaactgcggagggcggggcggngcggggcggggccggcggngngggnanttantggngnggnatggagggngcgggnagcgggnncgacncctcccggccgcggtacctgtgccctggcccggggccaaccggtggccgggcgcgtgcgcagcggggggggtcaccgttggaccctcggaggacaatgggcgcccattgttacctccccagcgccaccccccagtaggcgacttctctcggagaagatgccgctttcgactccctaagcacaaagaaaggtcgccggacgctcggtttaaagagggacccggaggtgctgccgcccgggtgcacggggacaataggactccgcccgcaccccggactcccgcactaaaactcgtgcgcccacctctcccgatcccaacaggccgacctagctgtgcgagtggcgggcggtgacccgcagggaagcgaggccacctgagtgcgccgccccggccaggccgcagctccccaggtccctctcagcccgggctccgg

SEQ ID NO: 441264 - DNA, 1098 bp, Homo Sapiens
  misc_feature (21)..(21): n is a, c, g, or t
  misc_feature (609)..(625): n is a, c, g, or t
  misc_feature (643)..(643): n is a, c, g, or t
  misc_feature (652)..(652): n is a, c, g, or t
  misc_feature (944)..(944): n is a, c, g, or t
  misc_feature (974)..(975): n is a, c, g, or t
  misc_feature (1024)..(1026): n is a, c, g, or t
  misc_feature (1034)..(1034): n is a, c, g, or t
  misc_feature (1037)..(1037): n is a, c, g, or t
  misc_feature (1045)..(1045): n is a, c, g, or t
  misc_feature (1048)..(1048): n is a, c, g, or t
  misc_feature (1057)..(1057): n is a, c, g, or t
  misc_feature (1063)..(1063): n is a, c, g, or t
aagctcatcaactatggttangtgttagtgtgttttacatgtggcccaagaaaattcttccaatgcggtccagggaagctaaaatattggacacccctgcctaggggaacttgtttcgtctacttggttagttgtcctaattgcattttacctgcagtccaaaggttattttagatgatagaactgcaagaaccccaaacccaaagaaagaatcgttgaagtggttgggagaggaggtcatttctgagatacatttccaggagaaatacaagtttgagagaaggagctggtagttactgtgtgcaagtgtttttctttgatggggaaggagtagttgggcaaagggacaggaatctgtgtgtacatttcctgctcctgtttccttaaccaccatcctcaggggcatctctggcaccttggggtcgggtaagtgctctctactgccctcgttttagctgcctttatctcgtctatatggcactttctgcgtgaaaagacatttgccttacagggatgaaactggacttgcaagagtttgctgtagaaggtgttcaagtcaggaagatgctcagaaatgaccactgagagggtggcatcagtgctgacttnnnnnnnnnnnnnnnnntctgacctcacatgttcntttttccanaagtggggtggttcagtttctagcctctcaaaccataaggaagtaatcaaaatgagagtagatggaaatcatctcttaccttaagggctcatgtacatttcagagaagcaatttctctagctatacttattctcttatggtcttgtttattactataaacaagcaagttcactttatcatttactttttattgtgttgcttgaagtacctatgtaatgcaagtatgtactgtactaaaatacctatatttccaaataacatatgtggtgtagcccacagtctctgcagaagntcatgagtaacctgtgcctttacactttannatccgttattgggtgctgttaaaagtatgatacagatgaagaaaaaaannnagtatgantcnctttccanacncgccatacncgcttncatggatccatgggataagtgcacatctgtgtaga

SEQ ID NO: 441265 - DNA, 1468 bp, Homo Sapiens
  misc_feature (152)..(170): n is a, c, g, or t
  misc_feature (577)..(577): n is a, c, g, or t
  misc_feature (800)..(827): n is a, c, g, or t
  misc_feature (1152)..(1204): n is a, c, g, or t
ggggggaaaaaaaagaacattttgcctctttaccgggggagggaaaacctgggacttggcaaagggtttttttgttaaaaaggttgttaaagttcagggaagatggttcagaaatgaccccttgaggagggtggccaccaggggttgaattnnnnnnnnnnnnnnnnnnntcttgacctcacatggtcatttttccaaaagtagagaggctcagtttctagcctctcaaaccataaggaagtaatcaaaatgagagtagatggaaattcatctccttaccttaagggctcatgtacatttcagagaaagcaatttctcttagctatacttattctcttatggtccttgtttattactataaacaagcaagttcactttatcatttactttttattgtgttgcttgaagtacctatgtaatgcaagtatgtactgtactaaaatacctatatttccaaataacatatgtggtgtagcccacagtctctgcagaagcatcatgagtaacctgtgcctttacactttacaatccattattggttgctgttaaaagtatgataacagatgaagaaaaaaanactaagtatgaatacacttttccaaacacgcacatacacagcttacaatggaatcccaatggaaataagtgacaacatctgatgtagaatctataaaatgtagactctgcaataaaaagccaaaggcacgttaaaaatatattttaactttaaaaataacttagttacagtaatactttgcctgtgtcttaccaacatgtagctgacagtcaaaattttgcannnnnnnnnnnnnnnnnnnnnnnnnnnnagaactacaagaaaatccccaaaacccataaagttcaaatgtgaaaacagaaaagttttaacactggagaattcgctatggtgagcctaagcaatatatagaaaagagtctacaaaaaggcttaggtgttaaataaattttgacttcctcttgctcagaaaatgtcggagtgctataaagttccgtgaagttccttaatgtgactcgctcagcccttcatagctagtgccaatcctggccaagccagatttcttgtgtgtctgcaaacaatatgtgagccgaacatcaccaatgcctcctgaaaatgggctctgactcacttccnnnnnnnnnnnnnnnnnnnnnnnnnnnnnnnnnnnnnnnnnnnnnnnnnnnnnaaacagggcataacaggtaaaaaaatactttgtaagaatattattttagaaaacccaacacaaaactgcaaatacagctccggaagcccttctcttcaactgtggttagtttgtttttgtaccttttaccccaaaggaaaaaagttggcatcttgttacttatttttatccattacattcagcacctcatccaaaagtgagggcccaagatcaagctgcagggagaggagggaacctgtaaggtcagagagggactcctctgcc

SEQ ID NO: 441266 - DNA, 1320 bp, Homo Sapiens
  misc_feature (20)..(20): n is a, c, g, or t
  misc_feature (25)..(26): n is a, c, g, or t
  misc_feature (43)..(44): n is a, c, g, or t
  misc_feature (48)..(48): n is a, c, g, or t
  misc_feature (55)..(55): n is a, c, g, or t
  misc_feature (61)..(61): n is a, c, g, or t
  misc_feature (64)..(64): n is a, c, g, or t
  misc_feature (72)..(72): n is a, c, g, or t
  misc_feature (100)..(100): n is a, c, g, or t
  misc_feature (127)..(128): n is a, c, g, or t
  misc_feature (145)..(146): n is a, c, g, or t
  misc_feature (176)..(176): n is a, c, g, or t
  misc_feature (199)..(350): n is a, c, g, or t
  misc_feature (364)..(364): n is a, c, g, or t
  misc_feature (366)..(366): n is a, c, g, or t
  misc_feature (392)..(466): n is a, c, g, or t
  misc_feature (470)..(470): n is a, c, g, or t
  misc_feature (472)..(472): n is a, c, g, or t
  misc_feature (475)..(475): n is a, c, g, or t
  misc_feature (492)..(720): n is a, c, g, or t
  misc_feature (736)..(744): n is a, c, g, or t
  misc_feature (776)..(776): n is a, c, g, or t
  misc_feature (805)..(805): n is a, c, g, or t
  misc_feature (835)..(836): n is a, c, g, or t
  misc_feature (843)..(843): n is a, c, g, or t
  misc_feature (860)..(860): n is a, c, g, or t
atatgattggttagaaaatntaatnnctagatgggcagaaagnncatntggggtnaaaagntgnacatagantgctgcacataaagggtatgtataaatntttctcagcccatgagatcaggatgannttcatcagtataccatnntggtatgaagagattattgcctccaaaggnactcagaatatttcagggatccnnnnnnnnnnnnnnnnnnnnnnnnnnnnnnnnnnnnnnnnnnnnnnnnnnnnnnnnnnnnnnnnnnnnnnnnnnnnnnnnnnnnnnnnnnnnnnnnnnnnnnnnnnnnnnnnnnnnnnnnnnnnnnnnnnnnnnnnnnnnnnnnnnnnnnnncttttttcacaagntngcaggagagaaaagtgagtgcacagnnnnnnnnnnnnnnnnnnnnnnnnnnnnnnnnnnnnnnnnnnnnnnnnnnnnnnnnnnnnnnnnnnnnnnnnnnnaaantngtnggacacatggcgattannnnnnnnnnnnnnnnnnnnnnnnnnnnnnnnnnnnnnnnnnnnnnnnnnnnnnnnnnnnnnnnnnnnnnnnnnnnnnnnnnnnnnnnnnnnnnnnnnnnnnnnnnnnnnnnnnnnnnnnnnnnnnnnnnnnnnnnnnnnnnnnnnnnnnnnnnnnnnnnnnnnnnnnnnnnnnnnnnnnnnnnnnnnnnnnnnnnnnnnnnnnnnnnnnnnnnnnnnnnnnnnnnnnntcaacctataaaattnnnnnnnnngttagttacatccacaatggggacctcatgancctgaccagtgccctattctactgtgggncaactgatatccaagatgcaagacaaagtnntttttantctttcctctaatctcntctagcagaaggaagcggttttttttggagctgcaagctgtgcttcctggggttgggggagtgttaatgcaagtactcctttagctgtcctgtctggtgtctcagtaggttttatggctggttttgaggaagagggattctagtgtccataactcatctttgagaagaggaattctaatttctgtggcctgctttgtgggagaaaggtgagtggaagccatcaaggcatgaggaagtcaaagagagactttccttctgaggctgcttctgaggccttccaatctcctatagttcaaagtactcagcacgccgaagtgccgtaatttggggtatcattttctgaccccaacattggcttttattgaattagaaagtctttagagaaaaaaaagattacattgtggcaaatgtctagattgtgtgactatacttagtgttgtggggaagaggcacgaagatt

SEQ ID NO: 441267 - DNA, 804 bp, Homo Sapiens
ggaaacatattgatgagtattaacaggaatgatgatgattattatgatactaatatccataattaacaattttaatattgataataatactaaccctgtggacttgggacctaaacagcagtttccccttacaattatcccatatttggccacagggggtaatattgagttccagaaggcaaggattaacattcagaaaataggaaaaacaacctgcaggtaagcatgtgcacacattgggactctatggataaatactaaagtgactcttgttctggatctccatgctaacaaacatacaccagctttcaggaggtagtacagctggctgatggggcaaggcttcttgaggacatggcaggagtcagaaatcacacatgctgcccagcagcagagctcatgacaatcagtaaaccccagtgaaaggacctggctgcccttctgccatctgctctcccatggcctctcttgactggtacatctaggcactggagtaaccttcactggctataggagggcataatcctcagtattctcccacctgcaagaaagacaaaaattacctgaataccatggcttctgggtatccttagtgggcttagcgtatttttcatttgctttaacaggccagttatccaggcagtgactttctgtacagctacagtcacctctggacacctgcggagactttaaaaatttccagaaggtcaggaatttttggagacctttcttatggctacgttgcctgcggtgaatcaataagcttctgaactgacttagtgttgcagagactcttgtgcagtt

SEQ ID NO: 441268 - DNA, 608 bp, Homo Sapiens
  misc_feature (56)..(56): n is a, c, g, or t
  misc_feature (70)..(70): n is a, c, g, or t
gagtcccaggacagtctgcaatctctacaggtacagaaacacccccagttcaaggntcttcacgcctggntttaggcctacacctgcaactaccccaggccagttatccaggcagtgactttctgtacagctacagtcacctctggacacctgcggagactttaaaaatttccagaaggtcaggaatttttggagacctttcttatggctacgttgcctgcaaaggtgaatcaataagcttctgaactgacttagaaaatgttgcagagactcttgtgaacagatagaccctctcctgccactccagatagacgtatccgggtcacacacacctgatttaacaacatctcattatctcagatgctgtaaaggactgtcagtaggccttcagccaggaggtggtgcttccaaaagactgccagctgtggtggtagtggcaccaatttgatcttctactactttgcagacatctcttctgcaaacaccagacaaactgagacaatgaacttccgcaggacccaaagcacctcttactgcaggaaagaagatccagtgagatagttagtccacaaatggaatgtcacaccatacccacacttaagtaacag

SEQ ID NO: 441269 - DNA, 994 bp, Homo Sapiens
ggaggaaccaactgcaagcttttcttagtgcctaaagtgtctgcaagtggaaatccagaggaagacagagagaaactgagttcctgacaatgcattcactaggtaccagataagcaaagcctatataattttgcagctggagcaaggaaaagagctgtggcgggaaggaagagtatttcttcaagaccagaatccagacagggaaagtgcccttaagaaaacacacatgatatccatgcatcctattatcagaaaagacgcatccaccagtatgacaatggagaactctctcattctggaggatccttttgaatgtaatgattctggagaagattgcgctcgcagttccacaataactcagtgtttgttaactcgtagtggaaagaaaccctatgtcagcaaacagtgtggaaaatctcttcgtaatcttttgtcccctgaaccacataaacaaattcatactaaaggaaatcccacttccaactggatgtctggatgaactactgaaagctgctgagtgtcctgcagcaggccatttccaatccagcggaagaccttctagaagagatgatggtgggagagtgctgacatactatgtgaagctactatttggagttggacacgagtgcatgtgtccttgtgccacaacgggaatcttgactacaacacaaatgaatccactcaaatgttggcaagtggagcagagtcccagaacagtctgcaatctctacaggtacagaaacacccccagttcaaggatcttcacacctggatttaggcctactcctgcaactaccccaggcaccaatttgatcttctactactttgcagacatctcttctgcaaacaccagacaaattgagacaatgaccttccacaggacccaaatcacctcttactgcaggaaagaagatccagtgagaaaattagtccacaaatggaatgtaaatccataaacactcttaagtaacagaataaatttagtatgaacgtt

SEQ ID NO: 441270 - DNA, 1083 bp, Homo Sapiens
  misc_feature (904)..(1020): n is a, c, g, or t
agctgccctgtacggcccggaatacgggatatcgtcgaccacgcgtcgcagtgcaggacctgagtttttcttcacccatggtcagggaggcgccatcgccctggctttggggctggggcctccggggaggttccggtaggggcgttggagaggccgctctttttgcaaggcccgagatggcgggccctgcgcaggccgccctattccgcgccctcagggcgtcagtatccgcctgaggccggatacccactctgggctcggatacccgcgctgggcccggagcatcctcggcgctgccctcccagagccccgcagaggctgaggtggcgcggggggcggccccggctccgcgagaagaggcggcagcgagggctggaggacccgggctacggggctccggggcgtctggcctgggtgggactgagcccatccagggactgggactccggggttctggtgtaggtagatccggggcaggctcaggaccaagtccctctccttccaccaaggagcgcccagaggccggcgggagctccaggttcacctcctcctcctccaggaaatcccacttccagctggatgtctggatgaactactgaaagctgctgagtgtcctgcagcaggccatttccaatccagaggaagaccttctagaagaagtgatgggtgggagagtgctgacatactatgtgaagctactatttggagttggacacgagtgcatgtgaccttgtgccacagcgggaatgtgagctggatgacaaatggagatttggacttgtgataattggcctctgtgtcattgtgtggaagactgactggtccctttatttcctgtagcttgactaccacacaaattaatccactcaaatgttggcaagtggagcagagtcccaggacgggnnnnnnnnnnnnnnnnnnnnnnnnnnnnnnnnnnnnnnnnnnnnnnnnnnnnnnnnnnnnnnnnnnnnnnnnnnnnnnnnnnnnnnnnnnnnnnnnnnnnnnnnnnnnnnnnnnnnnatataatacgtaagtttggaggtggatgctttcagccattaagttcaaaagtactgccacaag

SEQ ID NO: 441271 - DNA, 1238 bp, Homo Sapiens
ccagcaatattatcagctaagaagcaagggtactggaggatgagagatggagtccaaaacactgagaggaggtacactagcttttcaagcggccaaagtaaaagatctgttctgctcttaaactgcaatgaccatccacagacaacggaatgagacggggagggaggtagcggcagagaaacaggtcaagccggagggaggagtggcatccccctggctgtgggtgcaggaagaaacaccctcagcatctccaaagggaaggatgggctacatcacccccttgcttctgcagtccaaacagaccctgcccaagccagaggctgccctcaccgggataaaacagagctaaaggaattgtaagaggtgccgctgttgcagctcgaggcataggcctcctggccattgccatccaggttgattttgaacacagaggatgccttcagcaaaaagtctgcggcatcccggcgacccagctccctcagtttggacatgagggtgcccactgtgctctcagggtaggtggtccattcccgcagcagggcgtggagggggctggggaggaaatccttgggagccccgttactggtgttgtactttgccacgaggtcagggaggcctaagttcatggcgagaaggcaccagtccttccccagggggtcgggcgggtccagcaggcgactcagtttcctccgagtgaggaggttcaggtctgatgcatggatgtccatgccgaggctggcctgtgagtagacgtcgtgacacccgaagcacatgatgctgctgaagctttccttgtacccccccatggtgttggtcagtgaggtttccttcagagtctgtgcccggaagaagtcccgtggctggtagatcatgacgggctcatggttttcccgcagctgctgggggctcaggtaatgcttcacggtcaggagccctggcagcgtggtggccatgacgttctcaatggtgctgcacaccgagtccagcagcaggcagcacttgatcttctccgtctccaggccgcggacctggacctcaatgccctggccgtggttgaccagcagcaccagcagctcggccccacggttggccagcttgcagccattcacccacaggcggatgtccgcgtcgccctctgtgctttgctggtggatccaccggcacaggttcacctggaccttgtgaaagatgccacatgggaagggggtgaggtgttccacgggcacgatgcgcacgcc

SEQ ID NO: 441272 - DNA, 1049 bp, Homo Sapiens
  misc_feature (6)..(6): n is a, c, g, or t
  misc_feature (12)..(12): n is a, c, g, or t
  misc_feature (46)..(46): n is a, c, g, or t
  misc_feature (53)..(53): n is a, c, g, or t
  misc_feature (67)..(67): n is a, c, g, or t
  misc_feature (81)..(81): n is a, c, g, or t
  misc_feature (339)..(622): n is a, c, g, or t
  misc_feature (720)..(1004): n is a, c, g, or t
ttttantatttntgcttgtttattcatttaagttgatgactctttntgtattnatttcagcaagtancataaccacacagnatagacaatgaaagcataattagtcattatacacaattataatttgataaaaaatttcaacatatacagaagtataaagaatgtgtatctatcatgcagcttctacaattatcattccaactcctcgtttctttgatattgccaacaatttacaccctgccccaattccaaatttggaaacaagtcccagatattaatataatttcctcttcaacatttcagtatgcctgagagattcttgtttaaaaaaaacatttnnnnnnnnnnnnnnnnnnnnnnnnnnnnnnnnnnnnnnnnnnnnnnnnnnnnnnnnnnnnnnnnnnnnnnnnnnnnnnnnnnnnnnnnnnnnnnnnnnnnnnnnnnnnnnnnnnnnnnnnnnnnnnnnnnnnnnnnnnnnnnnnnnnnnnnnnnnnnnnnnnnnnnnnnnnnnnnnnnnnnnnnnnnnnnnnnnnnnnnnnnnnnnnnnnnnnnnnnnnnnnnnnnnnnnnnnnnnnnnnnnnnnnnnnnnnnnnnnnnnnnnnnnnnnnnnnnnnnnnnnnnnttgttttaaaatttaatctttatgctctgaatggaaaggctataaatggagttcaatgaaaggaaaaaacatttaaaaaatagaagttctttctttcnnnnnnnnnnnnnnnnnnnnnnnnnnnnnnnnnnnnnnnnnnnnnnnnnnnnnnnnnnnnnnnnnnnnnnnnnnnnnnnnnnnnnnnnnnnnnnnnnnnnnnnnnnnnnnnnnnnnnnnnnnnnnnnnnnnnnnnnnnnnnnnnnnnnnnnnnnnnnnnnnnnnnnnnnnnnnnnnnnnnnnnnnnnnnnnnnnnnnnnnnnnnnnnnnnnnnnnnnnnnnnnnnnnnnnnnnnnnnnnnnnnnnnnnnnnnnnnnnnnnnnnnnnnnnnnnnnnnnnnnnnnnnacaaaaataaaatttaatcataacatcattctaataataaaaatc

SEQ ID NO: 441273 - DNA, 1084 bp, Homo Sapiens
ttttttttcagagtccttgattcaactgtttactaatcagaaaggtcggtatagtcggtccttttttctactgctggcaagtgatttttgtatattttattacaaataaaacaatattgcttgacagcatcatctgtcatcttacaaatatacaactacacagtcctaaagtaatagtatgtctctagaactgagcttttcttaaaaacaaacaataactatactattattaagtcctgcaccctaaatctatacagcagctttaatcaatgtggaaatgaaattatgatttattaatttacataaaattactttatacattaaagaataatttttcaaattgttaaaaaaacaaagtctgaagctgtcattattgggattcgtgggacgtggtttgctcttctatcacctgcttcacaatttctgccagttttagtcgatctactttatctgtgaatccacgaccattccagctgaagctctgcagagtatctcttaggagtttgcattcccggttatacttccaagcctcctgcattacttcattcagtttctcatcttcattctctcctttaccagcctgggggaaaatacactgagcaatcacatctcggaatttttccaaggcaacattggaatcctcggctccattctcatggtcgtggatataaacactgtcctttggcttggtgccaagtaacttcctcttccccaaaatggggttgttcactgagtgcaggggtttgaggctgactttcaaatcctggattctcatgttggccaactgttccgcgtgagcctgctggattcctgcaaccactgccttgtccatcatcagctgagcagaaggcagcacattatccagggcctcggtggaattgagccaggggtggtccagcactccctcgatggtgagtctctcctccggtttgaccttcaggagcttcctcacaacatctttggccatctctgagatctgactccactcttcctctgggaactcaaaactgccctgtcatgatcttttcttcgccatatccctttggggataatccccggctggtggttgtttgggaagtaaaaa

SEQ ID NO: 441274 - DNA, 494 bp, Homo Sapiens
attttcgaacacacatttgcttttcttttggtttaagtgcagttaagtcacaggaactgttaacttttcctaagtaaactcaatgcttcctttttccaactgcagatttccagaaggctgatttcaaacaaatcgggagggatggataaattccaactctccaagttctgtagaccatccggaagcaaatgctggcggccttgatggctttgtccatgtcgctctcctccgacatactcagtggggcccccacagccgggagaggcggaggctgctcagcagccctgtccccgcgcggccgagggagcaaagggctcggcactcgggcccctgggcctcgtggcgacgggcagcagccgcccctcgggaccggtggggatgaggaccccggcgccggctctgcttcggcgggcggctctaggctggcggcagcagcagcggcggaggcggcggcccctggggacaggtctttgtgctgggccccacgcggccgc

SEQ ID NO: 441275 - DNA, 1343 bp, Homo Sapiens
  misc_feature (153)..(153): n is a, c, g, or t
  misc_feature (169)..(169): n is a, c, g, or t
cccagaaatcttcctttttccccaaaaaatggggttttcccggagtgcaagggctttaggcttaactttcagatccgagattttccatgtgggccaaagtttccgcgggaacctggtggattcctggcaaccatggccttgtcccttatcagntgagcagagggcagcncattatccagggcctcggggaattgagccagggggggttccagcactccctggatggggagtctctctcccggtttgacctttcaggagcttctcaacaacatctttggccatctctgagatctgactccactctttcttctgggaactcaaaactgcctgtcatgatctttcttcgcatatcctttgggatagtccggctgtggtgtttggagtaaaaaggagggtatccgcacagcatcacatagataatcacccctagggaccacaagtcacagctcttgttgtaagtgtagggcgtcggtgaggtaggtatgatgccagatttctccttctgatgccttctttgcgcctccagtacctggggtgctacataataaggggtgaactggggtgtcatcaagtcaccttggtcaatcttggcaaatccaaagtcacacaacttcactggggcatccaaagagttatccttaaaaagcagattttcaggcttgaggtctctgtgcgcaatgtttaacaagtgacagtgccgcagagccaaagctatctgctttgttacttggctggcttgcttctctgtaaagtgccggtgctggctgattctgtgaaatagctctcccccttccatcatctccattacaattaagagtcgggccctagggctggactcatggggaaactggacactgttagcaaacacttcaataatctgaactatgtttgggtgtgtggcacacatcatgtgcagacgtacctcatttctagcttttggacgatcaagaagaattttcagcgcaaaccgttcttgagtagatttctttacacagactctaactggaccactaattccagctcccagcttctgagtccaattgatactgtattcttctaaaatggaagtttccttgatggctttgtccatgtcgctctcctccgacatactcagtggggcccccacagccgggagaggcggaggctgctcagcagccctgtccccgcgcggccgagggagcaaagggctcggcactcgggcccctgggcctcgtggcgacgggcagcagccgcccctcgggaccggtggggatgaggaccccggcgccggctctgcttcggcgggcggctctaggctggcggcagcagcagcggcggaggcggcggcccctggggacaggtct

SEQ ID NO: 441276 - DNA, 1542 bp, Homo Sapiens
  misc_feature (15)..(15): n is a, c, g, or t
  misc_feature (561)..(571): n is a, c, g, or t
  misc_feature (1106)..(1107): n is a, c, g, or t
  misc_feature (1109)..(1117): n is a, c, g, or t
  misc_feature (1413)..(1413): n is a, c, g, or t
  misc_feature (1418)..(1418): n is a, c, g, or t
  misc_feature (1425)..(1426): n is a, c, g, or t
  misc_feature (1431)..(1431): n is a, c, g, or t
  misc_feature (1455)..(1455): n is a, c, g, or t
  misc_feature (1461)..(1461): n is a, c, g, or t
  misc_feature (1473)..(1473): n is a, c, g, or t
  misc_feature (1476)..(1476): n is a, c, g, or t
  misc_feature (1480)..(1481): n is a, c, g, or t
  misc_feature (1487)..(1487): n is a, c, g, or t
  misc_feature (1490)..(1490): n is a, c, g, or t
  misc_feature (1492)..(1492): n is a, c, g, or t
  misc_feature (1494)..(1494): n is a, c, g, or t
  misc_feature (1496)..(1496): n is a, c, g, or t
  misc_feature (1501)..(1501): n is a, c, g, or t
  misc_feature (1507)..(1508): n is a, c, g, or t
  misc_feature (1513)..(1513): n is a, c, g, or t
  misc_feature (1524)..(1525): n is a, c, g, or t
tatcataaaccactntggaaaataattccaacaacacaaccagcagagtgacacatactatctaaaacttgaccaaatgaggttcttctctgtttaccctaaatcctcccagaatggagtcattgcactgagtgacctgcttcctgattgcgcagactgaaactagctaaacctgaatgtacctactagggcaccataatactgcagcaagaccaaagtggtaaagaaacacagtggaccttttaccaacctgttcatgtgatgtgagcaataccatcttaaaacttgttacctgaatcagtagatgaatcttttatccagttcttgctcctaaagttaagtttgaatcccctatttttgcacaggggcagcagatacacacaacaatgagaactcagtgactttgatttctttgtagtgaaaagtgaagtctccgtttcagagtttgtgtctttctttctgtccataactgaagtattcactactcttgtaaaccaaccaagaggaggagaaagatgacccagaagtggattcagccattgtgcctgaaatcagtgtttnnnnnnnnnnntcaaccaggttgtggtaacaaggcattctatttcttcaaaaagactgtatgcctgtgtctgaggaacttacctattatccacctctgttggaactctcttttaaaaagtacatttatagattgatcagaattataaccatggagaattttttcttctgagcattttaatatacttgaaaacaacattgacttgaaaaatttcagaacatttttcagtacctagttttattaaatattacacttgagagacactttttaaaaatgtgttaatgtcaatatgatgagattttagcctttctccagaactaaggcattaaagaaaatagcaaatattaaaaaataaaactgttacttttttccttctttcttttcacctttaggttaatatccagtattatgtgttatccctttggataagtatgctttattttacctctgttaaaaattaaaataaatgattctattcatatttgtcagtaattcaaaacttatatgtgtaactgaacgcgcatgtaaggtatggttttatttaaanncnnnnnnnnngaggaaatttaaatgctaaagaaacaacgaaatgaaaaggtatcaggaaaaaaagatcaggaagttgtattcaggtacaaatctttttttaaataagtattttgttgaggttgaagaattgctggcaattaaaagaatagagctaattatggctttcatcattcattcatggtatttattgagcacctacttatttatggtgctccaacacttgttactgcaagctaccttaatttcccaagagtggtgccttactctgttttttctgatatggtcttccaatcagtgtgtgtaanatacngttgttnncagcnatgtaggtggctgtgtctgttgcncatcanaagaagttaagnttntgcnngataanttntntntnttaangaggtnntgggngaaacgcaaannatattttttcacaaatt

SEQ ID NO: 441277 - DNA, 1110 bp, Homo Sapiens
  misc_feature (34)..(34): n is a, c, g, or t
  misc_feature (39)..(39): n is a, c, g, or t
  misc_feature (73)..(73): n is a, c, g, or t
  misc_feature (80)..(80): n is a, c, g, or t
  misc_feature (89)..(89): n is a, c, g, or t
  misc_feature (1080)..(1080): n is a, c, g, or t
gagatggatgttgttttgtcattaggctatagtntagtngtaaattttaacttaatgtaattttattttttangtttaangagttgttnttattttaacatcccaagtagctgggattatatgtgttcataaacaaaacaagttaatttttgtattttttagtagagacagggttttgttatttaggctaggttgatcttgaactcctgatcttaggtgatttggccaccttggcaaagtgctggcattacaggcatgagccatcatgccctgcctgtagttcacttttaagtatattttttaaaagtaaaaaatctgaagcagctgccacccaagtgtagaatagataaattgtgatataatcatagaatgaaaccagacataaccatgaagagaactgaactactgctagacaggacaacgtggatgaatctcacatgcaggatgctgatccggacaccacaagaaaaaacaaaagaaggtgcctactgagttttcttctttccagatgaccaactcttaacttactcatctgtttttttcactgttctgcttcttttgaagaagatttgaggtgacttacaaaggtgtatggcatatttataactgaagaaatctgggtgatgttaaaacgagggcaggaaaataaggtggaaaccagatgtaaggatagtcttcactatttatgtcaggaattcctacaaactttctatggtgaacagaatagagcttcctagcagtcaatgcaaagaagaaacacaacaattccacaccccaaagttaacagtcttgcttatcagaagcacaggtagttctgaaatctgatagaaaatgttcctgtatcatttcagaacacgcaactatgtgatcaaacccctttctatttgtttaaaaatttgtcaaacatcccatgtttgaccctgggatgtctgaatcccctcagcccacattttcccccctacaccatgcccacaccatccccataggaatttaggggtgagggcagcatcttcaggtgattggacagggcccctccttaggaccccgtttacttttccgggggtgtgggtttggggggtnaggccctgttcatgaagggttgggatttct

SEQ ID NO: 441278 - DNA, 825 bp, Homo Sapiens
cttaggttctgacccaccaggcaagagctgtcagggttaaatccaggcccgggcatgagaatggaagtgatcagggagactcggtccttgttccaagtctccaaagaagaccaaagtgggtcccttgagcaatgaagaatctgagataaattctcttcaagtatcatgtacaaaatctgtgagccagagattttgacttgagcaagccatggaaatgcatggagcaagggtgacactctgtggggagacagaagaatttcaactatttaatgtccattttgttgtttttaccctttcttatccaatagatggaatgcacatgaaatgaccatattaagcctctctctatttacatcccaggctcactgggatgtggtctactgcagttacattttcttgtaacggtttctggattagaccctagggcaaagtgagtaagcgcagccagtttctgtttaacattctagttttactcattttaggcaaggctgtgaggcttgtctcctttaaagtttcttctccaatggaaaccaagaacagacaaaatttagagctcagctgtggtctcttctcatcttctgctcttttgctttgaccacagtttttctactcttcccatcaacactagagcaatggctgtgcaaataggaataggaaatactaccacaatgatagaaatattatccacactatcacgtagggaagaacaatatcctgaaagagaataaaacacgaataaggtgatgtacccacattaatctgtgggtttgtggaatgagggttgcaaagttattgggaaaaggaaagagcagagttcacccattc

SEQ ID NO: 441279 - DNA, 942 bp, Homo Sapiens
  misc_feature (370)..(430): n is a, c, g, or t
  misc_feature (565)..(565): n is a, c, g, or t
  misc_feature (793)..(793): n is a, c, g, or t
  misc_feature (829)..(829): n is a, c, g, or t
  misc_feature (831)..(832): n is a, c, g, or t
  misc_feature (852)..(852): n is a, c, g, or t
  misc_feature (885)..(885): n is a, c, g, or t
  misc_feature (923)..(923): n is a, c, g, or t
  misc_feature (934)..(934): n is a, c, g, or t
  misc_feature (938)..(938): n is a, c, g, or t
aagggcggtgtactacctggagcaccctgagaagtgacgctgacagaggcaagggaggctgccaggaagatgatgccacgatcgccaaggtgggacagctctttgccgcctggaagttccatggcctggaccgctgcgacgctggctggctggcagatggtagcgtccgctaccctgtggttcacccgcatcctaactgtgggcccccagagcctggggtccgaagctttggcttccccgacccgcagagccgcttgtacggtgtttactgctaccgccagcactaggacctggggccctcccctgccgcattccctcactggctgtgtatttattgagtggttcgttttcccttgtgggttggagccannnnnnnnnnnnnnnnnnnnnnnnnnnnnnnnnnnnnnnnnnnnnnnnnnnnnnnnnnnnngtaaagcaaacagaacccaatgcctccctttgctcctggatgccccactccaggaatcatgcttgctcccctgggccatttgcggttttgtgggcttctggagggttccccgccatccaggctggtctccctccnttaaggaggttggtgcccagagtgggcggtggcctgtctagaatgccgccgggagtccgggcatggtgggcacagttctccctgcccctcagcctgggggaagaagagggcctcgggggcctccggagctgggctttgggcctctcctgcccacctctacttctctgtgaagccgctgaccccagtctgcccactgaggggctagggctggaagccagttctaggctnccaggcgaaagctgagggaaggaagaaactcccctngnngttccccttcccgtgtgggntccaaagaatatgttttgttgtcatttgtatancctgttggggtgtgtggggaggggggtggaggtggtgnagtttgacganaaanggtg

SEQ ID NO: 441280 - DNA, 1387 bp, Homo Sapiens
  misc_feature (129)..(129): n is a, c, g, or t
  misc_feature (175)..(175): n is a, c, g, or t
tccaaatccttatgtatagcagcaatctgtcttttcttgtcattaatagcctgatctaaagacttgagttcctttttaatccacttatccctttcttcttttgatgtaaactggcttcctcgaccctgntttgcataaagatccgttctttcctgggtagcttgagccaatctancaattcctcgttcttctttctctttcacactgttgaatttgggttctgtttctgccagttctttctgcttttcttctattttttcaagcagcttctgcctctcttttaataaacgtttcctttgttcactattgcctgctagttcatcttgtaaatccttggctttaagctccaacttagtcctctgcttaatctgctcttgtctttcagcactaagctgttctttttcttctttcatagctgaaatttttgttttcaattctctaacttggcgttcgatatcctccattttatctcttgcatcctgctgagcatctcttaattgtctggatttttctccactagtctctcgcttagcagaaagctcatcaagtttggcacgagtctcgttaagttcctgattgtaaatggtatattccagggctcgtctcattttatcccacttctgatactgagctagttcttccttttcttcctctagagtatgtaatctctcttcaatgtattttaacaactcattgattttttcccgtttgccctctgtttctttcattaaggagatgctttcttcctttcgttcgtcatacactctagtaccagctacttctcttaatagctttaatctctgagaatctggtgctgttgccatctggttgatctttccttgtttaacaatataataaggattgcttcgagaaaaaccagcgctttcaaggaggttcatcacatcatttttcgtgaccatcttcttgtctaagaaatactgatcctttttggcaccaataactcttcgaagtgaaacttcctctttatcgattggtaaccggttgtctgaattatcaaaaataatctccacaaaagcagaaataacacgaggaccagtaccttcatgcaataaagccaaccgctgttctggacgaagatgactaaactcatcactgagaacaaactgaattgcataaaaaaagttactttttccagatccatttctgcccacaatcacattatgttttgaactgaagggatctacaattgtttgatctctgtaacttcgaaaaccctggataatcacctgctttatgtacatgattccgggcccctggcctggaaggagacctgccccggagcagcaaccgcacggccgcagggtcaggtgaggcgcctacgcgacccctcccccaaagcgccgctcgctcccctcagccaaacccc

SEQ ID NO: 441281 - DNA, 901 bp, Homo Sapiens
  misc_feature (706)..(706): n is a, c, g, or t
  misc_feature (771)..(771): n is a, c, g, or t
  misc_feature (819)..(819): n is a, c, g, or t
  misc_feature (825)..(825): n is a, c, g, or t
  misc_feature (848)..(848): n is a, c, g, or t
  misc_feature (883)..(883): n is a, c, g, or t
cagacacaaggaagccctggaggctgaggctggggctacagttaccagatactaagtgcctgcctggtccctggcaggtcaagtctgacacttggccaagggctcggccgccctttccatttgcacaagcatgcagcagataaatgggtcccagacttgaaggaaaaaattttggaaaaaatataacttttaatttcctcttatccacatgagcaaaaaaagctgatgataaatgcattctgcctggcccgtttaactggaaatgggagaagctgaggtaagggagggatcccccaggcctcagtcattgagggtctgacagggggactgggcacagcccccctggctctcacatttgatgttgaaggaggcgttggcactgcgggcttcttctccagtgacatcatcccgagccacacactggaaggtgccagagtcctgcagccggtccacagctgcaaagctcaggctgctgccctgggcgaaacgccgctccgtgtcctggacaggggccccatcgagcagccagtacacatgtaccgggcccggagcctcaacctcacagcgaagcagcgcccggcgcccctgcagtgcatcctgggaggacggctgcttgatgaagacaatggctgtctgggtaccgcccagcagcggcagcagcaggacgctgagcagaggcaaccggcggggtctggccggggatccncgcgcagctcccatcgcggcgggctcaggaaaaggagctgagggcgcacggcgggcgcgcagacntggtccgcggcgggcacaggaggcggagcgcaccggagcgcgggcgcngcagcngcagcggcagccggagcccgacnccgaggcgtcccgaggcgtgccgagccggagccgngcgatcccgggaattccg

SEQ ID NO: 441282 - DNA, 988 bp, Homo Sapiens
tcgagctcggtacctactttcacaggtgtctcaattaaaataataaaaaaaagggagagaggtgcttactggcaacattaatactagacaccagacaagacagtgaaacggtttggtcagaactgaggaacaccatttccttgaaaagtcttaaaaatagctaaccaagcactgccttaagtccagtgagtacaatgttccatacgtttccacaaaaatattgtaactggcattcactcattatgatccacgtcatctcagtctccactttccaggcaaagtgtccctgtcccaccgcctctagctacaggctatcgtctccagctgctgttctgcttccgcagccatcgctgccgcctgcaactgttctgtctcgctctggatggcactgggggtaacctgcttcctttcactgtgcatattgttctcgtgccttttcagatcagatgccttggcaaatgccttggtgcaggagccacacacaaaaggcttttcccctctgtgtcttctttcatgatccttgaggtgagacttgtgtttgaaggctttgtcacacatgtggcacgcaaacggtctttcattagtgtgaactctctcatgcttctttaagtctggggcacggataaatgattttccacacacctcacagctatagggcttatatcctgtgtggatttttaggtgttctttcaggtgggcctgtgtggtgaaaccttttgtgcacatttcacaaacaaatggcctgtccgccgtgtggagtttctcatgcttcctcaatctgccttcatcagaaaacgtcttcccacacgcctggcaggcaatctgctcccgatggtgaccataaagcaaatactcaaacttcatgtcactggcggctgttgtccagcctggtgtctgttcatctttcacttcactcatcccatcattaaatgttaaggcttgaggggtctgggaccccaagtcttttgattctggatcccgggaattc

SEQ ID NO: 441283 - DNA, 935 bp, Homo Sapiens
  misc_feature (917)..(917): n is a, c, g, or t
cctcgaagagtgtgaaggaggttgcaatcaggaacagaccagagcttgcaaagcccactccaaacaagctgtggccagcatcttggaattgggactaaagtgacagtaggagataggccgatcatccccaatctgactgcaaaaattattcaaagaccggagagacgttgtgcagctcttgcatctgggaggtccttgttgtctcaggaatctccttatgggagtcgggcctcttcccaagcgtttcattgccctgggcaacgaataattagcaatccatagtcttgccaccttcaagctatttggtccttcatgataccaggtttgctgatactcttctttggactttttagacttctcatcatcctttttggtctttttcaaggcatcagtaccgacaactgagaggatatttcttaacctttctcttctttcagcaggaccctctccaaaaagtgtgatgggttcccccaaggctctaaggcaagctttgacctctgagtcatctgtggaaacattgatctgccgggctcgcttccttctctcaaactcagccaatacttctgcctgtcgctcgctgatatgctcttcaatttcaaacacttctccagaggttatattaatatttccagcttcgatccctgctttaagtccgtctttccccaaaatcccagactctcctttggccagacgctccctctccttctcttccaaacttccataatagatgtgtggtttcttcacgaccggagcaactaagtcgtcgggtgctttagttttggttgccgtggaagaggctcgcgaggaagccatgctgggctctggagccgcgaggccccagcgaaacccgaacactccctttcagaccgtccaccgcgccctcgtgccgaattcgccacccaggcctcgctacctantactcggggttactgcca

SEQ ID NO: 441284 - DNA, 2144 bp, Homo Sapiens
cgtaggcgtgttttaggaggggtgcgtttattagacaaacgctgggagacaggcctggtggggacctggctgggggatgatgcagcccgcgatggctgctgcttcgtacttggcttgccccggaccacagcctcgtaacggtaacccctgctttccaggggcctggcacccccccctgccagggtccacacgcagggttgtggcgggaccacccctgcaggtccagctctgtctcccaccttttgcacagagcttcaagggaagcctccagaagtcaggggtgagaacccgtcttgctctgcctcaggcaaccccgggacaggctgaagcccctcacgcacttgggtgcccgaccagcagcagcaagggcagcacctgtgggcctcggcccagggccaacggaacaggctctgggacctcagggaaccttctgctgcctgggccaccccaccccacctgggcagagccagtgggaacccagaggcacccaactggaggtgacgaggcggctgcgggtcctggctagtcctagctcctactcgggtcccagcacaccctgcagctcactcagaattttgggggaagccctggggtcttggggcatgtggttcttctgttacacattggacacggcctcctgggagtcctggtcctgcagcccctaccaccggatgcccaggccagtgctggccttctccacggcgtggtactgcgtatgcagcaagcgacctgcacactccgagtccgtgccctgcagccagtgtgtgtacagctcctgaaccccaggcgcgtcctcgggcgcctcagcccggaccatgccgtacagtctctccacgtgctggaggagctctctgctgggcctgtctggggcctggagctggcccccgccgttcaggcagcctgaggggcaggccatgacctccacgtagtggtaggggcagcgccctcgtttgagcctctgcaccaggttctggatgttgcggaagccgtacgccattgcgaagtgcagcagcacctggccctccttctccagtgtcacctcctggaagtctttgttcctcaggggtttgtaggtaacctcagccacatggattccaaagagctctcgggccgcgtgccggaacacgtgctccaggtagccccccgagccccctccccgatggctggtgggctcctctgcagaggcaccgctgcacaggctgtccagaggggctggttccaggtcggggagggagacgccctcttcctccagcaacctgaaaacttctcctgttgtgaggacacagtccacatcccgtgtctggtgctcctggttgaaaaagtcgggtctggaggcttccagctttttgtcatagcagggcatcactgtgacgtggtagatcttgtcaggggtcaagtgctgctgctgggcgaagaagtccttgaccagggagcccatgacctgctgcggggaccgggcggtgctgatgtgggggaggatgaagctgccgtgagtcttctcggcatagcagatccagcctgggcaggcagaggccagcaggggcagcgcctgtctgcagtcggcctgtcctcggaatcgccgcacaaactctcgctggctctccaggaggctgaagtgccttgagaaggcggtgtcgaagacgaagtgcacccctatttttttaaagaatgaggttaatttcctggcagtatctgtaggattcagctgaaaccgtgcagccagcgatgctctagactgtggtgagaccgaaactacaaccagcctctgctgactgggtgccgccatcttgttagcatctagaaccttcttcagctcctcgtggctctgctgggtgataagcacggtctctgcggaggtgatgcagccgctgcacgccaggcagtcgtttagcgagaccttggccttctccagcctccgggtcccgccgtcttggttaatttggaagtagctcccgtcatcttcaatgcgaatcttggccacgccacttcccgcccttttttccactttgacaggcttgatgcactcctgagacggcccgatgaagtcatccaggtccgtcagctgcagcgccccgctgaagggcgacgccatgacggccgcactccgctctcgacgaattcgagctcggccgatttggcctgat

SEQ ID NO: 441285 - DNA, 1096 bp, Homo Sapiens
  misc_feature (160)..(160): n is a, c, g, or t
  misc_feature (650)..(659): n is a, c, g, or t
ccttttctgtcttccttctttttcttttgtgcctcatcatcgcttttcccccaaaaagctttccccccaaagtgctagttttttttcctccatattgaaatgtttgatactagacttcctggtttagaatgagttgttttcctatactcccctatttttnttgttccctcgtgccaaaattttgactgagatcctacactttttcccccccgatccagggctaatagagcatgccaaatttccagtggagaagaattggagatgggctaggggtagggatgaggttcagctaccttattgttcagggaggtggggatggagccagggaggaaacacaagtggagctcaaccatagagctgcagatcttggattgtgggaagtaatattaaattacatatggtacttcatctttcttttcaaaaattaacccactatctctctactcatagtgaagaattaggctgttttcttgtcaactctttgtaattgttcctaattagtaatgcatgaattggaaatatactaattaaaatttagaaagttttatttcaatcttccaaatataggtggtttcaagtagctcatctgatctattacttttcttttatgacactaatgcctttagttctttcaaaatgtggcgaatttnnnnnnnnnnggcaaacaaaattacccctaaattatggctttcttggtgttttggatgatgaaactaatgtattactgtctgaatttcttattagatttttacatatataggttcatcttaagctttgaaacttaagaatttgaaggtattttcaataactggctgtgtcatgccatttcattgccctggccatctgactgtccctttgacataatttctaaatttggtttacagaataactggaaagatattaagacaagcacactcataaagacatgaatgatccaataaacaggcaacaaaaaagtcctactgagctcggcaaaagcattatttcttccttgttgaaggtatcagcatatgttacatcttatgttgcacaagtgtgctcattaaatattatgaaatgtacagcaggacgggaagctctaaccagttaggcaaag

SEQ ID NO: 441286 - DNA, 1364 bp, Homo Sapiens
  misc_feature (870)..(879): n is a, c, g, or t
  misc_feature (1173)..(1173): n is a, c, g, or t
  misc_feature (1189)..(1189): n is a, c, g, or t
  misc_feature (1195)..(1195): n is a, c, g, or t
  misc_feature (1228)..(1228): n is a, c, g, or t
  misc_feature (1249)..(1250): n is a, c, g, or t
  misc_feature (1252)..(1252): n is a, c, g, or t
  misc_feature (1254)..(1254): n is a, c, g, or t
  misc_feature (1266)..(1266): n is a, c, g, or t
  misc_feature (1284)..(1285): n is a, c, g, or t
  misc_feature (1299)..(1299): n is a, c, g, or t
  misc_feature (1307)..(1308): n is a, c, g, or t
  misc_feature (1317)..(1318): n is a, c, g, or t
  misc_feature (1326)..(1326): n is a, c, g, or t
  misc_feature (1335)..(1335): n is a, c, g, or t
  misc_feature (1339)..(1339): n is a, c, g, or t
  misc_feature (1347)..(1347): n is a, c, g, or t
aaaaagcacctggaacctgatataactcaggctgcaattccatccagttctcacctcaacggagccacacatttggcactgttatcttggtatccctcatcccagaagaggcatctccatatcccagaaaagaagatcctatcatgaataaaagctgtatggcccagagaggagctcatgtgtctaaagtgaagggtatattttcttctgttgtgttgatgtttccttcttaatttataggatttttttaatgtaaaaaattgcactgaactctataaacgtaaatgctgctttttgtagctcatataaaaaaggttccatatttgtagtatactgcaataatattttttacatccagctctttaagtgatcctcgttctggtggctttgtgtaaatatgtttgccctagttgaattaagaaactctaaaggttataaaatgaaaacaaaaaataaaatatttgttttctgctagatgcaaaactgactaagcatgtatattttaccaaacttatgtattttttgaagttatgaactataaaatgttaaaacattttttgctgggacaaaatgttaagtaatttgcagtatgtagtgcccccagtattgggatttttgagctaatgggcagcagtcagctgggggcttctgagggatgctcatctttaacagtctccctcatgtacttttgctgttttacacagagaaacaggtagaccccacagaggagaaggaggggattcaacagctttattgtctggaagcagtgagatttggtgattgtctggggggattcctgggtttccctgggtaccttgttccaggcagtcagtccatttgccttcctagtacttagccccctctgacaannnnnnnnnnaatgtgccttttgggttggtagaaacggaagtaggaagtagggctgggaggatggagttggggacagtcttccttttgttggggaggtgagcacatttacagatattttgctttcatagtttccctgccctctgcccagctcagtttagacagtaaacgttccttgtttcttttctcccatgacactgacaagaggaattaccacctcagcctcttttgcccctcttcttgcctttcacccaggctctcagccctaattaacacactgacccaaaggtgcttgtgttgcagggnccatctcctttgatgnggttanaatcccactttggcatttcctaactattcgtgnggctagaatggttggttggcnntnanaagaaaacatanttaccagggccaggcgcnntcctgcctcgcaantctcaaanngtaagttannaaagaagnggcgggaancaancttgatgnctcccccccctactgtt

SEQ ID NO: 441287 - DNA, 871 bp, Homo Sapiens
  misc_feature (375)..(375): n is a, c, g, or t
  misc_feature (378)..(378): n is a, c, g, or t
  misc_feature (382)..(382): n is a, c, g, or t
  misc_feature (411)..(411): n is a, c, g, or t
  misc_feature (496)..(496): n is a, c, g, or t
  misc_feature (522)..(522): n is a, c, g, or t
  misc_feature (589)..(589): n is a, c, g, or t
aagtttccacaaatcattggtttattagaaagttcctttccctcattttacagcatatatatctctatcatatgtgataaagttaaatacaatctgttatgcttgtaagtaaggtttatttttatttttacttttaaaatcactattctggaagttaaagaaaatgcccctaggaaggcaaagaggcagccagagtatggctcaatctacaagctaatgggaagcagcacgaaaatgttaatactgtattatttatttacatgggctgaaagcaaaggaaaaatgagtcccttcacttacacagatgatttcatttttccagtgctagttatccaagaagtgatgcttctgaatcagatgagtactgaacagggnggngggngggggggcagtcaagagtggtgtttgccngccactttcttttcataaactttactcttttgagaatttgcgaaggcaggaacagagccttggcccaggtaagtatggtttttcntgtcaagtgaccaaccaaccaattcnagccacacgaatagttaggaaaatgccaaagtgggaattgttaacctcatcaaaggagatgggaccngcaacacaagcacctgtgggtcagtgtgtgaatgagggcggagagcctgggtgaaaggcaagaagaggggcaaaagaggctgaggtggtaattcctcttgtcagtgtcatgggagaaaagaaacaaggaacgtttactgtctaaactgagctgggcagagggcatggaaactatgaagcaaaatatctgtaaatgtgctcacctcccaacaaaaggaagactgtcccaactcatcctccagcctacttctacttccgtttctaccaacccaaaaggcacatt

SEQ ID NO: 441288 - DNA, 1170 bp, Homo Sapiens
  misc_feature (1088)..(1088): n is a, c, g, or t
  misc_feature (1117)..(1117): n is a, c, g, or t
  misc_feature (1137)..(1138): n is a, c, g, or t
  misc_feature (1153)..(1153): n is a, c, g, or t
  misc_feature (1158)..(1158): n is a, c, g, or t
  misc_feature (1162)..(1162): n is a, c, g, or t
tgtaggcaagatccctgcgtttaccatactattatcagaagttgtggatcaggccaaatcggtcgagcgtcgaattcgtcgagagcggggggaagcgctagtgcgcaggcgcaactgcctggctctgctcgctccggcgctacggcccagctctcgcggacaagtccagacatcgcgcgcccccccttctccgggtccgccccctcccccttctcggcgtcgtcgaagataaacaatagttggccggcgagcgcctagtgtgtctcccgccgccggattcggcgggctgcgtgggaccggcgggatcccggccagccggccatggcggggctgtactcgcttgggagtgagcgtcttctccgaccagtgcgggaggaagtacatggaggacgttactcaaatcgttgtggagcccgaaccgacggctgaagaaaagccctcgcctgcggcggtcgctgtctcagccgttgcctccgctggttccgtccgctcaggccgtcccttccctggcggcgtaagtctcgtggggaaaggcccagtcggtggacagcccgagatggctcgcgatcctctcccggacgccggggcctcgccggcacctagccgttgctgccgccgccgttcctccgtggcctttttcgccgtgtgcgacgggcacgtgcgtggcgggaggcggcacagtttgcccgggtagcactgtgtgtgggtttcatcaagaatgcaggaagggtttcacctcgtccgagccggctaagttttgcgctgccatccgcaaaggctttctcgcttgtcaccttgccatgtggaagaaactggcggaatggccaaagactatgacgggtcttcctagcacatcagggacaactgccagtgtggtcatcattcggggcatgaagatgtatgtagctcacgtaggtgactcaggggtggttcttggaattcaggatgacccgaagatagactttgtcagagctgtggaggtgacacaggaccataagccagaacttcccaaggaaagagaacgaatcgaaggacttggtgggagtgtaatgaacaagtctggggtgaatcgtgtagtttggaaagancctcgactcactcacaatggacctgttanaaggagcacagttattgacnnattccttttctggangtagnaaanacttggta

SEQ ID NO: 441289 - DNA, 1573 bp, Homo Sapiens
cttattcatcattcattcatttatttgattagttgaaaacacttccgactaaggaagcagagagcccacaatcctgtgggaaaacaggcctgggaactaatatctcaggggtagtgagggtcgggcccagatcctcaaaggttccctgcccctgaaattgcacctttgacagctgctgaattccaagcacagcggtaagtgctttacatggggtaaccctaaaaaacacactgggcctcagacactcccgtacacacacccaacctctaccctgtggatgtcctagataagggttttctcttcacaaaggtaaatcaactctttgcctccttagggagggaaggattaaaggcattatttttgagacttttctgcagtccattctgcaggtatcagtagtgggtaatccctccaacgtccagggcttcaaacgagcagctgctccctaaagctcacccaccaatcctggccctccacctgctactggggtagaggcctgggctacagacacagaggctgggcttctgcccagctgccagtggtgagacatggccttcaggagctcaggtggctttttaactgcaccatgaagattccaaacttggtggagttcagtgtccacacataacgaatgagaacaggtgtcagcagtgtcaaccaggtccgcaaaggggagaataaaaaagctagggtgccgtatgttgcataaagaaagtagcaggaataaacctgccagatgtacagcagtagcataagtaggtgaacaggcataattttcaagtattttctttgatggagatgagacctgaagttgtgaccaaagcaccgctgcagcaagctccaacacatgtaagccatcaaggggatgttaaaaaacgccagctggagaattccaattataaatgttatgctgccttgtaggaaatgtccattaacaaatatcccaaagggaaagcagcaaccaaatttgccatcaatgatttcaccaaaaaaccagggacccagcactgtatacagggtcaacaacaacacagaatagtagaagatgttttttttgctcaagacatgaagagaaaatgaggtcagatttataaaccctgaaggttctttaagctctgggtatcttcgatatctaaaaataatgagaatggtgagctggctcagcacaatcagcacaaaaaggacccgggccatgatgtagtgatcagtacggagaataaatgatgccaggggatcaaaactgagatgattattctcttgaacagaaaatatgtggtgaacactcttacttcttccagcagaatcctggacgattacttctatgttatgtgtcccactactgtagtttctaggattccacttcagtacgaaaatgggaccagacacatgaacagcctggcctaaatgaactccatcaatcttaactgtgacagaagtaatggaggataaggaaaaggccaagactctaaaatgagagcatatataaaacacatggtttgaggtttgtcattgtttttgcaaaggagaataaccttattgtaacttgcagatatacacgtataggcagaacccc

SEQ ID NO: 441290 - DNA, 969 bp, Homo Sapiens
  misc_feature (27)..(27): n is a, c, g, or t
  misc_feature (80)..(80): n is a, c, g, or t
  misc_feature (100)..(100): n is a, c, g, or t
  misc_feature (106)..(106): n is a, c, g, or t
  misc_feature (163)..(163): n is a, c, g, or t
  misc_feature (303)..(303): n is a, c, g, or t
  misc_feature (403)..(403): n is a, c, g, or t
ttcttaccttttccccaaccttgggtntgccccaggttcttgttcccagttgagggaggagtccttgttttggagggctnttggttgggaggggttgggntttgcntcttgaacacaggttacttttgagccttaacccagggagttgaggttgcacaccagncacatcttggcccttcaccacaacaaaatcaccttgttcagccacttgggggggcggccaggaggagcagggcggtcacaagtaggaaatgtggccatctttcaggccagcaaggttggagacccctccagccccggttngaggcccaccttgccttgcgtttgctttttgagcatgcccttttgcagtgctccatcttacgaaaccaggccaagagcccccagggtcgatcaggacccntgggagggccccagcttccccagctcctcctatggagaccccacagtgcaggcttactggggagaagcaggactgagggggcaggtgtggtcagggaagccctctcctgctgtgtggagggcatggaacccacacacaacatgggacccaacacgctctgaggactgtggcctggagagcctcccaggccctgcacggggtacctggctgcacccacggctccaaagtgccggccccgctggtcaggccatcccgctggaatcttcattggctacagcgttgcagcaggtgacacaaacacatctggacgcctgccccatattcaccaaaacctgaatctcaacccagatatccccatggctgacctcagacatacccactggggtggaggaagtggcccccacctcaggccaaccccagcagcatctcactatgtaccaagctgggctctggaacattttctggggccacctgggctgtggaggcccctgtgcttgctaagtttggggcagggactacacgcagaagcctcatggtgtttcaagaacagcctgagagtggggaag

SEQ ID NO: 441291 - DNA, 1138 bp, Homo Sapiens
ttttttttggggtgataaatcacatttattagttaagacgaccacaggctggacacaacacacatgctaaaaagtggactgtcttttaaaacttccaaggtaaataggtaaatgttttccacagcccaacaatcatttcagtgtttacaaattaaaaggcccacggttaagacattaaacagtaaaatatgtaataaatgctccaacctaccctctcccccgaaagctgcttctaagtttaaaaccatgaatttgactaaccatgccattgaaaaccatccaggttactacaggctgaattagttttcaatgtctaagtcctagaaatatcactccctatcccagccctagcaaattctaactttacatttgacataaggcattaacatcaattaaagcctcagtttaataatcagaatttaaatgaagtctcctgaagacctctcttctggcaaaaaaacaacacgtatcagactctgggaaaacattcagacccacttctagctattactgaaataaatgattagaaagttacgttggtgagccgaagttaaacctaaagctatcccctggatctttctagcaataaacccatgttgaacctaccatgaaaactttcattcactgtgcttttggttacgttgcctcctgattagtcattaattttaatgaggttttttccttgtgttgagtatgaatagaccttacagtttgaggatctctagaattccctgaattattggaaagacattcatgactcccagtgtgactagttaagagccccagggagcctgtgaagactagaatctacaagtaacctgcactaagaacgaaattcagtaaaggagactcaagcttagctcctggccatcttaaagggctaatgtatgtctttcacaggtttgttcaacatttcagtaattcacagtatagccaagagcatgagtataagtctcttgaaaaagccagttatttggagctttttaaattataaactttgaaaaagtcacccacgttctcacactatatagatgactttgtatctattttactattttctcatttaaccatactagcaaataaggaaaaaggctattaaatgactcccctgatgctggaagctgacaaagcttttatg

SEQ ID NO: 441292 - DNA, 1370 bp, Homo Sapiens
  misc_feature (1252)..(1252): n is a, c, g, or t
  misc_feature (1279)..(1279): n is a, c, g, or t
  misc_feature (1304)..(1305): n is a, c, g, or t
  misc_feature (1319)..(1319): n is a, c, g, or t
  misc_feature (1332)..(1332): n is a, c, g, or t
  misc_feature (1336)..(1336): n is a, c, g, or t
  misc_feature (1339)..(1339): n is a, c, g, or t
  misc_feature (1341)..(1341): n is a, c, g, or t
  misc_feature (1344)..(1344): n is a, c, g, or t
  misc_feature (1348)..(1348): n is a, c, g, or t
  misc_feature (1352)..(1352): n is a, c, g, or t
  misc_feature (1356)..(1357): n is a, c, g, or t
  misc_feature (1363)..(1363): n is a, c, g, or t
attgggcgggagggaatgtctcagaccccgtttgggtttcatggggcccacgggtgttgtctcctaggggagaggcaaaccttatgggcgcccagtgttgccaactttatccttacagagggacccggcggcggcccaaaacgaaatgggtttaggaaaaggttccttcgaggggccgtaggcgcgcccgacaagatttagagcctctcggtcccggttattttaataggctcaactcgaagactttaatgtacattatgctcttggaaaaacatctccaaggaaacaagtggaagcaaaagtctcaaccagcagggattctcattcaaaaacatggtgtgagccccagtcttggaaaaggatggcacagggactgtgatcatagtacaacagtttgatgtcagggtggcagggcctgtgtacttgtctagagaggaaccctgccacacagcacgaaggactcccgaggaaccaggagctcattactccggtgactgacagctccacagcgggactgggaagatttaggctgaccaggtcttcttcagcacttggaaggcacaaaacttcgtaaaggccttaagaagcctgctctgggcagaaacctttctggttgttgttgactctccaggtcatcagaaacagtcacggtggctctggtgaggaaggggagggtcccacttctgggtgaggcctcggaatggaacaggtgggaggtgacagcaccagcaaggcctctgaggccagggtccacacccaccttgggagatgacccactgggcctctggacaggagaatgggatttcgatggagaaagctgaagctgaccacctgctagattgaatccagctgcctcccttgaaactctcttcccaatcaagggctcccaaggagctgcaggccaagtcctctgctcctatttagcaagaggcaggcggcaattcgggctgatctccccatcacccttcatttaaccgcaaaaaaagtcaccaaccaacttctcagaccccctgggcaatccagggtttcttgtttcctaagctcctatggaacaagcaatcagttctttcttggacttttggttcaattccttctcattcagaggaaatatggttgccgtgtaggcagatgtctcctaggagcgtgtgtgtgtaagagcctgtgtgaaattcagccaggttagcaccaaggcctggctgatggggaaccacaaatgtgccttcaggatgggtacagctctttggcaatgaanaatatatttatcagtgaaaaaggaatntggctcatcttgcaggactggaganntgctgcctggaggnccaggtgggagantaantgngnagncagnctgngccnntgggangggcccc

SEQ ID NO: 441293 - DNA, 1141 bp, Homo Sapiens
  misc_feature (1030)..(1030): n is a, c, g, or t
  misc_feature (1051)..(1051): n is a, c, g, or t
  misc_feature (1058)..(1060): n is a, c, g, or t
  misc_feature (1081)..(1082): n is a, c, g, or t
  misc_feature (1084)..(1085): n is a, c, g, or t
  misc_feature (1087)..(1089): n is a, c, g, or t
  misc_feature (1093)..(1093): n is a, c, g, or t
  misc_feature (1095)..(1095): n is a, c, g, or t
  misc_feature (1098)..(1098): n is a, c, g, or t
  misc_feature (1100)..(1101): n is a, c, g, or t
  misc_feature (1112)..(1112): n is a, c, g, or t
  misc_feature (1114)..(1114): n is a, c, g, or t
  misc_feature (1120)..(1120): n is a, c, g, or t
  misc_feature (1126)..(1127): n is a, c, g, or t
gcaaaaacaagacattttattgaaataatttaccaaacaatgaagtatgataggtataattcaattaacacaggcattttagaaattaaattatatgttaagacttaagagaattcacagattcataattgtattaaggagttcaatatctacatttagaaaacaaagtattgttctcaatcactgaaatgcttaaatgcttgattcttcaaggaatcttctcggctgtaaagacttgagaagcttgtctcctggcaagtttctcctctagagaaagagcaccctctactgccaatatctggtattgcttatgttttaaatttcccatagatttccgaagttgcttgagactgctagcctctatgtcttgctttaataatttctgcatttctcgagaaggacatccaggatcaagtattagtaagcataatgttcggttttttttctcttcaattccaataacagttcgactgtgaccttgatgctgaagatagataggaggtttagatgtacacactacctttggactcccttctccctctgaagaataatagttcaatatccattcaaataagcgagggtgtgtacccaaaggaccagttgatttgtgaaaatcaacaatatgacactttacccttagggaggtcaggagtatatatacttcacatgctccaatccaggcctttgttccctgtaacctgttattaagttgagaggccccctgaggatcaaaaccttccttccatgcatcttcaatcatagattgaatttttggaatgcaaggaatcaacataccttttaagcaatcgttgtaagcatcattttgtaataatgatgaaagtagcatttggaaatttctgtaaccacaaccccaacctttgtcgcctaaagatgaatgaaagtgatccaccactgaagaaagccacacccgtctcacatctgtggcagcattctgataatacctatgaagtgcttcaataattccggaagtttttgtttttcctcgtcaaaacaagagctaatgattccncatatcagcttttctctatgnaattcannngggggcttcttccctatttanntnntnnncatnanttngnnttgtggtgttngntacccnaaatannaaacatattgttct

SEQ ID NO: 441294 - DNA, 1564 bp, Homo Sapiens
  misc_feature (495)..(495): n is a, c, g, or t
agctcttcaacattgttcttttattatctctaacatatttagattgtactctaacaaaaaatgttattcaaatatagtactttgatgtttgaacaaccttttcttgatcacttcttcgcaataaaaatatgacatatgtagtaaaccttaaaaaatttcgtgtaactttatggctctacgctggaattcttctgaagtgagtaatcatcacaatcatctttagtatataatggatcaaaatgacacgattgcaaatattgataacacacagttataaaaggtgaaattctattgggaacacatctcttagtgagatagatggggctgacccaccaattaattcatttatctggatgaatagttcctactggtagattaacagggttcattttcaattctgttgttttcacagatacaagtgctgagaaatggttttacataaataggtgagaatgctagtagttttgttgtaagcatgtcaatcaatcgtttggntttctttccgagttgcatgccaaaaaccaaatagtgttccttcatcagctgacaattcatggggccaccattaattttgttgaaagcaaagaactggaaaccatctgacttgaaaagaatttgttatcctgttattagagtcattcactttctctagtgacttttaattatactaattactctcagaggcatttaggcagggttgaaaaattcaagatattaatttcaacacatctttagcatcacaatatcacagtaatttaaatatattttagttgtagctatttagctcactttattgtaaataataattatgctaattagcaacgatagtatgtttaaccaattaatcatcagattaactttcggtcagaataatggacttcaatttttaagtcaaagcaatgtacaggcgtcccagtcaccatatttcacttctgaattccaagagagaaatggcgttgcgccttactgacgcaaatatgtacctagataaagtaagacgctttcatttcaggtatgtctaacccacgctatccttgctttgttccagggcactctcgcagggaaaacgccgcctctgactacacttggggtggttaagacgagatcttcaaatgaaaattctcaacgctaccgtccactctctcatacgcttgaattccgaacaccccaatactggccaaaagactccatttctcatgcttggtcttgcttttgaaggtagctctaactcagaggcacgatttttagagcctgggaagtcggctgctgttcagtccttcctagcctcctcaggcgggagccgcggcccactcagtcagttgcggcccactcagtcagttccggccccagccccgactacctgtcgccttgttgggggaaggaaggcagataccgcagcccagtcagggtaagccgctgacccagaggatggaactgcggctctggagattagaaagaggaggacttcgccgcgttcactagcccaggaggaaagccagaaccctaggccggaacccagcgtcaagacgtgggggaagaatgttgatgcaacacagatcccggg

SEQ ID NO: 441295 - DNA, 1034 bp, Homo Sapiens
  misc_feature (7)..(7): n is a, c, g, or t
  misc_feature (23)..(23): n is a, c, g, or t
  misc_feature (27)..(27): n is a, c, g, or t
  misc_feature (29)..(29): n is a, c, g, or t
  misc_feature (37)..(37): n is a, c, g, or t
  misc_feature (47)..(47): n is a, c, g, or t
  misc_feature (53)..(53): n is a, c, g, or t
  misc_feature (60)..(60): n is a, c, g, or t
  misc_feature (67)..(67): n is a, c, g, or t
  misc_feature (80)..(80): n is a, c, g, or t
  misc_feature (88)..(88): n is a, c, g, or t
  misc_feature (94)..(94): n is a, c, g, or t
  misc_feature (105)..(105): n is a, c, g, or t
  misc_feature (111)..(111): n is a, c, g, or t
  misc_feature (121)..(121): n is a, c, g, or t
  misc_feature (153)..(153): n is a, c, g, or t
  misc_feature (1014)..(1014): n is a, c, g, or t
  misc_feature (1016)..(1016): n is a, c, g, or t
  misc_feature (1018)..(1018): n is a, c, g, or t
ggaaagnaatccgaatttggaancttngncctcaccnactgaaatcnaggtcngagcagngaaaatntgagctcaaaggncgagaccncatcantagcagcctanagcacnaagtcccgancccggttgcgtcactcagctcctgggcgtctntatttccgcttcttcctcaggtgcacgtcgtcagactttctgcgcagaaggccgtccggcggcaccttcttcgagtgctcatccgacctgcgccgggcgcctccgtcacactcactcctccgcttggcaggttcctgcccttcccttgttgtcccggttcatcttctgctccttgagcagggagccgggcaggttggaggcgtacttaaagccagggccacgcttttgtttcccggtcttgccggcgtggttacacttcggacactcccagcagtttggaagctcgtcgttgaccacaccctctgactccttaatcttaaggcatccagggtggatgatttcattgcagatggagcactccatgagcatgaggttaaacttgccttcctcctcttccaccgtgtcttccttccccgcctcgccacacacaaggcacacggcggtgtggggcagcactggcgcgatgcactgccgcatgatgcagctctgcttcatgcgcccggggcccccgaacttcttcatgtccttgcagaagtggcactctccgcactcggtccgcaggcaggcctcgcacttgcggcatcgcgtccggcgccgccgagctcctgccgttgtccggttggcggccaacttcaccgcggaggccgggcccagcttccaccttgggccgacccacagcccggttctggtccggctccagattcatagtcgtcgtcctcggcgctcacggacatggccatggctcatggtgggcccaggctcgcgcgcgctgacaatggctggagacggcgcacgccgccgccgcccgcccggagcaggctcggctcgccctggctcgggctcgggctcgggctcgggctncncntgccgcgaggagggag

SEQ ID NO: 441296 - DNA, 1197 bp, Homo Sapiens
  misc_feature (935)..(935): n is a, c, g, or t
  misc_feature (966)..(966): n is a, c, g, or t
  misc_feature (975)..(975): n is a, c, g, or t
  misc_feature (1023)..(1023): n is a, c, g, or t
  misc_feature (1038)..(1038): n is a, c, g, or t
  misc_feature (1079)..(1079): n is a, c, g, or t
  misc_feature (1107)..(1107): n is a, c, g, or t
  misc_feature (1114)..(1114): n is a, c, g, or t
  misc_feature (1133)..(1134): n is a, c, g, or t
  misc_feature (1144)..(1144): n is a, c, g, or t
  misc_feature (1164)..(1164): n is a, c, g, or t
  misc_feature (1171)..(1171): n is a, c, g, or t
ccggaggacgcgctgctgcgagaccagccgcggcgtctttggcagtggtgggcgtgcttgcgggtccaggagggcccctctcccgcgaccgccgaccacgatgagagcgtgaagaccctctcgaaaggaagggctctgctctacacactggtgtctcctgcggaagggcagctgggcacgccttccagaccgagcaaaagttgaaaaatcagtaacccaagatgactaaccaaatcaatatgctgggcaggatgagacatcagtgtctgcctcagacagaagagcacacacaaaacatgacctctcactccaagcccagttacagcagaaagttttcatggagaaatggaatcacacttcaaatgatttcattttgttgggtctgcttcccccaaatcaaactggaatatttctcttgtgccttatcatcctcatattctttctggcctcggtgggtaactcggccatgattcacctcatccacgtggatcctcgtctccacacaccgatgtactttcttctcagccagctctcccttatggacctgatgtacatctccaccaccgtccccaagatggcgtacaacttcctgtccggccagaaaggcatctccttcctgggatgtggtgtgcaaagcttcttcttcctgaccatggcgtgttctgaaggcttactcctgacctccatggcctacgaccgttatttggccatctgccactctctctattatcctatccgcatgagtaaaatgatgtgtgtgaagatgattggaggctcttggacactggggtccatcaactccttggcacacacagtctttgcccttcatattccctactgcaggtctagggctattgaccatttcttctgcgatgtcccagccatgttgctcttgcctgtacagatacttgggtctatgatatatggttttgtangtacagctctctctccttttccctttcattnggcatcacntcttcctgtgggccgagtcctatttgctgtctatcatatgcactcagnggaggggagagaaangccttcaccaccatttcacacatttactgtagtgatctttnactatgcacttttgtctacactatctcngcccagnatctccgctcaccagctgnngacagatctngcagtctctacaccatcctnaccccangcccatccatatctcagctgaggata

SEQ ID NO: 441297 - DNA, 1884 bp, Homo Sapiens
  misc_feature (22)..(22): n is a, c, g, or t
  misc_feature (35)..(35): n is a, c, g, or t
  misc_feature (69)..(69): n is a, c, g, or t
ctggttgggttcccttccttgntgaccaacttaanaactggaaggttccttctctgtccttctaccttncatgaaccccgttaaatgcgcccaattatctgcgaatggatttggatgttctcagtgattgatgccagggcccctgatatggggggccgtggcagggtcagcaggggtggtgggtctccaaggagggagcgagtgcaggcagccatggactctgagatggatgtcaggttatagccaccctctaggataaggataatgcggccactggcaaggcccatcagcaggtgggtgaggtgggcataaccctcaggtgacacctggcagccccccagcggatccccccgtgcagcatcaaagccagctgagaccagcaccagttctgggttaaactcgtaggcaatgggaagcaccagcgatgccaggcagctaggtagtcagcatcacccatgcggggcccgttccatgccacgttgacggtgaagcctgtgcccgcagcccggccgatctggctgctggcaccctcatcccccatggggaagaaggtgccatgatcatagcggtgcagggacacatatagcacactggggtcatcctcaaacatgtgctgagttccattaccgtggtggacatcccaatccacaatcaggatccgtagggcatgcccactgatagtctgggcatggcgagcagccacagccacagagttgaaaaagcaaaaaccgcaagctgcatcctgctctgcgtggtgtcctgggggacgcaccacagcagcaccattcagaacctctcctgagagcacagcctccaccaggcggcaggcagcgccagtggcaagctgtgcacaggcgaaggtactggggcagatatagatggagtcaaagttggaactctcacggtgcagctcccgggttttcattttctctgtggcccggagatgacccacgtactcagcactgtgacaggtgagcagctcagcctctgtggcagggcgcggtgtcagggtgaggcagcgcccggcaaggcccagctcctccagacggcacatgatccgcaagatgcgctggggtacctcagggtggtggctgtcccacaagttgcaagtgattcatcatattttggtcatagaccagccctgtgcgagactgtagcactggccatgtcaggattgggagcacagggggctcccagggtccttcctcctcgctctccttctacattgtcctcctccatgttgtcccttctccacggtctcagttgatctcacaagaacctcccagaagggctccagggcttccagagcacaggaaactgaagcctgggcactccggcagggggcaccaggtgactccagcatggggcaagggtctcccagaagggtgtggagcgaagcactgacgccttcagccagggcgcggaggttgtagccaccctccagagacaggatcagcttgcctcctgccagacccatgagcaggtgggttagctgggcgaaccctgccggagtggcggccatctcacccttggggtccccttgcagggcatcaaatccagcagccaccaggaccagctgaggctggaactcgagggcgactggcagcaggacgtgcaggaaagcagcaatgtagtcagcatcccgcatccccacctggttctcaaggcacattgatggtatatccttggccttggccgaaacctgtggtggaccagttagaggccttcaggtggggccagaacctaccctgctcgtagcggtggatggagaaatagaggacactggggtcctgctcgaaggtgaactgtgttccttgaccgtggtgcacatcccgcacgcgtgggtcgacgatatcccaaaaacttccggaccggtaccagccc

SEQ ID NO: 441298 - DNA, 904 bp, Homo Sapiens
  misc_feature (6)..(6): n is a, c, g, or t
  misc_feature (886)..(886): n is a, c, g, or t
cttttntggtccaaaacacagttgttggtacaaaaatgagtacagtctatttacacattcagttaggtttcagtttactatgtaaacaaaacaaaacaacaagaaaacttattgaccaaacttaaacatgaaagggggtagatttagggtataattaaacaatttctccttttttggtcatcttctaaattttgatagaccaaaactttagacattgataacactgtcaccatcaaaaatgtacttagtctcagattccactgtgaaatagcagaactatgggttttgtaaagtggaatcaagaaattcaggttattattttattattatttttaaaggtttgagtagagggaaaccccttgtgttaagatctgctgtttacagaagaaaaacaaaacctacagaatctacctatttccttaaattttcagtttgattttgtctgtttggccctagtgcacaagctcagtccagaatgatggcctctaataattttgttcaaaaaattttcaacagtgcacagtgtaaccaaaactcagggccttagtaccactgtttccattatttagggtctttgttcttatgtcattcctaggttatggtttcatcatagttacatatgtctttgagtttctgtcattccagttagtgagagacaattttatattctacaggtgattgcatgaaaacatttctaacttttgagaatacaatgcagcagggagactactattttgactaccaggaggataatacgaagagtttgaagcgtgctttttaaccagggtcctcatgaaccaccaactaacattacatagatcaaataattagctatagtctacttattttaaccaaacagcctgttcattaatcccctacaactgcntctctgtaatacccaatg

SEQ ID NO: 441299 - DNA, 538 bp, Homo Sapiens
  misc_feature (406)..(429): n is a, c, g, or t
gtggaaatttttggaccaaattattagaggccatcattctggactgagcttgtgcactaggtccaaacagacaaaatcaaactgaaaatttaaggaaataggtagattctgtaggttttgtttttcttctgtaaacagcagatcttaacacaaggggtttccctctactcaaacctttaaaaataataataaaataataacctgaatttcttgattccactttacaaaacccatagttctgctatttcacagtggaatctgagactaagtacatttttgatggtgacagtgttatcaatgtctaaagttttggtctatcaaaatttagaagatgaccaaaaaaggagaaattgtttaattataccctaaatctaccccctttcatgtttaagtttggtcaataagnnnnnnnnnnnnnnnnnnnnnnnnacatagtaaactgaaacctaactgaatgtgtaaatagactgtactcatttttgtaccaacaactgtgttttggccaataaaaggatgtcaaatgttcaaaccatgttta

SEQ ID NO: 441300 - DNA, 1573 bp, Homo Sapiens
  misc_feature (166)..(166): n is a, c, g, or t
  misc_feature (257)..(257): n is a, c, g, or t
  misc_feature (298)..(298): n is a, c, g, or t
  misc_feature (301)..(301): n is a, c, g, or t
  misc_feature (315)..(315): n is a, c, g, or t
  misc_feature (382)..(382): n is a, c, g, or t
  misc_feature (387)..(387): n is a, c, g, or t
  misc_feature (392)..(392): n is a, c, g, or t
  misc_feature (394)..(394): n is a, c, g, or t
  misc_feature (440)..(440): n is a, c, g, or t
  misc_feature (446)..(446): n is a, c, g, or t
  misc_feature (495)..(495): n is a, c, g, or t
  misc_feature (506)..(506): n is a, c, g, or t
  misc_feature (549)..(549): n is a, c, g, or t
  misc_feature (563)..(563): n is a, c, g, or t
  misc_feature (576)..(576): n is a, c, g, or t
  misc_feature (580)..(580): n is a, c, g, or t
  misc_feature (588)..(588): n is a, c, g, or t
  misc_feature (593)..(594): n is a, c, g, or t
  misc_feature (601)..(601): n is a, c, g, or t
  misc_feature (604)..(604): n is a, c, g, or t
  misc_feature (617)..(617): n is a, c, g, or t
  misc_feature (632)..(632): n is a, c, g, or t
  misc_feature (1145)..(1145): n is a, c, g, or t
  misc_feature (1158)..(1158): n is a, c, g, or t
  misc_feature (1207)..(1207): n is a, c, g, or t
  misc_feature (1218)..(1226): n is a, c, g, or t
  misc_feature (1231)..(1231): n is a, c, g, or t
  misc_feature (1236)..(1236): n is a, c, g, or t
  misc_feature (1334)..(1334): n is a, c, g, or t
  misc_feature (1338)..(1457): n is a, c, g, or t
  misc_feature (1519)..(1519): n is a, c, g, or t
  misc_feature (1558)..(1558): n is a, c, g, or t
  misc_feature (1563)..(1563): n is a, c, g, or t
  misc_feature (1568)..(1568): n is a, c, g, or t
cacaggacagggaggcttcttgatctttccaaaaagacatgtttcattccatgcattacctacttattaattcacatatgtactcaacaaatatttttgctgggcacctactatgtgccaggcactaaatcacatgttaggaaaacagtaaagaataagacacggnacctgacctcagggaacttacagggccccattccctgaaattccattcatcattttcaaaatatgtatttggcggtaatctgggaatagcngtctctgctcacctgcccccatccttctctgcaagctacgngangcaaagtaaaggcntcatcttcttacccttctctttcccctccagtgtacagcagaacagtcaaacactccactgaatctnaaaangcagngnctgcaccccactgtgcatatgacctaaaagtccgcttctgccagtntaagcnattttaacacagtactttcaaatgtaattattaaaagaaaatgattaanatataattgcntcgataactctaacattgggtggtccactttggagaggctgtnattttcttttgggntttgttcgtagcnagcnaattttcnacagnnaccattntcnacttctgtgattnggggagacggaggtnagatgaaaaatacatttaccatttatgtgagggtctaggcagtttatcaagccatgtatcacactgcccattcctaccatcacggtccaagctctgccagttctcacctggtttacggccatggcatcccaactgttctcccacttccaccctgacaccctgcaaactctcctcaatgcagctgccagaaggatcacgccactcctctgctaggaaccttccagtggcaccaattctcacccagagttataggcaaagtggcccaccaagccctgcacaatctgccctgtcacctccctgaccctctttccgcctcctccttccttgctcattccctccactccagccaccctggcctccttggatgccccaaacccttcagcacactcctgcctcaggacctttgcacgtgccgttccctcagtcttacacactcttcctgcaggagtgaagtatggttctcttgttctttcccttcaggttgttgatcaaatgtccccttcccaggggggncttcccaaaaacnccctatgtacaactgcaacccctgtctcccccctgatactgtacgcccncctttcttccnnnnnnnnnctagngaacncttatccccttctactgtactttctaacttatacatctatacatgtattggcccttcctgtcattagaacatggggtctagccaggtgcgatggctcncccnnnnnnnnnnnnnnnnnnnnnnnnnnnnnnnnnnnnnnnnnnnnnnnnnnnnnnnnnnnnnnnnnnnnnnnnnnnnnnnnnnnnnnnnnnnnnnnnnnnnnnnnnnnnnnnnnnnnnnnncatggtggcacgtgcctgtggtcccagctactcaacaggctgaggtgggaggatcacttganccctggaggcaatggctgcagtgagatgagatcgtcccnctgcnctccngcttg

SEQ ID NO: 441301 - DNA, 1296 bp, Homo Sapiens
  misc_feature (9)..(9): n is a, c, g, or t
  misc_feature (12)..(12): n is a, c, g, or t
  misc_feature (17)..(17): n is a, c, g, or t
  misc_feature (39)..(39): n is a, c, g, or t
  misc_feature (105)..(105): n is a, c, g, or t
cagacaganggntcatnccacaaaccccctggggcatcntctccaccacccagtccattccgcatggagaacatgatggacacatctagagcttcgtccccttcnttttccacttcccccacaaagattcctacaggcaggttgctgtcttggtcagcgatgactgtccggtgctgatacattccagggttaagctgccaacgacagaactgccttctccagccacgggtaatagtgcctcccccgatgccacccaagggacaaccataaatctgtcttaggggtacagaattgatcatgtcgatgaaaggtgtcttcttttccacatgggtcttccggtaccaccactgcaggtacctcaagcccatgcctatatgctttatcatgttgcttagggagacgttgttagcttgaaagggtttcctcttctctgtaaactcatgagccagacagatgcgccagccaaagggaggcacctggtagcccatagctttaccctcataggaaaccatcagctgcccagagtcctccggattgcagcagtccgtctcttttgggggtcggctgtcttcgggactcttacagtctgtaacctgcacatccttggtgccgccagtctcttcagggcaataaacttgtggatcctctttggcacagcttatctgctccgaggctgggacgccggttcccatgttccctggatcctgggtccccatgacctcgatggcgccaagtcccgagccctcggatactaagtatctcgccagcctattccagatgcgggcgccggtcgttgttaggtatcgtcccggagggccggtcgttggggaaagcttaaatgagctggtgtttcagtggagccggggagctcttgcttcagtgggggcggcgacagcaaagaagccgccttgggctctccttcggttgtctctgtaggtcctggacgggaagggtcgggcctcgtcgtcattgagccgacgattagctcgcccggccaaagggcgactgggcccgcagagaggggaggaaccgcggggccagcccaccaggcaccgccccgggacgggcccgcaaggcaccgcccccgggacctcggcccggcccctgggccacggcaccgggtcccccaggattgggcgccaggtcccgccggccggctccggggcagcgcccgcgcccaggtgccagcccgtgggaaggtgaccataggcgccgggatgacccgagcatcgcaagaattccggaccggtaccagcttatagtggtgctgggacacggctcagccggctggtgcgt

SEQ ID NO: 441302 - DNA, 3038 bp, Homo Sapiens
ttttttttggctttctgggtcttttatttgtacccatgtgtctgtcacaccatgaatgtacctggggaaatcaactgacctccctgaacatttcacgcagtcagggaacaggtgaggaaagaaataaataagtgattctaatgctgcctaggtcaccctcaacccccatttactggcacaattgggtggagagaagggaaggggtatgattgtcctgatggctcagggttgcaggaggttcagaggggaaggaggaaaggccaggctggaggctgggctgttagcacttccctcccacagttcagacggctcactctgggctcaggtttgccatggcttcctttggtccaaacataggccctgtccttagtcctgtgccctgtttgacttttggccaggaggcctttttgtgctgctgctgttgcagggctagctgcatggcccatatgctcagtggccgcatgtaggccagtgagcggaacactcgctgctggcagtatgcctctggggtctggaaggccagacccaggcgctcccacacggtacggtagcagccttcagctgtctggaagccctcccaagtcaggccctcttggatcatggtagctgccagcccgtagaccacacccacccagacttcatcagactgcacactggatttatcagggacaccatggggctgcatcccattcacagcccccatggcccctcctgcaaaggcctggacgttcagctcaaagatagtttggagagcacggaccacatgttgggtaggaaacacctcagtgtctccttctcctaggccacaggccttcaggaaccactgtccagcacactggtcagacataacactacgagactgaggccgagagctgctgtcatagttgtaatagcggccattccacagcagtctctcataggcttcttggccccggctgaggatagaagaaaacttatcctggatgtcctgtgccccacacagagcagccatctggaccatcacagccacagctgccagccacagccctccacagtaagcactggggcctgtggtcacccatccatcataggtctggtctgcatagcctccattttcaatgagtccatcatggtccttgtcaaacttcatttcagattccatcacagctagacacacaggccacatgtccttcaggaagttttgatcacccgtgaggtaatagtcccgataaacctgcagcacaaacttcaggttcaggtccttccaatcagcagtatcatggattaaatatgcattgacgcggagccatggttcatcatctgggtccccaatatcatgggggatgacgttcctccttttcacaggtgccatcaccccactcatcaggtaccgtcgccgtgtcaggtcctccctgagagtggccagagccatgtcatactgtaggctgagctcaagtttgggccagagcatgatgagggcaaaggaagcataaaagtggacatcatatgtgttgtacatgcggtactcctggccctcaaggtagccaaatcgaccgtagtcccgtagggtggggcggaggtgacacatgtttctgcccagctcctctggtagggagtcctcaagaacttccagccacactgtgcctccatcagccaggaagtatagttcattgaacagcgcagatttgtaccaggcaggcagtgatctgtcatccaataccgggctctgccaagctgagatcctctcttcccactctgcgtatcggcacagtgcatagtggctgagggcaggtgctgcatctccatcctggccaaagaaccttgtataccgcctgtagtggacttggcctttagctccaaacatgatcctgggcatgtcccaagccagtgaaaactccaggcggcactggcctcgaggtcgcaacttgctggaaacacacacagctccagcaatgcctactcctttctgcgtaggggtgctttggccagtgggagagtccagctgtccatcctgaagtagatcctgccacacctgctgccccgtgctgtcagggtcaaaggctgtgatgtgggttaccgtggtagctgccgtgactcgtgcagccacagccatcgtgtaggggtttggaagggttggatgatgcaggagcagcccccggacagtttccccgctacgctccagacagaagggctcattccacaaaccccctggggcatcgtctccaccacccagtccattccgcatggagaacatgatggacacatctagagcttcgtccccttcattttccacatcccacacaaagactcctacaggcaggctgctgtcctggtagtcatggggcaagatgggtgtgatctgacggcaggtgagggtgacattctggccaggaagctgatagacagtccaggctcggggatagagggcatggtagaaagcaaagtacccacacaggccccagttccagctgcggaggacacttgggcgctccagggacaggacttgctggtacacagtctgcccttcccgacgcaggcacactgtgaattggtcagcgatgactgtccggtgctgatacattccagggttaagctgccaacgacagaactggcctctccagccacgggtaatagtgcctcccccgatgccacccaagggacaaccataaatctgtcttaggggtacagaattgatcatgtcgatgaaaggtgtcttcttttccacatgggtcttccggtaccaccactgcaggtacctcaagcccatgcctatatgctttatcatgttgcttagggagacgttgttagcttgaaagggtttcctcttctctgtaaactcatgagccagacagatgcgccagccaaagggaggcacctggtagcccatagctttaccctcataggaaaccatcagctgcccagagtcctccggattgcagcagtccgtctcttttgggggtcggctgtcttcgggactcttacagtctgtaacctgcacatccttcgctgccgccagtcgacgcctggtcgacgatatcccatactcgggcgtaccgctg

SEQ ID NO: 441303 - DNA, 654 bp, Homo Sapiens
agtaagcactgatcagggacatgggtttgggggtcagactggcagctccagctgctcccatgccgtgtaatagacaatgagtcattcttttttgagccctacaatcccttgttgcccagtttttcacctcaggcctcctggaaacccctacccgctaacctggggcctgtggtcacccatccatcataggtttggtttgcatagcctccattttcaatgagtccatcatggtccttgtcaaacttcatttcagattccatcacagcctagagagggaccaagatgttgaagacctaggtaccgaggaaaggcaacaaccagctaggctcttcccagacaccaaccatacccctggcacactggccactgcatgtgcatcccttactagacacacaggccacatgtccttcaggaagttttgatcacccgtgaggtaatagtcccgataaacctgcagcacaaacttcaggttcaggtccttccaatcagcagtatcatggattaaatatgcattgacgcggagccatggttcatcatctgggtccccaatatcatgggggatgacgttcctccttttcacaggtgccatcaccccactcatcaggtaccgtcgccgtgtcaggtcctccatgagagtggccagagccatgtcat

SEQ ID NO: 441304 - DNA, 713 bp, Homo Sapiens
tgtataccgcctgtagtggacttggccggtgagctccagacatgatcctgggcatgtcccaagccagtgaaaactgccaggcggcactggcctcgaggtcgcaacttgctggaaacacacacagctccagcaatgccgactccgtgtctgcgtaggggtgctttggcctgagagaatcacaagagaattcaggacaggagcccctgtcagccccagggatagggatccctaacatggaaacaaggcctacttattaccaggcctcccacccctggtcccaagacagggacaacctctcttccccccatctcccagtcagaccccccatcaccagtgggagagtccagctgtccatcctgaagtagatcctgccacacctgctgccccgtgctgtcagggtcaaaggctgtgatgtgggttaccgtggtagctgccgtgactcgtgcagccacagccatcgtgtaggggtttggaagggttggatgatgcaggagcagcccccggacactttccccgctacgctccagacagaagggctcattccacaaaccccctggggcatcgtctccaccacccagtccattccgcatggagaacatgatggacacatctagagcttcgtccccttcattttccacatcccacacaaagactcctacaggcaggctgctgtcctggtagtcatggggcaagatgggtgtgatctgacggca

SEQ ID NO: 441305 - DNA, 173 bp, Homo Sapiens
aggctcggtacccctctcgtccacactggtcagacataacactacgagactgaggccgagagctgctgtcatagttgtaatagcggcctggagtcgaggaagagaaaaataaggctcctggtgtcctctcagctgccttaagactacttagctccccgaactcaccattccaa

SEQ ID NO: 441306 - DNA, 1524 bp, Homo Sapiens
  misc_feature (1522)..(1522): n is a, c, g, or t
cccaaccaaagtttttttcaaaacaatggtttttgaagcgcctctaaaaaagggggcccccaaaccggggaaggttggggccgggcctttaaccacccctttccccccagggagccttcccgggtgatgaaccagtttttgcaggtgcagcagcagcagctggattagccggtcacaagcctcacgcacggtgttttgcacagccaggccctgggtggtaatgaccgaagcaggcatagctgtgtccaccaggaactgcagcaagcggtaggcacctgccccagaggcctggctcaccaggtgcacagccaggttcaacatgttgtccagctcctctcgggggaatccttgaaggtgttgctgcagctggctcagcacagctgggggcttgaggcaatccacaagctctccagagacagttgcccagcaaagctggtgacatgactgccagctgcagtaggaacggaaccgtggcctgaagggaggggtccccactgcggcctccagatcccccttgccaggctatcatggaacattcgcaggagctcccgtcggatgctatctccgtggcgggaggccaggtgacctaggatgcctacaactgaggcaatcttgggcacccgtttctccgcaggaatggcaggagatccagggaaggggtctgtagagggggtctgagaagagcttccaccactactgccagctccacctccagccccaccatggacacaaaagtccttaaggccacaggagagaacccgggaaatgatggtgccaggaaaagaggagccaatatgtgccacaacccagtcaaagtgtggagaatgctgaacagaggtatccagcaaggcatccacacacgcatctgggcagctaccaatgagagccgagaggcactgcacatagatgtccattaatgtacgcgtggccctacaacccatccacagctgtagcagttcattaagagcgccagtagcgtggggaacacgctggtgctggcctgagtacgtgctgctcagttgccccatgaggtcaatggaccatgctctaatcacaggtgcccaggcctttgggttggcccggataaactcagacagcacgtgttgcacttcctgaaccacatcctgtagatcaggtccaccagcagggacatgagagggtggaggtggacggaggtgaggtggaccagccacaggggtttcatccagggcagccaggtgggcccggacactctcatcaaagacacctctcaagtggtcaagcacagcagcccgagcaggtggcaaagaacggagcaggagaagaccacagcgagcatgttcccgggctgagagttggtggcccagaatggggtctacgccagtcagaaaagccttgatttcctgggacagctcctgagcactgagaggcgcgggaccgtgggtggccggggcaggcccaggtggccctggggccccgggagggtcgcacagcgcggacatcccggagcccgagccgagcccgaggcgcgagcggcggagcnca

SEQ ID NO: 441307 - DNA, 1721 bp, Homo Sapiens
  misc_feature (382)..(394): n is a, c, g, or t
agactttaaaaaacatgcactatacaatcttttatttccagtttaaaaacaaaatcttaaattactaggagtatatttacaagattaattacattttaagccagcacaccatggatgtacatgaagggccactcggtgtccctcgctgggacaggttgtgtgacctgcccaaggggctccggctcatttgccaaagtcaagacgacgaccaggtcttctgactgctcagcccaaccaataatgaaaaaagtatcagagatgtgtcatatccattttgctaacaagcaattacatgcctttttagtgtttaagagaagccttaattttcctgggatatctccgtaaaatcattctggaatttgattttgaaaattctttaagnnnnnnnnnnnnngcttgtcacccccatgagacctgctgtctctcatgtctgcagggacaggccttttagaggcagcaaaagggaatactggtctctggaaagtccagacagaactctagcagctccgatggcttgatctcttccagggagccagtgggctaggcccatgctttggttcaaagcgtttggagaacatcttcttgctccttttccggaaacgagataatggacacagagtcccagacgtcatcctttggtgagctgtccttgtccaaggcctctaagatgggctgagttgggtcttttaaatactcttctatctgtaatgggatgcttggtggagtgtgaaaccagtatttaatcaggcctctatatttcaggaccaggaagaaacaggctcctgccagcaccgacagcaacgaaaatgttcccacggagatcaggatgacttgctgaagctcagtggaggcatctgccattgtttcgtagcaagatatgttgcttaaatgcccgactctaaagatgttacttttgttccaaagcagttgtgcctggacttgtaaacagtacactctggagggttttaagttatccaatgaaatggagttgcttctgaaagggcctttgacctgttggattcctcctttttcccagtaatggacataataacaaaaaaaggccgtggaggtatcagcgatgtcaaagggagaggagaacctgatgatgagggagccttctcctggggtcacctcaatgttttctggaggcccgacagtcacattccgatagtgttgaaaccaaggcattgtcacccaggcagaatggagtgctcccagctcagctcgaaggcgtagagtgacattgaaatccattgggaagcctgctgagggactggcggcagtgaagtcacactctgttgctgtgatctgtgtacaattcacccctatggacatgatgtcggccgtgaaccatttactgtcggtgtatttaaactgcacttggtagacaacaggcctcgtgctattgctcagggccactggctcccaactcaggacctgctctgcgttgtacaggcgaatcttcgggtgctgaggagcgggcagctgggaaagagggtctggcggggccgcggcggcggcggcgaagactccgagcagcagcagcagcgaccacagcagcgtcggtcgcatggccccgggcgctcggcggcggctcaggtcgcggccggggccccgctcggggtccgcggagccgctcacgtcgccgcccaaaccgccatggcgagcgcagggcgcgcagggcccgcctcttcccgagcggcagcggggcgtcccccgct

SEQ ID NO: 441308 - DNA, 360 bp, Homo Sapiens
  misc_feature (177)..(177): n is a, c, g, or t
  misc_feature (184)..(184): n is a, c, g, or t
  misc_feature (212)..(212): n is a, c, g, or t
  misc_feature (296)..(296): n is a, c, g, or t
ttttttttaaaaaacatgcactatacaatcttttatttccagtttaaaaacaaaatcttaaattactaggagtatatttacaagattaattacattttaagccagcacaccatggatgtacatgaagggccactcggtgtccctcgctgggacaggttgtgtgacctgcccaagggnttccggnctcatttgccaaagtcaaggacgtacgnaccagggtcttctggactggctcagcccaaccaataatggaaaaaagtattcaggggatgtgtcatatccattttggctaacanggcaattacatggcctttttaggtgtttaaggaggaggccttaattttccggggggatatctcc

SEQ ID NO: 441309 - DNA, 1483 bp, Homo Sapiens
tttttttaatatgttaagcatatagatttattaaaaataatgctaatataatcctgggcacatggattccaagagagattttgcagcagatttcattatagttacttaacagctaaataataagggtgtatttaacttacttacagagtcactaaataatggaggggaaaggaaagagtagggctaatccagtagagactgaagctggtatcaaccttccctaagcatctgtctggtccgcagcctggggcaaagcttgtctctaaagggttaatgaggccccaaagtgatttttgcactgagctcctcctgcacctaccaaggtgccaaaggcatgagattcagaagagagcagaaccagtttattaaactgttcaaattggtaaaaatgattaaaagctaaagatttccataaacactattccaaaatgttaattttaaaaatgtgactagcaatgtatgcattccctttatgtcccctccctccctatctcttaaaataaatttgaacacccagtgtaaaaaacacttgagggagaaccagaagtcagccatttgagaagagagtggagagggagcagacggcggggagcagatgccggccccgctcgggctgctgacgcaggcttcagtggcactaaatcccccagtaaggcatcaggtgtcgggactccttctcatagacgtcgggaactatgccataaggtgtctgtaccattttaactgtcgacttcccaaagagctggcgctcgtagtctatcagttgcctccagaagcctacgttgggcctgatgacaggtcgccgggctttcacccagttgtacgcctccagcaggcacacgttgtggaatttcatcaggtacgcgatacacagcgtggctgagcggctcacccctgcagcacagtgcaccaaggtggccccgtgcttcctgctcacactgtggatcttgtcagccacggtgtcaaagtacagtccaatgggggcatgcggcatgtcagccagaggcactttaacatactcaaattggggccagttgaaattagggatctcaatggtagcattaacaatgcaggtgatgccacgagcctggaggaggtgccgattggaggccacactgcctctgcccaggaatagagaggaggtgatttgagcaatgcctcctatgtctccctcggaaatcatccgaggggccatgagagtccttggtagcgtgctgtgacctctggagctcatgaagacgccagcagtcacacttgcatcgttggcggcaagaccagagtgttttattttcctccaccaaggaatccaaaattagagtctccttcttcctcaagagtccagtgtgcgctgcctgggtccggatccagaaagtcctaagtgagcagtgctggtgacagtggatacaaatcaaatcggcgcggcgcggcgcgggttgcggttagggctccgtcctcctgcgcggcatcccgggaattccggacc

SEQ ID NO: 441310 - DNA, 467 bp, Homo Sapiens
  misc_feature (27)..(27): n is a, c, g, or t
cactttaacatactccaaatggggccnatttgaaaattagggatctcaatggttaccattaaacaatgccagttgaatgcccacgaaccctggaagaaggtgccggattggaggcccacactgcctctgccccaggaatagagaggaggtgatttgaagcaatgcctcctatgtctccctcggaaatcatccgaggggccatgagagtccttggtagcgtgctgtgacctctggagctcatgaagacgccagcagtcacacttgcatcgttggcggcaagaccagagtgttttattttcctccaccaaggaatccaaaattagagtctccttcttcctcaagagtccagtgtcgctgcctgggtctggatccagaaagtcctaagtgagcagtgctggtgacagtggatacaaatcaaattcggccggccggcgcgggttgcggttagggctccgtcctcctgcgcg

SEQ ID NO: 441311 - DNA, 1789 bp, Homo Sapiens
  misc_feature (531)..(531): n is a, c, g, or t
ttactaaccaaaatgtcttatagcagtttatttgcacttaaaaaaagtcagattagggcagttgatatgcaaggggaaaatgaggcattgaggctggacaacagtccatgatatctaagtttcaccttgggaaaacagagacactgcctgaaagcgcagggcacttctggcgcacccacattgtctcctgctccagaggatatggcaagggtgggtggagcgggaagaaatcgcgtgtggggaaaggaggaaaggcgttctctagccttatgcaacgtacaccctttggactcagaactctcagtggactaacgtgggtcacctctgtgtagctctgctctgtgctggagagtcaaacctgggattccggcagctctctggaactcatcacagcccgcaaggttgaaaggcccaggacaacacaccatgatcccttcccctccctattctaaagggagagaaacatgactttatgggccaactgtgaaagggacaagtgaggctgacctgacaaagtcaaacgcactgggngagggggaaggaggaacggctgaactttggacagctgagagaaaagcagcattgtttccatagcagaacactcagcatcactggtggggactttctaaggtcagacccttttgactgggaaaagcaacacacaaggcaacatggtttttccctttcaaacactgtggcttacttgtttactcaactaagaaagaaaaagcaaccttattatagagattagcaagagatgaagaaaattatagggaggctgccctggcccaaaggtctgctaatggcttctgcagggaggatgaggatggtgctaggttaactgcttgtctccactacagaccagagaacgtccatgcgatgcctcttatcagtgaggtagatgatcatcctcttgccagaggtatcgagtgccagcccacagcacagcagaacaggagaacgagctgccgggctgcaggcacgagctgcccctcagggctgcatccgacacacggcaaccccaccagaactaataggctgctccaagaaaatggaacccaagggagagggactcatgccctgagacctgcaccaccccggcttgccctgccttgagatgcagaatttgaaagcagctgtcaccatcactcatgtccacagtggagcttgcttctgtcctgtcagacatacctcctgccaccacgagcagctgagtgaggggtgggaagggaagaagagcccagagtgaatattaggaggaggaggtggaagggcaaggaaggctgcagagcaaaaaagtttaaagtaggtcaagttcaaaattatatcaaggagataagagatgggaggcaaaggctccagaagaggaacagaggcggaaggaagagaagctccaaggtgacgcccactctaggacaagatgatggggaggaggtgaggctgccctggtggcatcacttcccatgtaagtcactcagctccatgtcatcctttcggcgcttctgggtgaagagggaggcgacagggtagagcttggccttggcctggaagcggtatcccgcgatgtcaatctcatactctccccggttgatgaaatctgctgtcaccacttgctcttcccccgtgtcctcagaaaaattgtgcacaaagcccaggcaaacgtggcgctccaggctgtagctgtaggcactgctggtggtcttgccaacatactgcccattccggtaaatgggctctccccaccaaggccaaaggtctaggtctgaatcatggtcgtccaggatgaaca

SEQ ID NO: 441312 - DNA, 1526 bp, Homo Sapiens
  misc_feature (21)..(21): n is a, c, g, or t
  misc_feature (123)..(123): n is a, c, g, or t
  misc_feature (132)..(132): n is a, c, g, or t
  misc_feature (135)..(135): n is a, c, g, or t
  misc_feature (139)..(140): n is a, c, g, or t
  misc_feature (143)..(144): n is a, c, g, or t
  misc_feature (242)..(242): n is a, c, g, or t
  misc_feature (455)..(455): n is a, c, g, or t
attattcccatagggaagggnggacactggggatcactaaactacagtagtggctgggaaataaattaaaacagaaatgcatcaaaacaaaagggagattggggacacggagggcggctgggnggctgcggnggngggnnggnncgccaggcaggcaggctctccgaggagaaggccaagtggtcccaggcctcagccagcccattgcttgtccctctgtcaatggcggccccgggcttcangccctgtggggccatgactccaggcctccccaaagcctggccagggagtggccagagtccagcttgggcccacgcaggggcctggccagcagcaagcagcactctgccctcgtgggtttgtggttgcccaccctagtcattggaggtgacatcgatgtcctccccattggcctgcttcgtggcaatgcgccaccggttgatgtgatgggagcncttcttcttctgctcggactcaggcccttcctcctccagcttctgccgtttgtactttgtcctccggttctggaaccacaccttcacctgcgtctcggagaggctgagactgccggccagctgcttccgctcggcgcccaccacgtaggtgtcttctcgaaggcgcgctccagccgcagcagctgcgagggcgagaaggccgtgcggatccgcttgggcttgcgtgcgaaggggccgtgcagaagcagcccgtcctggggcacgtcgctggcatcggcctcctgggccgcggtctgaagctgcgaccttgttcctgaggtttcgcgttttctggatgtcacgggggacagctctggaaaggggacgctcactcccttcacaaggggccaggcggggcactgcgcgggagaagccgccggagcggtcccactgccaccctccagctgttcgcggggctggaagcagctccagtgcccagacacggtgccgcgaccggcttggaccaggacggcgggcctcggcactgggagatccaccccctcgccttctctgaggctctgggggctcaagtgtcggcgggccggaccaggtcagggcctcggagacactgtggcttaaattgaagctggccaagtagcccgagcccatctcaagagaacacgccagccgtcaggacacgcagaagcagcctgacctccctcgacctgtcaccttccacccgcgaccgcggaaccgcggacgactctgctccggccagtttttccgtacggcggacgaattccccgggggcagttctcacgacaggctgtgagagccgggactccccaaactttcccaccccaccttcgaggccgcagaaaggcgccgctccgaggcctaggagggcgcgggcggcggtggggaggctgggacctggaccttgccggcgcactgcggagagggagccgcagagagttccgcttcctcgccgctgcacggggtccattctagcggcctgagcgctgcctgggcgcgcagatctgggttgggcctcctgacgccccaaggccacggggtccatcccgggaattc

SEQ ID NO: 441313 - DNA, 1448 bp, Homo Sapiens
ttttttcctgagacagcagagcataagtccttttaattatgtgtttgaaaaatgtcacaagtcaaaaaaggaacacaaggcaggctccggctccctccacccccgtgaggagcccttgtccatttcagccttgcactcagaaagaccccgggggtcttgtagttccacgtgcttcatgtttcgtggtatctgtcagagccttaaaacaggcccacccactactgtgaaatttcaaggaaataactgattcagttaaataacagtcccaaggtagacctggtctcacaggtgaccacccgcttaaatccagagccttcttttctgtccaaagccactgaaatttgatctcctccttcacacattcccaggtccccaatatgccacccaccttctgacaggtggctacaggtctacactaatggaagctctgctaaaaacatctccacccaaccctcctgccaacgaggtcagctggcaggcatctgctaagcccctaaactggtcagcgcaggttatgcgcccattccgagacccaaacaatactccaggacttcgcacctcctcctcgagaggcaacggagagaactgctcttacttcaatctgacagtcaagggagagcacacaaataaaacgtcccatctggaagaaatcagggaagctggggaaatgaggctgttcatcaacttttaagagctcaaacttggctgtgtaactttcagacctagcttatggttggggaccacctgaactggcccccagggttgcctctctctcaacacaaggtgcatactgaacccttctgcagtgtagtacacgttgctgccgcaagtgcaaaggccacgagggaaagaccttttaaccagagcaaggggaatctgaaatgccagaagggggaaggtcggttcgcctgaagacctcttctggcctgtgtggaaaggacggccccttgtcaaccctggggaagcactgcagatgtgaagcggtttggccactcttgggcactgactgagggtgatgaacgaggaagggagcaagagctgaaggcgaggagagcgctaggaggcagggaacctggagccaggggctgcctggcagggctctaggctgaagcccccaaagcgtagttcccttcactggctcaaacataaaaggaaccaaactgtttggggaaaaaggccaccctctggcctttcaaaacattctctcacaattctatgccatatgagtgcaggcttaattcgtccagtgaattctatgcaaatgtttcaagaagctgctgttaacaggaacaatgtgtacctggtacacactgatcctatgggggtgggaggagagagagggaaggaagcaaagaggagccgcctcccttcctactgtgctcttcagatctgtcagtggggccgggcgcagcagatggccccctccccagaggtcagggagagtcctc

SEQ ID NO: 441314 - DNA, 482 bp, Homo Sapiens
  misc_feature (389)..(389): n is a, c, g, or t
  misc_feature (427)..(427): n is a, c, g, or t
  misc_feature (447)..(447): n is a, c, g, or t
  misc_feature (455)..(455): n is a, c, g, or t
gacagcagagcataagtccttttaattatgtgtttgaaaaatgtcacaagtcaaaaaaggaacacaaggcaggctccggctccctccacccccgtgagagcccttgtccatttcagccttgcactcagaaagaccccgggggtcttgtagttccacgtgcttcatgtttcgtgggtatctgtcagagccttaaaacaggcccacccactgctgtgaaatttcaaggaaataactgattcagttaaataacagtcccaaggtagacctgggtctcacaggtgaccacccgttttaaatccagaggccttcttttctgtccaaaggccactgaaatttgatctcctccttcacacattcccagggtccccaattatggccacccacctttntggacagggtgggcttacagggttttacattaatgggnaggtttggttaaaaaacatnttccaccnaacctttttgccaaagaggttagttgg

SEQ ID NO: 441315 - DNA, 1099 bp, Homo Sapiens
  misc_feature (5)..(5): n is a, c, g, or t
  misc_feature (7)..(7): n is a, c, g, or t
  misc_feature (9)..(9): n is a, c, g, or t
  misc_feature (20)..(20): n is a, c, g, or t
  misc_feature (24)..(24): n is a, c, g, or t
  misc_feature (33)..(33): n is a, c, g, or t
  misc_feature (35)..(35): n is a, c, g, or t
  misc_feature (40)..(40): n is a, c, g, or t
  misc_feature (42)..(42): n is a, c, g, or t
  misc_feature (50)..(50): n is a, c, g, or t
  misc_feature (52)..(52): n is a, c, g, or t
  misc_feature (60)..(60): n is a, c, g, or t
  misc_feature (68)..(68): n is a, c, g, or t
  misc_feature (70)..(71): n is a, c, g, or t
  misc_feature (94)..(94): n is a, c, g, or t
  misc_feature (102)..(103): n is a, c, g, or t
  misc_feature (110)..(110): n is a, c, g, or t
  misc_feature (114)..(114): n is a, c, g, or t
  misc_feature (148)..(148): n is a, c, g, or t
  misc_feature (169)..(169): n is a, c, g, or t
  misc_feature (293)..(293): n is a, c, g, or t
tgggngnanataggggaaanaccngttaaaaantnaaaananagatttgnanattttgtntagctcanannatctccctttcccaccaggcacnactccaannataccanatgntccacttgattccttttcgtagaaccagtcactntgttcatcatcaccttgtctnccctcatcattggtaaacaatccagcatcagtgctgctgagactgctggaatcactttcactcatgagctcatctgagactttttgctcttcacattccattttgtccttattggtctggttcntttcctcactttctaaaactactccttcatcttggatttttggtccttgtctgattattttcaactttctttttttgactttgttcttggtaaattcttgatactggtaggctctatcactgtccatgtcctgatctctacaaccctcaggtggctgggtcattgtccgtttgttagagatgtcctgtgggagatctactgccatgcgttttacctttctcctcctgcgcagagttctattcccaacattgtccacagcaaaatcagactcatgccatagaggtcttttccctcgaacattattatttaagtttgatgacggcctgcgctttgctatctaacatttggtcatcagagtcactgtgatcttttttattattattgtgattctctctatagtccttgcttggttcttctaaactagaatcagagccttcacttaagcagtgaccagtctcccacgggtgatgcacattatatcgatcctccgttttctccctctccttttccttgcctggcgtttcagagggcaagatatacttcgagaatggtctcctgtttcagctaaatccacctcgagcttgctctgagctctcttccaatgctgagacaaggtcatgaaccagctcctccatggttctgctgaaatgccagctgttcccggctgctggagctccgatcggttggcgcccggcggccccgaacattaacgacacccgggagcctggcctcgaagctcaggcccgtgaacagatctccaactacaacagcaccggcgacttccaaagagcagttcagcattttga

SEQ ID NO: 441316 - DNA, 736 bp, Homo Sapiens
agaattcaggtagtgttttggtttattatcttagtgttgtcacagtgatagaaacccccagagtgggaagaagagctcctgcgaggacctacattttgccattcccctctgccctggggctcagagccttgaagcctttgcttggcccttgcatgttaggatatggccaagaatcagaaactgatgcgtttttccagcactacctgtgtgctgcactcatggaaggtgggaagctatacacaggtatccaacttggttataagacaccagttcccacagggctggatttctcagctgtctggtaaaccagtggcacttcactgccccagggtggctggctccctttctgaatttctgtctcaatgtgatataattgccaccattcaggatggctacccacatctggtatgaacaccatgacttctgtaagccaacggggcttcctcctcagaacagtgcccgtgcaatcttcctccctgtggccttgatcctgggaaaggagccccctcctccctcactcggaggagttcctgaggcagacgggccactggtgacgcccggtgtagcagtagaggacctttcgccgctgccgcaggaggaaatcgtgtgaagctccatcccatggcgtagatacattagccgaggcttggatagtcagctctcgctcccctggtagcagctgtaccagctcatactctggaggcacttgagagtcaccgattggtttctttaggac

SEQ ID NO: 441317 - DNA, 3744 bp, Homo Sapiens
  misc_feature (599)..(705): n is a, c, g, or t
  misc_feature (3666)..(3702): n is a, c, g, or t
atcctccccctcttcctcccgccaccagtcctaccctccaaacctgctcaaatccatcaccacctctctacatctctttcaatccaccactcctccagcttcgaatcataatcattccaccctcatactcctcccctcccacttctatactcctctccatttactctaccctcccctctcctcacaccctctcacccctctgtgtttgtcgtttcccgcgccgcgctcgcgggtgtggcgggtgtttctcggtgtgtcgctcgccctctgtgacttctctgctcgctctgctcctcccctccgcggtcgctccgtgtgcgctctctctcctctctccctcccgccgcaacactcccttcctcgcatgtgcgcttgcgcgttcgtacgcgcctccgctctccttcgttttgtgctctgttctctgtgcgctcctcgcgtgcgcgtctctctcgctctctctttccgttctaataatagactccgctcccctgtggtggggtgcgctccgtctctgcttcctcaatgcgtgctgggtcggcgtcgggtgtcgcgcgccgccccgtggggaggagagttgttcgccgccgcccccccccccnnnnnnnnnnnnnnnnnnnnnnnnnnnnnnnnnnnnnnnnnnnnnnnnnnnnnnnnnnnnnnnnnnnnnnnnnnnnnnnnnnnnnnnnnnnnnnnnnnnnnnnnnnncaggtagtgttttggtttattatcttagtgttgtcacagtgatagaaacccccagagtgggaagaagagctcctgcgaggacctacattttgccattcccctctgccctggggctcagagccttgaagcctttgcttggcccttgcatgttaggatatggccaagaatcagaaactgatgcgtttttccagcactacctgtgtgctgcactcatggaaggtgggaagctatacacaggtatccaacttggttataagacaccagttcccacagggctggatttctcagctgtctggtaaaccagtggcacttcactgccccagggtggctggctccctttctgaatttctgtctcaatgtgatataattgccaccattcaggatggctacccacatctggtatgaacaccatgacttctgtaagccaacggggcttcctcctcagaacagtgcccgtgcaatcttcctccctgtggccttgatcctgggaaaggagccccctcctccctcactcggaggagttcctgaggcagacgggccactggtgacgccaggtgtagcagtagaggaccttcgccgctgccgcaggaggaaatcgtgtgaagctccatccatggcgtagaatacgttagccgaggctgggatagtcagctctcgctcccctggtagcagctgtaccagctcatactctgaagccactgcagagtcacgattgtttttcttaaggacacgactgatgacacttggagccttgtcctggcttgtcaccaaaatgctcttatagacactgccatcttcccccaactccatctggactcggatgatacggcaatcagaggcccctggcccagatccctctcccccatatccagtccccccggaggcctcttctgcacccccactcagcggggagccacaggaggctgagcggcggtgacctcgagaaggcctaggggaggaggctggtggggagaggtggctggggtcagctggactgtgcagggatggactgctttccaaggcagagtctagtgacgagacagatggccacttcatgtgctgggccagccgagtcagcagaggagcaggagttgtaggcgcctcatctcccccagtactgggccggtcacaggacacaagcggggtagggaccccaacagagcccaaaacctctgtccactgcgagatgaccaatgttggccgaagcacccgtggggcaggagggtcactggaaccaggtggctccacctcacaggatacacgatggctctgagcctctgtcagtggccggagcccctgtagccacctctggatatcatggtcaggttggaggttatagccacgacattcattctggagccgtcgcaactcagaaaggactgcaaactccttcctccgcttgtcaaaattgatgtatccattctccaactcatccttggaggctgcatccagcatcacaaggtccttcaggaaggtgccaaggtatgggaccacacccccaccccgggagccagacctcggggccttcttggagtgtggctccagaggagactgcagcttcacctcctgcacgagcagctcccgactctgggaataattatcctcctcggagaaaatctggcagaggctggaaaagactctgaggctgtccctggttgcttccccccaggctgcccgaagcctgtggatggggctggactgcagggctgacaccacggcataaactgaagagaagtttcggagcagccggcactcctctgccacgcggatccacttctccaggagccgggccctctgtgggggacggagtggccgtatggtcacctccccaggtccctctccagtggaagtagcccccaggacagaactaaccactgcccctgccaccttgttaaactgtgtgacagtagctcggacagatgggcagaggtgagaatgtcctggccggtctctgtgaccccacaggcctcccaggcactgagaggggatcaaattgagaaaaagttccgcatctagcagggtcagctgttcggccaagtggtcagcgaggaacaccaggacatccgtggggtcagcagggggatcgccggggagggccaggggcttaggaaggtcgggggcctgggggtccacccgggaccggagattgcggatgaggtcagcgctgccccccccaacacccttccctgctgcataccctgtctgaagtaagaagctctcaagccggtcaagctgacccttggcctcagagccaaaatcctcagggtgagaggccagccaggttgacagtacagagatggctacctctgttgtcctctctagttcgtcggtaggatgagattcaagggcttccagcctgtcagccataagccctagcaaggcaggcgtggaggtgaaggcccggtgggtagccaggaaggctgacatgaagctcacatcagtccctgatgtccgggtatccagtaggtgtctgaccagggcctccagagtgccagctcggagccgtcgggaggaacgtgggggaggcatagggaccaagggatcaagaggtcgatattggcggcttgtgacggtaaacacggcaccatcctcctcctcatcccagacggacacaggggcctcttcttcttcctcctcttcttcctcctgccccccgcccacgaccaggccacctgggcccccaccctcttcggggtcccggcttcggaagctgctcagtacgactcccccgggggggctcgtgtccaaaagcagccgcaggggccgcgggagcatggccgagtgaaggaatcagcggggtcgggccatgggggcgcctgctcgggaggggtgggggcagcgtgggtcctgagccgctgttgccgtcggtctccggccccggaccgagtcccctccccggcttttccgtacccccttgaacccgctctcgacgaattcgagctcggccgatttggcctgatnnnnnnnnnnnnnnnnnnnnnnnnnnnnnnnnnnnnnccgccccgcgtacgccagggccatatatcttctcgggctggc

SEQ ID NO: 441318 - DNA, 655 bp, Homo Sapiens
agaaaatctggcagaggctggaaaagactctgaggctgtccctggttgcttccccccaggctgcccgaagcctgtggatggggctggactgcagggctgacaccacggcataaactgaagagaagtttcggagcagccggcactcctctgccacgcggatccacttctccaggagccgggccctctgtgggggacggagtggccgtatggtcacctccccaggtccctctccagtggaagtagcccccaggacagaactaaccactgcccctgccaccttgttaaactgtgtgacagtagctcggacagatgggcagaggtgagaatgtcctggccggtctctgtgaccccacaggcctcccaggcactgagaggggatcaaattgagaaaaagttcctgcagggtagaggtcagaggttaaagttcatagtcaagtgaggtcagccttccaatatcagggatctgaggatctcaggtggccaaggaaccagaggggcacagggtttgaagggtaacgaccaaagggaaaaggggagaatcaaaatggtaggtggaggaggctaggagctggatcaggaaggggtggaagcaaggaaaggatctggagtcaaggagaggttagtaaggggtcagggggcataggggccagtagtg

SEQ ID NO: 441319 - DNA, 896 bp, Homo Sapiens
cctggttgtgatgtttgtccgtctgttgtggtcgtttgcttggtgtgtggtcgcgccggtcgtgcttggttggcccgctggcgttttagtgcgttgccttggagggtgtccagggtgttgttcgtcaggcttctgtggcaggctgtgctgtcatcgttcgtagatagtagtgatgttcacctggcggatcctatgctgttcctcagttgacataggacatcttcttggaaataggcatcaatttcagtacctcaatgtgattaagccatctatgacagagccccacaggccgacataatgctgaatggggaaaagttgaaagcattccctctgagaactgggacgacataaggatgcccactctctccactcctcttcagcacagtactagaagaagtcctggaaaatcctaaagactcctccagaaagctcctagaactgataaaagaattcagcgaagtttctggatacgaaattaatgtatgcgtatcagtagctcttctttacaccaacagcgaccaagctgagaatcaaatcaagaactcaaccccttttacaatagctttttgtcaaaggccacatgcgcaggaataaaatccgcaggtggggcttgtttaggttggccataagttaagactggtgccttactggccaactcatccagctcagcctgggacagctggttgaactggagccggtctccgcctatcccaactgttggacgtcgaacaattgcatagccgttcctgtagctcagcgtctgacttctgtggaaggctgttttcgtagagtccttaaaggacgtgcccggaagaaagggcaagccatgcacgggattggacaccattgcagccggtaccaccgccgccacctaggtcctgcttcgtcctctccgg

SEQ ID NO: 441320 - DNA, 1291 bp, Homo Sapiens
  misc_feature (39)..(39): n is a, c, g, or t
aaaatccagtgaatcccaaaccttcccctttggtaaatncccgtccgagtaaaaagggatccacaatccataaatggaagaaagttctcccaaggaatagtgagtgacttccccaacaatgaagtctttaagcagtaatacccattcccaacacttccttggtccagagatttctagcacacactgagggaagttctttgcattttccaccaaaactttgggcacacgctggcggttcattaggagtgggaaaggatctctcccatcattccgttcgtggacctctcgaatttccaccgtatcatccataagatagtaatgaatgatgtaggtccgacattcaccatacatgctgtctgtatcatcccagattgcatagaatcgaaggacctgtttgtcaaaggtgagaaattgcttgagttgatcaaagtctgatggggtgacatacttacgaagaggctgttttcggagttcagtgtaaggatcaagagccatcttctctggtggatttaactcaattccttggctttctaaaaatacctgtgtgaattggtcacagtcaacaacgcggaaagttttgccataaattgtgatgtttattcctcgatttaggtctttccaatggtaatggtcaccccggtcattcttggctagccgctggcgttttattaccttgccttgaaggattccagaattttctccaccaggttctatgacagacatgctgtcatcttcttagataatagtaaatgttcacctgacggatcctatactgttcctcagttgacataggaacatcttcttggaaataggcatcaaatttcagtacctttttgtcaaaggccacatgcgcaggaataaaatccgcaggtggggcttgtttaggttggccataagttaagactggtgccttactggccaactcatccagctcagcctgggacagctggttgaactggagccggtctccgcctatcccaactgttggacgtcgaacaattgcatagccgttcctgtagctcagcgtctgacttctgtggaaggctgttttcgtagagtccttaaaggacgtgcccggaagaaagggcaagccatgcacgggattggacaccattgcagccggtaccaccgccgccacctaggtcctgcttcgtcctctccggttgcccaggcgacaagcagtgttcgcgggcacctccaggatccatggtaacgctaaacatccggaactcccacgagcggaaggcggggccaggaggcgcaggcatcacaggaggtttgcgcgtgcccc

SEQ ID NO: 441321 - DNA, 1336 bp, Homo Sapiens
  misc_feature (66)..(66): n is a, c, g, or t
  misc_feature (1107)..(1107): n is a, c, g, or t
  misc_feature (1126)..(1126): n is a, c, g, or t
  misc_feature (1166)..(1166): n is a, c, g, or t
  misc_feature (1169)..(1169): n is a, c, g, or t
  misc_feature (1182)..(1182): n is a, c, g, or t
  misc_feature (1191)..(1192): n is a, c, g, or t
  misc_feature (1227)..(1227): n is a, c, g, or t
  misc_feature (1236)..(1236): n is a, c, g, or t
  misc_feature (1280)..(1280): n is a, c, g, or t
  misc_feature (1286)..(1286): n is a, c, g, or t
  misc_feature (1315)..(1315): n is a, c, g, or t
ctggctgagaggcgttaggagtccggcgggttcgcccgcggaggccggggagcagccgaccatggnagccccagaaaatcatgccaccctcaaagcctcatccacctgtcgtgggcaaagtgactcatcacagcattgaattatactgggatctggaaaagaaagccaaacgccaaggacctcaagagcagtggttcaggttctcgattgaagaagaagaccccaaaatgcacacttatggtatcatttatacgggatatgcaacgaagcatgttgttgaaggtctggaaccaaggacgctgtacagatttcgcctgaaggtcaccagcccctctggggagtgtgagtacagcccactcgtctcagtgtctacaaccagagagcccataagtagtgagcacttgcaccgggctgtcagtgtgaatgatgaagatttgctggtccgaatacttcaaggaggccgtgttaaggttgatgttcccaataagtttggctttaccgctctgatggttgctgcccagaaaggatacaccaggcttgtgaaaatcctagtttctaatggcacagacgtgaatctgaagaatggaagtggcaaggacagtctaatgctggcgtgctatgcgggacacctagatgttgtgaaatatctccgaagacatggcgcttcttggcaggctagagacctgggaggctgtacagctctgcactgggctgcagatggaggccactgcagtgtgattgagtggatgataaaggatggctgtgaggtagacgtcgtggacactggttcaggatggaccccactcatgagagtctctgcggtgtcgggaaatcagagggtggcctctcttctaattgatgctggggccaatgtgaatgtgaaggacagaaatggaaagacgccccttatggtggctgtgttaaataatcatgaagagttagttcagttacttcttgacaaaggggcagatgcaagtgtaaaaaatgagttcggcaaaggtgtcctagaaatggccagagtttttgacagacaggttgggatgctctttctgcctatcaaggctaatttttagtccttctagactcagaaaaaccaccaaaaccctngatcacattcgcctgtctnttttgtttatctagagtgtagtccccttattagaagaaanaanaaaaaagcagagnccaaagaanncttgtgtctgctgatgagagcaccactcatctgcnaaacgcacntaaaacaaagtgaaccgtgactgttaaactagggatgggaaatnctgcancttggggggctgtacatttatttatttanttgaagattcaccgatcccac

SEQ ID NO: 441322 - DNA, 1318 bp, Homo Sapiens
gggcgggatgggagtgtcttcttggctgtggaaatcgatcctcctaccttgtcctgaagccacccgccgcctttcctcgtccctcccttcgcggtgattttcgggtcccggcgcccggcgagggcgcgcggctggtgtccgccccgcccgaaaggtttcatcagtttcacccttttctgtgtgcggctgattttagaaagattgcttccttgtatggtagcgataagtttgatttgccctatgggatgagaacatcagcatgccctgtaaaaagtgtgtggtggttggtaatggaggagttttgaagaataagacattaggagaaaaaatcgactcctatgatgtaataataagaatgaataatggtcctgttttaggacatgaagaagaagttgggagaaggacaaccttccgacttttttatccagaatctgttttttcagatcctattcacaatgaccctaatacgacagtgattctcactgcttttaagccacatgatttaaggtggctgttggaattgttgatgggtgacaaaataaacactaatggtttttggaagaaaccagccttaaacctgatttataaaccttatcaaatccgaatattagatcctttcattatcagaacagcagcttatgaactgcttcattttccaaaagtgtttcccaaaaatcagaaacctaaacacccaacaacaggaattattgccatcacattggcgttttacatatgtcacgaagttcacctagctggttttaaatacaacttttctgacctcaagagtcctttgcactactatgggaatgccaccatgtctttgatgaataagaacgcgtatcacaatgtgactacagagcagctctttttgaaggacattatagaaaaaaacctcgtaatcaacttgactcaagattgactctacagactcagaagatgatgctaacagtgttagttttatttttgtactgcaatttttagtttaaaatatgttggatgcactcgtcaaataattatgtatactgtctgttgctgcctggtgattcataaccaccagcttaatttctgtgaatactgtatatttaacttatgaaaaccaagaaatgtaaagataacaggaaaataagttttgattgcattgtttttaaaataagctagttttctgaggtgttttcacacgtctttttatagttcttcatcttagatttttgaagggatatgacttcctactaaggatttagtttaccacaacaattctgactacaataagacattttgaggaggatatttggcgttcgggggatactctagagcgggc

SEQ ID NO: 441323 - DNA, 488 bp, Homo Sapiens
  misc_feature (396)..(396): n is a, c, g, or t
  misc_feature (412)..(412): n is a, c, g, or t
  misc_feature (418)..(418): n is a, c, g, or t
  misc_feature (442)..(443): n is a, c, g, or t
  misc_feature (470)..(470): n is a, c, g, or t
acataattttttttattaaaatcatagaggttatgtaaaaatggcaataattcctgttgttgggtgtttaggtttctgatttttgggaaacacttttggaaaatgaagcagttcataagctgctgttctgataatgaaaggatctaatattcggatttgataaggtttataaatcaggtttaaggctggtttcttccaaaaaccattagtgtttattttgtcacccatcaacaattccaacagccaccttaaatcatgtggcttaaaagcagtgagaatcactgtcgtattagggtcattgtgaataggatctgaaaaaacagattctgggataaaaaagtcgggaaggttgtccttctccccaacttcttctttcatgtcctaaaacagggaccnttattcattcttattnttacanctagggggtcgatttttcccccanngtcctattcttcaaaactccccccttnacccaccaccacacactt

SEQ ID NO: 441324 - DNA, 1156 bp, Homo Sapiens
  misc_feature (691)..(706): n is a, c, g, or t
  misc_feature (869)..(987): n is a, c, g, or t
  misc_feature (991)..(991): n is a, c, g, or t
  misc_feature (1032)..(1032): n is a, c, g, or t
  misc_feature (1065)..(1065): n is a, c, g, or t
  misc_feature (1071)..(1072): n is a, c, g, or t
  misc_feature (1081)..(1081): n is a, c, g, or t
  misc_feature (1086)..(1086): n is a, c, g, or t
  misc_feature (1109)..(1109): n is a, c, g, or t
  misc_feature (1124)..(1124): n is a, c, g, or t
  misc_feature (1131)..(1131): n is a, c, g, or t
  misc_feature (1142)..(1142): n is a, c, g, or t
  misc_feature (1148)..(1149): n is a, c, g, or t
ggtggggaatgcaggatccacttttttattgcaggaagactatgtctagagcgaaggctacacagaccccacgatgggggagtgggggcacccacatgcggggggagagggggcaggggcggagtcacagcaagcatggcctggcacagtccccagcaccagggatgcccaggcaggatgggccagcagccaggacaggctcgggtcccctcctattgcagatgccctctctccccagggtcgggcagggccttgaggtgggagaggcctggaggtgggcagggccccaaggagattgtgctatcagggtgtgtccctgagaaagggccgcagacccctgcccagcctcactctctccggcaccttcagaacccagaagctactgccaggacaggagaggaggcaacatcagctgctggtgggccctgggccagcccatgttttggggggacccagctctgctcagacacaatgccagctcttctgggagcccggtccacgtgctggatagcaacacacacgcaggtgtgcacactccttctctctgagtgtgtccaataaacatttgttgagtaaacactcacacgaacacagaggaaaacaaacttgcttgtaccaaatcagacacgagcaatctgttacctacatagtcccacctggccacatgactacagagacacatgtgtgcaannnnnnnnnnnnnnnnactgcacaaaagggcgtgcgcacacacacacgttgcttcctcacacccaataagaccaaaacctccatctcaccttccctcactaacttagctgccatgctccgagccccgctgtggagagaccacatggtacagaacaaagggcagcttccagccaacagcnnnnnnnnnnnnnnnnnnnnnnnnnnnnnnnnnnnnnnnnnnnnnnnnnnnnnnnnnnnnnnnnnnnnnnnnnnnnnnnnnnnnnnnnnnnnnnnnnnnnnnnnnnnnnnnnnnnnnnnaatntttgattgcagctcctgagatccaagtagaggaccagcaanctgcaccaggctcttgaccacagatctatgaanataagnngtgttgttntggtnctacatttgtggtatttgttaanagagtagtgactganaagattngaacgaaatanattgtnnagtatgt

SEQ ID NO: 441325 - DNA, 1841 bp, Homo Sapiens
  misc_feature (120)..(133): n is a, c, g, or t
  misc_feature (1597)..(1612): n is a, c, g, or t
ccccgggagccttaaccctggggtgtccccagccagacctgcgcgtcctgtccctcacatttgatcactgtgaccttctgggggaggggggagttgaaaatgcacatcggcctcagatannnnnnnnnnnnnnctcctatttggtgttaacatacacccaagcccacccggcccgtcgtgacctctgatctgtgcccactcctccggttccagacgcacctctctcctctgtcttcacagtggggtgtggggcccgtgtgatgggcctcaggccaccaggcaataaccacagggcctgcagcagtgcccctgccagccccgaatcccacccccgggaccagccacatccacagcacaactgccccgctggagaggcaccatgggcgtggaggggcttcccggacaccgcccacccgggacccgcctcttccaccaagacagagacgttagcaacgcatggcgggtggggacctggggtgctcaggagggggtacccggggccccggccagagatacatcaattacacccccgtggggggacagccgatgggagccagcaccagcaggatccgagggcgccccggacagaggtctgccccacccacttcctccccaccacctgtgccccagagagcagggcctgcccgggaaggtggcgtcctggagtcgagtgtacctgcagccatgaggttctgggtgttttttgagagagtctgagtgacaccacactcgtgtgaccccacagggttgtgtccaacatacacggaagtggctatggaatggtgtatttgtgcaacctggggtgcgcggatgggtgacttgtatctaagtgcatctgcgtgtatacctgtgtgtgtctgtctgggatgatatgtttttgtggcagtctgtgtgtgtatatagtggtgtagggtatacagagaggtgggtagttgtagatacctgtgtgtggttgtcagcaagactggatatgtgtgaggtgtctgtgtgaatctttgtgcctgtatgagcatgactatattttggggagtgggtgatatggtttatctgagagcatttatctgtaaatatgtttgtcctgattgagggacacgatctgtgttccactctatagcaacatgactctagcaatgtgactttcggttccaaatctgtatcagtcagctactgctgtgtaacaaatgaccacaaatgtagcaaccagaaacaacacatgcttattatctcatagattctgtgggtcaagagcctgggtgcaggttggctgggtcctctacttgggatctcaggaggctgcaatcaaagcattcgccaggcagaggtctcatctgaaggcctgatcggggaaggatttgcttcttagaagctcatgtggttgttgcagcattcagttccttgctgttgcaagactgaaggcctcagttcctcgctggctgttggctggaagctgccctttgttctgtaccatgtgggtctctccacagcggggctcggagcatggcagctaagttagtgagggaaggtgagatggaggttttggtcttattgggtgtgaggaagcaacgtgtgtgtgtgcgcacgccctttttgtgcagtnnnnnnnnnnnnnnnnttgcacacatgtgtctctgtagtcatgtgggcggtgggactactgtcggtcacagattgctcgtgtctggatttggtaccacgcatgttgtttcctctgtgtcggtgagtgttactccaccaagtgtttatgtggcccctcagagaaggggggtttgcacccgtgcgttgtgtgctctccagcaggtggccgggtccagaagactggcttggttgacagatgggtccca

SEQ ID NO: 441326 - DNA, 1031 bp, Homo Sapiens
  misc_feature (938)..(956): n is a, c, g, or t
tgtgtctgcgtgatctgtgccgtgtgtctgtgtacacactgtcccgctatagtcggttgcagtgtctttttataaagggggtgtttcttcatctcgcttcgctgtgctcaaatcgtccaggggtctgtggctttgcgccgccggacacaccccattttgggtggaatttagatttccttggctaccattaaggagtgggaatcccacaattcttcagggaggaccctttacagagcatggtttctcaatccaggtctttgtgtgaggtctgggaaagtggcttagtttccaaaacaataggtggttcagaaatcagaagatcatcctccccaaagtagttctggtctgtgttcacaaagttggggatgtcaaacttcatgagcctgttcagctcctcctctggctgcccactgcttctgatggcttcctggagttggacgtcactgtcaagggctgtggtctggtgacaagctttggctctgtccaagcgttccacctcattgatgtagcagtgaaagagagacctggactcctcgttgccttggcgagaaaatactttatctggctccagaggtcttccaaagtctgacacaaagctgttcattctgaatctcttctctgaggactctgcattgtcttggtgtggggctcctgtcttggtcagcaaggtcagcacaaaaaacataaaaatcacgaagactgcaagaccaaccctaaatccaatcacaatggaatatttatgagccttcagtccttcaaaggaaactggtccaatctcataatattcatattcccaggtgtaatcagaattagatgccgattgctgggaggttctgttagaaattaacctctgggcggacatctccgaccggctggctagccccggcccgcgggctcggccctggttccggctcctggctcctccgaggtgcgcgagnnnnnnnnnnnnnnnnnnntcccaccgcccagggccgggcgagtagctcctagatccgagcctcgtgccgattaacaccgggcctcgtacctaa

SEQ ID NO: 441327 - DNA, 465 bp, Homo Sapiens
  misc_feature (7)..(7): n is a, c, g, or t
  misc_feature (9)..(9): n is a, c, g, or t
  misc_feature (14)..(15): n is a, c, g, or t
  misc_feature (19)..(19): n is a, c, g, or t
  misc_feature (21)..(21): n is a, c, g, or t
  misc_feature (25)..(26): n is a, c, g, or t
  misc_feature (44)..(44): n is a, c, g, or t
  misc_feature (48)..(48): n is a, c, g, or t
  misc_feature (55)..(56): n is a, c, g, or t
gtgtggncnatcgnncccngntggnntggtctttagtggcgggngggnactgggnngggggattgttctttgacatttccagttcttatctgttaacatggacagtgatttaaataggcagctgcatgggcggcctctccctaactgctgctatcttgtatctcctcattggtaattatttttcctagcccaaattccacgtcaaacactatcaatattctgggggccaccctttcatacactgctctgtacacatacctgtttatacatattttaacaaaagtgggatatttacatactgttgttatcatagccaagctcaacagcatcaaaagcatttttaggtacttaattcaagtggctgtaaaatttaaaaaaaatcattttttctgatactatatcatctttgtacccgtatatttcaatttcttgaatgttcattacaattttatttttactttttat

SEQ ID NO: 441328 - DNA, 1580 bp, Homo Sapiens
  misc_feature (17)..(17): n is a, c, g, or t
  misc_feature (39)..(39): n is a, c, g, or t
  misc_feature (147)..(147): n is a, c, g, or t
  misc_feature (170)..(170): n is a, c, g, or t
  misc_feature (228)..(228): n is a, c, g, or t
  misc_feature (238)..(238): n is a, c, g, or t
  misc_feature (259)..(259): n is a, c, g, or t
  misc_feature (261)..(261): n is a, c, g, or t
  misc_feature (265)..(265): n is a, c, g, or t
  misc_feature (281)..(281): n is a, c, g, or t
  misc_feature (306)..(306): n is a, c, g, or t
  misc_feature (315)..(315): n is a, c, g, or t
  misc_feature (374)..(374): n is a, c, g, or t
  misc_feature (387)..(387): n is a, c, g, or t
  misc_feature (899)..(899): n is a, c, g, or t
tgatacaaattcattantttaatatttaaagattgtggnagtatagtcaaaacacataaatattataatatacatttagaaattaaatataaagtcaacacaacactccttaaaaactcatatgtacacttccaataagtctcaggnttgaacattcaagctcatcaganttccccatgggaatgggtgaatcttgcagggagattgtccacaggatacacggtgggnctggttttcnttgtaggaggtccatttagangnggcnagtcacaatgcctggncagctccactgtaaatattttgggnggaattttngcgaattctttgcctacacagctcctaaggcctcctccaaatgggatggggctgagccngggtgcgtcctcngggtgaggcagcatgaatcggtcagggttaaattcttccttgttggtgaagatctctgccacatcatgagtatcacagatactgtagataacattccagcccttgggaatctggtatccatttaattcaaaagtcttcagagcaacccgaaaccctcctggaactgggggattcagtcgaagggtctccttaataacacacccgatgtatttaagttgttccaaaatttccatgtccaacttgttgtcttgattgctcttgcaaagtaaacccttactcttcagctcttctcgcactttctggagaacatgtgggtagagccccaggtaagtgatcagagatgtggctgcactggccgtggtttcgtgtcctccaaagaggagttcggttgaagattgctttagtgcctgcatgtccagccgctctcccctctcccacgagtgctcgatcaacagctgcagcgcgtctttgcagccctggcccgcctcggatgcccgcagcccgcagatctntggcgcgaatgttctgctcgatgcgcgcgtgaatgaggttccgcgccttcatgccccggtacagcccgctgaagggcacgtcgatgggcagcgagaagagattgcgggtcatttcctcgaaggcctccacaagctgctgctcggagtccccgtcgcccgccagttggggttcgcagcccagtaggatgcgcatggcgattcggaacatgaggcgcttcacctcggggtagaccaggaggccgcgctcgccgcagctcagccactgctccaggctgctgcccacttcctcggtgatcaccggcacgtagcattcgagtcctcgcggctgaaggcccgcataatcaccttcttgcgctgcttgtgcgaggagtcgtgcaggttagagaggcagccagatcccagaatggtgcgcaccgacgctggccagtggaccgacaccagccggtctctccgagcaagatgcgccgcacattgtccgcgcccatcacccgtacggtgggccgcccgaacagatgcgtcttgtagatgaagccgtatttcctgcgcttcatctgcaggaacttcctccgcttggtcagacaattagttcacccaaagttcatctttaattgcggattgggcccctggctcctccccccgcgaggcgctgcccaaaatctttaaccgtttgttccgcgccga

SEQ ID NO: 441329 - DNA, 1239 bp, Homo Sapiens
ttgaggtaggaacttttattatcacaagtccagagaggtaaagttacttgcccaatgccacacagcaagcaagtggcctgtccaggatgtgatcttaggtttgtctgactgcagagcccccaccctcactttccagtgtgtgtgagggggtcaggaacagagggaggactattgtaagcggagccccaggcactgtagggtcctggagaaataagggggcagtggtgccaggagctcaacaggggtgtccctggccctggtgcctgggagaaggagccgatgtaggtggaggtgcaagggcagctgggcagcctgggagggggtcaggtggaggcgtctgaggagggcttcatccaggacctgtctttggggcttgttgttctcagctggcagcagaaatcgctggcccaggacagtgcccacacgggcagagtacatgtggtccccaagcacagggcagagctgtagtaccatgtgcacctgtagttgactggagaacactgtcagtggctgcagctggaccagggcacagccagagcctgtggctaccacacgaaagtgactgagagtcttcttgacaccttccaggatgtcctttcgggatggggccttcactggaactgtgagattgaccccatcaatgtgttccagtttcagggcagcctggatcttcccctcagaagcagctgggatcccatcagtgacagcacagtaggtggctgtgggcctttgggctctccgtgcatgggtgaagtacttctggaggcgactagctgtctggggacagctggagaggagtacaagcccagagctttctttcccagatgctcggacaacctgaagctcctgctccctgagccctagggactggctcagctctggcagcactgagaacaacgtcagctctcctggttttcctgtcactggtagaccctgtggcttgttcaacgtcactagaggtcctttccggtccaccacggctgcccgcagcgcatcaaccagctcctcccgactgaggttttttggcagcagccccgcgaagggctggtccccgaggggccccgaccgttggcaggagccgcggggttgcctctgatgccgggcttcggtgccaaagcctgcgtcctcgggcactgggcggacacccaggccccgccgccagccactccagaaccggcccaaaacacggcggccgtccatctcccgagccagcctcgtcttgagatcgccacccaggcc

SEQ ID NO: 441330 - DNA, 1233 bp, Homo Sapiens
  misc_feature (42)..(62): n is a, c, g, or t
  misc_feature (84)..(137): n is a, c, g, or t
  misc_feature (211)..(231): n is a, c, g, or t
  misc_feature (234)..(335): n is a, c, g, or t
  misc_feature (388)..(486): n is a, c, g, or t
  misc_feature (1152)..(1184): n is a, c, g, or t
ctctattttaccattaggggaactgaagctcagggagggtannnnnnnnnnnnnnnnnnnnngagacagggtctcactcaggtnnnnnnnnnnnnnnnnnnnnnnnnnnnnnnnnnnnnnnnnnnnnnnnnnnnnnntgagctcaggtgattctcccatctcagccacccgagcactacaggcatgtgctgctctgcccagctaggttttnnnnnnnnnnnnnnnnnnnnnttnnnnnnnnnnnnnnnnnnnnnnnnnnnnnnnnnnnnnnnnnnnnnnnnnnnnnnnnnnnnnnnnnnnnnnnnnnnnnnnnnnnnnnnnnnnnnnnnnnnnnnattgattataggcatgagccaccacgcggaaagttttgttgttgtttttccannnnnnnnnnnnnnnnnnnnnnnnnnnnnnnnnnnnnnnnnnnnnnnnnnnnnnnnnnnnnnnnnnnnnnnnnnnnnnnnnnnnnnnnnnnnnnnnnnnactgtgcccagcgtcagggaggtgtcatgctttgcctggtatcacaccatttgtacttgaggatttgaacccagagccatcggcttcctcttcttcacagtacttgtatccacctctatgatctcaaaccttcccatggaaaatgtctcagcttatccccaagcagctgtttccccaccacagatggatgcctgtactcctagcttcctgtcacccctaccacttacttcccagatgctcggacaacctgaagctcctgctccctgagccctagggactggctcagctctggcagcactgagaacaacgtcagctctcctggttttcctgtcactggtagaccctgtggcttgttcaacgtcactagaggtcctttccggtccaccacggctgcccgcagcgcatcaaccagctcctcccgactgaggttttttggcagcagccccgcgaagggctggtccccgaggggccccgaccgttggcaggagccgcggggttgcctctgatgccgggcttcggtgccaaagcctgcgtcctcgggcactgggcggacacccaggccccgccgccagccactccagaaccggcccaaaacacggcggccgtccatctcccgagccaggacccgctctcgacgaattcgagctcggccgatttggcctgatnnnnnnnnnnnnnnnnnnnnnnnnnnnnnnnnnatgcgccgccaccgcgtgaaccccgaggcgccctatagtgatcgacaca

SEQ ID NO: 441331 - DNA, 819 bp, Homo Sapiens
gctgggtggcgaattcggcacgaggggagatggacggccgccgtgttttgggccggttctggagtggctggcggcggggcctgggtgtccgcccagtgcccgaggacgcaggctttggcaccgaagcccggcatcagaggcaaccccgcggctcctgccaacggtcggggcccctcggggaccagcccttcgcggggctgctgccaaaaaacctcagtcgggaggagctggttgatgcgctgcgggcagccgtggtggaccggaaaggaaaaccaggagagctgacgttgttctcagtgctgccagagctgagccagtccctagggctcagggagcaggagcttcaggttgtccgagcatctgggaaagaaagctctgggcttgtactcctctccagctgtccccagacagctagtcgcctccagaagtacttcacccatgcacggagagcccaaaggcccacagccacctactgtgctgtcactgatgggatcccagctgcttctgaggggaagatccaggctgccctgaaactggaacacattgatggggtcaatctcacagttccagtgaaggccccctcccgacaggacatcctggacggtgtcaagaagactctcagtcactttcgtgtggtagccacaggctctggctgtgccctggtccagctgcagccactgacagtgttttccagtcaactacaggtgcacatggtactacagctctgcctggtgcttggggaccacatgtactctgcccgtgtgggcactgtcctgggccagcgatttctggctgccagctgagaaccaacaaggccgc

SEQ ID NO: 441332 - DNA, 360 bp, Homo Sapiens
ggagcaggtcgcagggggagaggctcagcctgggctgccccaagaagacccctccaccagccaggggtgtgcgcagcctcagggggctccgtgctgcagctcctccccagaggaaccactgaacggggaatcttacgaaagctgctgtcccaccagccgggaagctgccgtggaagccttggaattgctggggtcaatctcgtgagtccgggtctgggaagaggaggggtgcttctagatatagtacccctacagagaggagtcaggggtatggatttgggatggctggctctcctgtcccctaaaacaggcaagtgaccactgctaatactgtggcctacccgactcgcctttatagcc

SEQ ID NO: 441333 - DNA, 1925 bp, Homo Sapiens
acaaagaaaaagaacaatacggtaggtacgaaggctgggtggttaattcggcacgaggggcaggtcgggcaggcgggtcgcaggttgtaaatccatgtggcggggtgctttggaccctgtgcggcccaagcggcacgtgggcctcgcagattgtgcacgcgccggagcagcggcgcaccagcccccggctccggcgccaccatcttcgcgctaagctctggccaaggccgctgcggcatcgcagtgatccggaccagcggccccgccagcggccacgccctccgaattctcacagcaccccgagacctgccccttgctcgccacgccagcctgcgcctgctcagcgatccccgctccggggagcctctggaccgcgcactggtgctctggttcccaggtccccagagtttcaccggtgaggactgcgtggagttccacgtgcatggaggcccggcagtggtgagcggcgtcctgcaggccttgggcagcgtgccagggcttcgaccggcggaggcaggcgagttcaccagacgggcgttcgccaatgggaagctgaacctgaccgaagtggaggggctggcggaccttatccacgcggaaacagaggcgcagcggcggcaggccctcaggcagctggacggagagctgggccacctctgccgtggctgggccgagaccctcaccaaagctctggcccacgtggaggcctatatcgatttcggcgaggatgacaacctggaggagggggtcctggagcaagccgacatcgaagtacgggcactgcaggtggccctgggtgcacatctacgagatgccaggcgcgggcagaggctccgctcaggggtgcacgtagtggtcactggaccccccaatgcgggcaagagcagcctagtgaacctgctcagtcggaagcctgtgtccatcgtgtccccggagccagggaccacccgtgacgtgctggagaccccagtcgacctggccggatttcctgtgctgctgagcgacacggctgggttgcgggagggcgtggggcccgtggagcaggagggcgtgcggcgcgcccgggagaggctagagcaggctgacctcattctggccatgctggatgcttctgacctggcctctccctccagttgcaacttcctggccaccgtcgtagcctctgttgggagcccagagccccagtgacagcagccagcgcctcctcctggtgctgaacaagtcggacctgctgtccccggagggcccaggtcccggtcctgacctgccccgcgcacctgctgctgtcctgtctgacgggagaggggctggacggctctccatggaggcgctgaggaaggagtctagctgtcagtgtgctggggacccgtccacagatcccccgctgctgacccgagcaaggcaccagcaccacctccagggttgcctggatgccctcggccactacaagcagtcaaaagacctggccctggcggcagaggcgctgcgggtggcccggggtcacctgacccggctcacaggtggagggggtaccgaggagatcctggacatcatcttccaggacttctgtgtgggcaagtgacgggatccagggaagtcgcacccaagctgcgtggagacccaggagcctcgggggatctggaaacagtttaggccaattgggattctcattcgcctgggaaagaacttgattctcaaatagtgaagcaacacagctgagaggtagtgagatccctgcagggactccctggagattcagggcctggaataggggctgaatggaggtcccgttcgacccttgatgctggggcatccgggttgggatggagataggaggatctcagtatatttgtttcgtagttttttatttattttgcaaataccaaaggaatgtaaaaaaaactcaggtgatctagaagtgttta

SEQ ID NO: 441334 - DNA, 917 bp, Homo Sapiens
  misc_feature (774)..(774): n is a, c, g, or t
  misc_feature (780)..(780): n is a, c, g, or t
  misc_feature (811)..(811): n is a, c, g, or t
ccagatttcccgccagcaggagccgcgcggtagatgcggtgcttttaggagctccgtccgacagaacggttgggccttgccggctgtcggtatgtcgcgacagagcaccctgtacagcttcttccccaagtctccggcgctgagtgatgccaacaaggcctcggccagggcctcacgcgaaggcggccgtgccgccgctgcccccggggcctctccttccccaggcggggatgcggcctggagcgaggctgggcctgggcccaggcccttggcgcgctccgcgtcaccgcccaaggcgaagaacctcaacggagggctgcggagatcggtagcgcctgctgcccccaccagttgtgacttctcaccaggagatttggtttgggccaagatggagggttacccctggtggccttgtctggtttacaaccacccctttgatggaacattcatccgcgagaaagggaaatcagtccgtgttcatgtacagttttttgatgacagcccaacaaggggctgggttagcaaaaggcttttaaagccatatacaggttcaaaatcaaaggaagcccagaagggaggtcatttttacagtgcaaagcctgaaatactgagagcaatgcaacgtgcagatgaagccttaaataaagacaagattaagaggcttgaattggcagtttgtgatgagccctcagagccagaagaggaagaagagatggaggtaggcacaacttacgtaacagataagagtgaagaagataatgaaattgagagtgnagaggnagtacagcctaagacacaaggatctaggcgnagtagccgccaaataaaaaaacgaaggggtcatatcagattctgagagtgacattggtggctctgatgtggaatttaagccagacactaaagaggaaggaacagtg

SEQ ID NO: 441335 - DNA, 1889 bp, Homo Sapiens
ctcataaaatgtttattgatttggtcttggcttattgtgtaaaccatttaatagccaaaagtcagaatttaaacatctaaaatacactgaaaatgtgttcttttccaataacatggatgttcacaacagttggtgttacgttagagctaataattatactttagcacgttaacctcagaattctaaggctgagagtcaaacactgctaattcatagaaggcaatagcttgtaataatgaatcataaagctcttctactctttgtagttcagtagataaaaacatctgtctgtagtgaactattttatctgatgggaagaacacccgaggatccgccttcagtatagaatcgaagagaaactgcttcactagctcttttccactagtccgggagtcaccaatcatcagttcaaaatgcttccccactgcatttcgattcatgctcagcacctgatgctgcccatcctgggcaaaagttttatttaataaggcatacagcatggcttccatgatatgaaaatgtaacagtattggaaacagagatgagttctgaatggaaagtcctgttttttccagaacatagaaatctgctttaggcatctttgaaatgatcgaggaaatctcttctaaatagactgatgatgagtatattcctctcattaacttccacgggtcactttgctgccagtccagcactgtcaacttacggatcaaggtgagcccaggcaattcttcgagtaccaaaagcgatagatatgatactattacctgccttaagtctttctctttctatgtctggtttgaggagctttctcaggaaccggttttccggtgactttcttttttcccgtccagtctttggacaaagtatggagttacaaacttgaactgtacttttatacttaaacaagggcacattcattaaactctctaaattctgaaatggcccaaagttttctctgtgctctacgatattgatggaccttcttccacgaagcaatcggaaagcttcaagttctttagtagatgctgtattcaacacatgcaagatggaagcctgctgttctgaagagaagagcttgtcaagtgcattttcgggctcctttgcattttcatcacaaaaagtaacattgggagtaattttcttaggtgtagtggattttttccgacagcagaaattatgtaaggcccagtacagggatgacctcgacggggtcagaaagcatctccacctctctcccgccgtgaagaggacagacccgctcatctccaagttgaatcagtaggtccagtcttcctccattgacttccggttcctgcgtgctgcgcccaaaagcgctcggcctgcactcgcgcggaaaggttgttgtccaagcggcgttccggggcaaggcccgaggtgtgtcccgctgagcagtgggtcgtccgcgtctgggctgcgggcttccaggcgggcgcctgccgaggccctgtccccggatcccgagtccctggctggcccgcagtcttcttccactgcaccggggaaacgttcttgcccctaccgactcctgagagccgctgggccgaatctccaggaaggcgattccgaggccagttttagtctgtagtgggtaaagtgcctccttcgtggagactccctgggtttctcctagacacttagattgaggagctcctgttggggcccagcctgtggcgccgggagcgggatcaggtaggggcagcgtagacaaggtcctcaaataaccttttcaccaggtagactggcataacggggagagatgcgaagtgtttgaggagctcagcggggaaacagggcaggcaagggattaggtaaaggcgagggaggaggagattgcgttggcgctggagcggtattcctcttagaag

SEQ ID NO: 441336 - DNA, 1052 bp, Homo Sapiens
  misc_feature (53)..(53): n is a, c, g, or t
  misc_feature (68)..(68): n is a, c, g, or t
  misc_feature (77)..(77): n is a, c, g, or t
  misc_feature (89)..(89): n is a, c, g, or t
  misc_feature (112)..(112): n is a, c, g, or t
  misc_feature (161)..(161): n is a, c, g, or t
  misc_feature (338)..(338): n is a, c, g, or t
  misc_feature (884)..(918): n is a, c, g, or t
gatgtccaaaaccacatttattaatcagaaaattccaaattacatgttgacantttacatgtataagngcaattcantttcagcaaagngtctcttctaaatcagttcaagnttgagtgatgaaatattcaacatacttctgccgttgacttaaaactggntcattaaagcttgaagatcaaattttaattctgtatacctctggaaagatacagatgttgatgaagatctttctttcagctggtaggttgtatagtcaataatctttgtacttccctccttatttcctaagttcatatttaaggttgtgtataatttaattatactgatcacagaangctttttttataacaataaggactgtatatatttgggtattactaaaaatatctagagatcaacacagatatatctttattcatgagcttaaaatctgaagtaaaaatttcatgctaataatattaatgctttcacactagggctaataagtcaaaaatagaatgtcatatgcttcacaagtctttcacttttgctgaatattataaatagaaataacatttaatatgagtctatagttgttttacaatgcagtacttcatatatgagtctatgtatgaggttgagggaaacagcaatagccgactaatgggatgccttgtctttcttgctttgttatttgtattgttcaatcacaacagggagtagcatattgtatttattaagtcccacaggcttcagtaactcttcagtaagtccaaacactgtgtatcaacaatttgccaaagaagcaagagggaaagacatttcttttttcgacaattctgacaagacatgtatccagtatttttcaacaatgcacacatcaaatatttctgataagtgcnnnnnnnnnnnnnnnnnnnnnnnnnnnnnnnnnnnttccacacaggcaaatctactgccttgttagtccaagtaacaaaccaatcaattatattctatccaaacctgacaagcaaaaggcaactttttgcagtgacaagcttatagaaaggacaatatagctgttctcc

SEQ ID NO: 441337 - DNA, 836 bp, Homo Sapiens
  misc_feature (41)..(49): n is a, c, g, or t
  misc_feature (620)..(620): n is a, c, g, or t
cagccgacatgcctttttatctactcaaggattggagatannnnnnnnnctcttatccttctggcatgtgcctctagatatgatgggatcagggttattgagtctagaatttatgtgagatgatacaaattcagaagcaaaaggctgctccaagagatggtcttatataggttttatagattacatggacagaccacatgagggggcggaatggaaaaagtcaactgttggcagttacctttgtcactggaataaggcgcgtgaacattattgctggggacagacacattctggtggtgtggctggttcacagtttctaaaaatgaaaccagattctcatgatgtgaaagttcttctgcaacagggaaagaaacgatgttccaattcaactgagtatctccttctgtgagtgcccggaagagagaagggatcggttcatgcagctcctccactgtgctctttgaagttggaggtgtgtcactataatttcgaggattacacataccaacacagtcacagcactcgtcccaaagggccccaagacacagcatgcactccttacagcaggagcaattgccttctcccggccggcactggcagagctcctgaatgaggcattngctcacatcactagcacagagtgctttgttacagctcagtgattctggaagccatgtcaggaacatcaggatggctagagtaagcacagcaacatagtgtaacttcatgtttcttcaaagaagatgatcagtaactcccaggaaacatgcgccacggtcccgcgaagtcgcccacccctagatccccgccgggtcggccgagcccggggcgcgctg

SEQ ID NO: 441338 - DNA, 1215 bp, Homo Sapiens
  misc_feature (1094)..(1130): n is a, c, g, or t
ttatcaaaaggaaagggggttatttgttaggggggcaataaatccagtaagaaacagttttttaaattaaaccccttccctgggttatgtcatatttttaaaagaaaacttattccaaaagtcttttacaacttaacttaacgggatttctgatacaagatacaaccaacagactttacagaataactttttatacctattattttactaagttgctttggtttgcatttgtcttctttaaaacatgcagttcatacatttgacagttttactaccatagtcaatacaattctggaccaatgcactcgcagcaggcattatgaaaccagcgatatttggatgctcccatggactcacaggatattttacactgatgtatggacatgcagtcatcaaaataaaccacagtacacatgtgttctttgtcactggaataaggcgcgtgaacattattgctggggacagacacattctggtggtgtggctggttcacagtttctaaaaatgaaaccagattctcatgatgtgaaagttcttctgcaacagggaaagaaacgatgttccaattcaactgagtatctccttctgtgagtgcccggaagagagaagggatcggttcatgcagctcctccactgtgctctttgaagttggaggtgtgtcactataatttcgaggattacacataccaacacagtcacagcactcgtcccaaagggccccaagacacagcatgcactccttacagcaggagcaattgccttctcccggccggcactggcagagctcctgaatgaggcatttgctcacatcactagcacagagtgctttgttacagctcagtgattctggaagccatgtcaggaacatcaggatggctagagtaagcacagcaacatagtgtaacttcatgtttcttcaaagaagatgatcagtaactcccaggaaacatgcgccacggtcccgcgaagtcgcccacccctagatccccgccgggtcggccgagcccggggcgcgctgcggcggctttgagtgcgaggccaggccgcgcctccccgctctcgacgaattcgagctcggccgatttggcctgatnnnnnnnnnnnnnnnnnnnnnnnnnnnnnnnnnnnnncgccgccccgcggtgagctccaggtcgccctatagtgagtcgttcatttcgagccgcgcgcggcggggggggagggcgcgggcgg

SEQ ID NO: 441339 - DNA, 734 bp, Homo Sapiens
  misc_feature (359)..(359): n is a, c, g, or t
  misc_feature (364)..(364): n is a, c, g, or t
  misc_feature (398)..(398): n is a, c, g, or t
  misc_feature (414)..(414): n is a, c, g, or t
  misc_feature (480)..(480): n is a, c, g, or t
  misc_feature (509)..(509): n is a, c, g, or t
  misc_feature (516)..(516): n is a, c, g, or t
  misc_feature (522)..(522): n is a, c, g, or t
  misc_feature (529)..(529): n is a, c, g, or t
  misc_feature (556)..(556): n is a, c, g, or t
  misc_feature (575)..(576): n is a, c, g, or t
  misc_feature (594)..(594): n is a, c, g, or t
  misc_feature (608)..(608): n is a, c, g, or t
  misc_feature (616)..(616): n is a, c, g, or t
  misc_feature (657)..(657): n is a, c, g, or t
  misc_feature (667)..(667): n is a, c, g, or t
  misc_feature (687)..(687): n is a, c, g, or t
  misc_feature (693)..(693): n is a, c, g, or t
  misc_feature (696)..(696): n is a, c, g, or t
  misc_feature (719)..(720): n is a, c, g, or t
  misc_feature (723)..(724): n is a, c, g, or t
  misc_feature (730)..(730): n is a, c, g, or t
  misc_feature (734)..(734): n is a, c, g, or t
ggtaccccgtacaaggccccgcggggtactgctcatgctgctggcccccgccttgcatgtcccccagccctcgcatgcttttgcttgtgtttcctgcatgttctctggtgtgactgctggttttcccctgaaccccctccccagctctgacaaggagcattgcctgtcccagcctgactcaggaggccaactggcaccttgggccctgtcctcccccgattcctcctggataggaatccagaggctgtcccctgcctgattccccatctagctgtccctccacgcctttaggaaggcacagggtagccctgagtatgagggaacaccttgggagctaacggtccccagaggccttaaantaaanagtctgcggggcaggctcattcccatggcctttntcccacgggaaccacncctctgccctgaagttgcccaggtaggccagtgaagagggcccggaaccaggaagaaccttgaatnaacatttggaaaacacaattgggggaaangggtggncgtggnttggtgncaacagcgtcctgggaccctaggtttntttttcccgcgttgtgggnnttctgtgtgtgcctcccnccctgcgccgcggntccctggnctcgtggggtgtgggtgctccctgcccgtgccctctgtgtncgtggctttntgccctcctgcccttccccngctccngcngtacccgcggctccgggcggcgnnggnncgcctngtgn

SEQ ID NO: 441340 - DNA, 1314 bp, Homo Sapiens
  misc_feature (303)..(303): n is a, c, g, or t
  misc_feature (316)..(316): n is a, c, g, or t
  misc_feature (343)..(343): n is a, c, g, or t
  misc_feature (355)..(355): n is a, c, g, or t
  misc_feature (358)..(359): n is a, c, g, or t
  misc_feature (374)..(374): n is a, c, g, or t
  misc_feature (404)..(404): n is a, c, g, or t
  misc_feature (455)..(455): n is a, c, g, or t
  misc_feature (459)..(459): n is a, c, g, or t
  misc_feature (478)..(479): n is a, c, g, or t
  misc_feature (482)..(482): n is a, c, g, or t
  misc_feature (487)..(487): n is a, c, g, or t
  misc_feature (494)..(494): n is a, c, g, or t
  misc_feature (497)..(497): n is a, c, g, or t
  misc_feature (500)..(500): n is a, c, g, or t
  misc_feature (504)..(505): n is a, c, g, or t
  misc_feature (508)..(508): n is a, c, g, or t
  misc_feature (511)..(511): n is a, c, g, or t
  misc_feature (518)..(520): n is a, c, g, or t
  misc_feature (523)..(524): n is a, c, g, or t
  misc_feature (530)..(530): n is a, c, g, or t
  misc_feature (533)..(534): n is a, c, g, or t
  misc_feature (536)..(536): n is a, c, g, or t
  misc_feature (541)..(541): n is a, c, g, or t
  misc_feature (543)..(543): n is a, c, g, or t
  misc_feature (549)..(550): n is a, c, g, or t
  misc_feature (556)..(556): n is a, c, g, or t
  misc_feature (562)..(562): n is a, c, g, or t
  misc_feature (573)..(574): n is a, c, g, or t
  misc_feature (602)..(602): n is a, c, g, or t
  misc_feature (609)..(609): n is a, c, g, or t
  misc_feature (618)..(618): n is a, c, g, or t
  misc_feature (629)..(648): n is a, c, g, or t
cttggtttttaaaaatctttttattgatatctcgttttcttcatgcatcacttctaatattcttttgttgtctatgttctgttttttttcattaagcacttttttctaattacattttaatgtaattagaatgtccacctttacaatacacaaatacagtaacggtaactcgcactaaaacaaagcatacttctgatagccattatttttctctttgggacaattttaaagctttttcttttgtcacaaaaacagtgactgtacctatacacgaggctcaaaataggccatactttttaaacnaaaaggcacatgnttcacaaaagactatgaatagaacatncccctagttganacnnatctaataggatttnttaaaatcagtcacatctaatacatccgangtgttcttgtataaaatatcacgtgaagaagactttatcaatgtctaaaanagtnggtttgttcatagacaatnnggnaggtnagcattnggngtntttnntgngtnataaggnnntgnnagattnttnntnttggngncttttnnttcttntttttnctctctttaanntggcagaggatctgggactgagaaaatntttttgngtacaaacngcttgtgagcnnnnnnnnnnnnnnnnnnnngcgtcatcagagggttttactgaacttacaaccgacttgcccgctcagtatgcagttcagatgtgagaggcgcttctctgtacagcagcctgtactgtcttcaatcctatgcgtgcaggtgtctaccacaggcaaacagttttctccccattttgtagtaatgtgattttcctattagcaaaaagaggtcaccagcccctgtagacttaagggactcaagtcacaggatggggatttcctcttaatattttttattttgttgtttgaactcttgatgcaacattgtagagcagggtgttcaggacctgctgtgcccaagggactgataaaggaaaaagctctatttattctttttgtgatttgatgcacagatgaaaaacttaacacacaataacagaagttggtcgttaataaatcacatcctagtctttcagcgcttccgtaagcagacgacatcttcagttttctagctcttgtagtttcaacactgcaacatcaatgatgcatatgtccagaatcagttacaaagaccatccgattctttttctcttagttcatctatttttcactgtctcttggtcccaagtgtatctgagtgattaccttctggcattctctgctattgctcgttggggtgctctcgattgtccccgtgttttgtgggct

SEQ ID NO: 441341 - DNA, 1115 bp, Homo Sapiens
  misc_feature (30)..(30): n is a, c, g, or t
  misc_feature (54)..(54): n is a, c, g, or t
  misc_feature (61)..(61): n is a, c, g, or t
  misc_feature (63)..(63): n is a, c, g, or t
  misc_feature (92)..(92): n is a, c, g, or t
  misc_feature (142)..(142): n is a, c, g, or t
  misc_feature (733)..(747): n is a, c, g, or t
ttttgatttttcaattaaactttttgttancacaggtaattaattgtcagcggncttgagncnggttatggaaccctgtagtaacaagagcnggaaattggctaattgacaatgcaattgccttaaacatctcaagtagagnacatttacattagtgagatgtacttgaatttcagaacttaacaaattttaattactttttattgaaaactgcactgaacgctaaatgtccacctttacaataaacaaatacagtaacggtaactcacactaaaacaaaacatacttctgatagccattatttttctgtttgggacaattttaaagtttttcttttgtcacaaaaacaggaatgtacctatacaaaggctcaaaataggccatctttttaaacaaaaaggcaatgattcacaaaagactatgaatagaacatgtaactagttgatacaaatctaataggatttgttaaaatcagtcacatctaatacatctgaagtgttcttgtataaaatatcacgtgaagaaaagaagactttatcaatgtctaaaaaagtgggtttgttcatagacaatctgacaagttaccataaaaagtgtttcctgagacataaggaaatgcaacattattcttcttgaacccttttagctcaagactttccactcaataaaatagcagaggatctgaaactgagaaaatatatttgagtacaaacagcttgtgaaacttaatacnnnnnnnnnnnnnnngcatcatcagagggttttactgaacttacaaccgacttgcccgctcagtatgcagttcagatgtgagaggcgcttctctgtacagcagcctgtactgtcttcaatcctatgcgtgcaggtgtctaccacaggcaaacagttttctccccattttgtagtaatgtgattttcctattagcaaaaagaggtcaccagcccctgtagacttaagggactcaagtcacaggatggggatttcctcttaatattttttattttgttgtttgaactcttgatgcaacattatagagcagggtgttcaggacctgctgtgcccaagggactgataaagggaaaagttctatttattctttgtgatttgatgcaca

SEQ ID NO: 441342 - DNA, 1035 bp, Homo Sapiens
  misc_feature (17)..(17): n is a, c, g, or t
  misc_feature (21)..(21): n is a, c, g, or t
  misc_feature (23)..(23): n is a, c, g, or t
  misc_feature (25)..(25): n is a, c, g, or t
  misc_feature (28)..(29): n is a, c, g, or t
  misc_feature (41)..(41): n is a, c, g, or t
  misc_feature (57)..(58): n is a, c, g, or t
  misc_feature (71)..(71): n is a, c, g, or t
  misc_feature (101)..(101): n is a, c, g, or t
  misc_feature (105)..(105): n is a, c, g, or t
  misc_feature (278)..(278): n is a, c, g, or t
cctacccccatcaccgntgcnananccnngcatgcgtccantgctgcatggccactnntcacttgctctgnaaccgcggtgtagagaagaaaaccctcagngtcntccctggaagagacgctgtgcagcactgctgggccctgagtacaactgttcattgaggtagcgaaatcggcccccatccagccgctgtgccatgcgggctcgcaaagcgcctgcccgagcctcatggctgtctgtcctgggatcaggagacacctctgtcttctctgtggggncctcagctggggcctggtctggcacctgaggtggctgaaacttgttcttacatcttctcttattcttttgccggttccgccactgcttgcggcttaatgtatgagggggtttaggggaagtggacccagggctttgctttggtggatcatttgtagtactacccttccaggctttgggacctgtttggtcaacattgtccaggtgctgggctgaatttataggggcatgtttctggcatttcctcgtttcttttctcatcttcagcagagtcactgccaacaagagcctgtttgtggcatttcttcttcctttctacttcttcctcagagtcactgcaaggtgggccctgtttttgacatttcttcttccctttcttccctacttcagcagaggcactggcaaatgatgcctttttggggcatttcttcttcctttcctcctcctcctcctcagagtcacttatacataggctggggggatgctgggaaagagatgctgcctctagggcccgtaatgtggccaagagctggcggcgcttggagcccttgttttgcgaggaggccgcaggcggaggtcgtgagattacgggcccaaggcccgcggctactggggccgcctcggcccactcaggctcttcgaacatgagggtcgggagggcagggtcgccgagtccccgctcttctccacgtgcacagcgctcctctggaagtcggagcgctcagacctgccagaaccgacccggaaaccaagcccgct

SEQ ID NO: 441343 - DNA, 961 bp, Homo Sapiens
tggaagagacgctgtgcagcactgctggccctgagtacgcctggtcagtgaggtagcgaattcggccccagtccagccgctgtgccatgcgggctcgcgaagcgcctgcccgagcctcatggctgtctgtcctgggaacaggagacacctctgtcttgctctgtgggggcctcagctggggcctggtctggcacctgaggtggctgaaacttgttcttacatcttctcttattcttttgccggttccgccactgcttgcggcttaatgtatgaggggttttaggggaagtggacccagggctttgctttgctggatcatttgtagtactacccttccaggctttgggacctgtttggtcaacattgtccaggtgctgggctgaatttataggggcatgtttctggcatttcctcgtttcttttctcatcttcagcagagtcactgcctacaagagcctgtttgtggcatttcttctgtcctttctacttcttccgtcagagtgcactgcaaggtgggccctgtttttgacatttcttcttccctttcttccctacttcagcagaggcactggccaatgatgcctttttggggcatttcttcttcctttcctcctcctcctcctcagagtcacttatacataggctggggggatgctgggaaagagatgctgcctctagggcccgtaatgtggccaagagctggcggcgcttggagccctggaggaaaacaggggatgacagtgggcctaaagagaatggatgaggccttgttttgcgaggaggccgcaggcggaggtcgtgagattacgggcccaaggcccgcggctactggggccgcctcggcccactcaggctcttcgaacatgagggtcgggagggcagggtcgccgagtccccgctcttcgtccacgtgcacagcgctcctctggaagtcggagcgctcagacctgccagaaccgac

SEQ ID NO: 441344 - DNA, 1624 bp, Homo Sapiens
  misc_feature (8)..(8): n is a, c, g, or t
  misc_feature (13)..(13): n is a, c, g, or t
  misc_feature (18)..(18): n is a, c, g, or t
  misc_feature (26)..(26): n is a, c, g, or t
  misc_feature (33)..(33): n is a, c, g, or t
  misc_feature (56)..(56): n is a, c, g, or t
  misc_feature (59)..(60): n is a, c, g, or t
  misc_feature (65)..(65): n is a, c, g, or t
  misc_feature (74)..(74): n is a, c, g, or t
  misc_feature (87)..(87): n is a, c, g, or t
  misc_feature (96)..(97): n is a, c, g, or t
  misc_feature (103)..(103): n is a, c, g, or t
  misc_feature (115)..(115): n is a, c, g, or t
  misc_feature (119)..(119): n is a, c, g, or t
  misc_feature (137)..(137): n is a, c, g, or t
  misc_feature (155)..(155): n is a, c, g, or t
  misc_feature (174)..(174): n is a, c, g, or t
  misc_feature (177)..(177): n is a, c, g, or t
  misc_feature (182)..(182): n is a, c, g, or t
  misc_feature (631)..(671): n is a, c, g, or t
  misc_feature (703)..(712): n is a, c, g, or t
  misc_feature (861)..(917): n is a, c, g, or t
atcacgtngtttnaatcntcccttgncacattntaaccagttgtttctaaagcaanttnncccancactgtgtnactgggagagatnaatcatgcnnatgaanagatcaccattnaatnaaactatcagggcagacnatctctttcagaaaagtnaaaagtctaccagactggnatnactgnaacatgtcaacccactatgtctccttgggcaatatagtagggaaagttctatgttatctcaggcaggactcctctacattggggcaaagttgcgcaagaggaaatgactgttttccattctctccatgttcctcttcagtgtccttcatccgtgtgtttttattgacaacatccctcctccccaggtactttgagaaatatgtaaaccaagtggaccctttgccaagcccttagatgctattccgaaggcaacagcccagtctctgtgctcctgtcgccccttctccctggtgagtgcctctactttcctccactcttctgcactcacaatgcatcttagcatctaaggatgcaaacctaagaaggagcttgatggagtgtcatcaagagagaaatcatacattttcctaaggcaagaggaaacatttgtgcaagaaatgtctggggtnnnnnnnnnnnnnnnnnnnnnnnnnnnnnnnnnnnnnnnnnatctacagacagatttttggaaaaaaaagggnnnnnnnnnnctttactgctctttctagtaggttagccacctctccctaatgagtcatgaaaatttggtgtatgtgtgtgtgtaaaacatatacatatttaatatatatagatgtaaaatacagatgcacatatgaaaatgtaaaaatctagtgtatannnnnnnnnnnnnnnnnnnnnnnnnnnnnnnnnnnnnnnnnnnnnnnnnnnnnnnnngaaatgacatgaagcaagttatggtaaaagcaactgaaatcttcatatagaaataaatttcttatttatgttcaagttctatttatgggattataagcaacttgctttttttcaggctttgccttttacagaacaaatgtaaagtatgccaatgacagactattaggtttatcttgacattgaatttcattagggtatggtcctaaattcatatttaactcattttctctcctgatacaggattaagtgttcctgtcatgtggattgcttaagttgcacatttacatctagatccatataatcttttcattctattgtcttcatttgcgattctttttcaatcttcacttcctctagaacacatgtgattatttaatttttgataactggcattacacagaagataaaacattcttctggtcaagtgtgtttataaacattttgaaatttgtacattgcaggggtcacttctcctagtgttggtgtcattgccaatgggaacatgaaatgctggccatatgctggaatgggaaatactcaaaatcattaggaaagttaaattacatagaaagcctcagaattaaaaaaaatatataaagaacagtcatatcagagacctagacagagaagagtatcatgaaaatttgactcttgagttagacagaatgaggtttgaatcccagattcagacctccatttgtttctcg

SEQ ID NO: 441345 - DNA, 1771 bp, Homo Sapiens
  misc_feature (86)..(86): n is a, c, g, or t
  misc_feature (118)..(118): n is a, c, g, or t
  misc_feature (263)..(263): n is a, c, g, or t
  misc_feature (330)..(330): n is a, c, g, or t
  misc_feature (361)..(361): n is a, c, g, or t
  misc_feature (367)..(367): n is a, c, g, or t
  misc_feature (371)..(371): n is a, c, g, or t
  misc_feature (384)..(384): n is a, c, g, or t
  misc_feature (386)..(386): n is a, c, g, or t
  misc_feature (393)..(393): n is a, c, g, or t
  misc_feature (410)..(410): n is a, c, g, or t
  misc_feature (437)..(437): n is a, c, g, or t
  misc_feature (541)..(541): n is a, c, g, or t
  misc_feature (559)..(559): n is a, c, g, or t
  misc_feature (575)..(575): n is a, c, g, or t
  misc_feature (599)..(599): n is a, c, g, or t
  misc_feature (1166)..(1217): n is a, c, g, or t
gactttcagatacaaggagattcaaaacttcataaaaatatatgaaattcaaactatacatttaacttaacagaatgtccattttnaatttttacaataagtagagaaacagaatcangttttatgtagtaattcaagatatatataattgcaaataagtgaaaaatttccattttaccccaatttctcatctgaagcctcagatggcatcttgcccaccaggaacaaacacgtgaataaataatatggcataaatgtctttnaagttcccagagaactaactctaagcccatctcacatttgtcttttaagtttttttgttaaagaggngctgttcttaaagagatattccattttagtnactgcncttntcagggggggtangngtgatcnagtaactaaagagagcngagattactctgggatgggcagggggnagtcgtgcaatgttcgttggaacatttccagagcatgcttcaatctctcagtatcttgcaggagcagcagcgttttcatgtggtacaggatggacacgtctganggcagcatgctgtgtgangcgaggcggtccaggngctcctcagcggcatctgcgaggncagctgaagctgcatctctggagacaccgtcataaaaatacatttcctgtgttgacttcaaaaaatttagaatactgtgtgccttttcattggtaattgtatcatcttcctcgctggcgtctgcaccgtcctcctccccggagtctgcaccctcttcctccccagcccatgtcgggtcttcctcgctggcgtccgcaccgtcctcctccctggtgtctttaccgtcttcctccccggcccgtgtcaggtcttcctcaattgtgtccacaccgtcctcctccctggcgtctttaacgtcttcctccccggccggtgtcggatcttcctcactggcgtccgcaccctcttcctgcctggcccgtgtcaggtcttcctcgctagcgtccgcaccatcttcctccctggtatctttaacgtcttcctccccggccagtgtcggggtcttcctcgctggtgtccacaccatcctcctcacaagcctcttccacgccttccccttcattgctgctgtcctcgggctggtacatgaaactgacaccagcagcctttgctgccaagccggctgcnnnnnnnnnnnnnnnnnnnnnnnnnnnnnnnnnnnnnnnnnnnnnnnnnnnncttattgtggtgccatctgtgtgctgtcgctgagatttctcctgtaacagactctgctgtttctctaattctgcttgttctataagaacattattgggatttttaaattttttctttgatttatgcttcctaattcttcttctctttggctggtcatgaggatcctgatcttctgtgtcatccccgctggaggcgttctcggggctcccacagctgctgggctccggccaacaggggacgtagccctcaggaggcccgctggcagtgtagagccgtcgggcagtcggggtctcagagccagtgtctgtcaaaggctcagcatgtttctggctcactttctcagaggtcactttctttggtggattttggacggccagcgtctggggttccctctttccttggccacttggaacaggaggaaaaagtctctgcagcaccttctccacaaacacgtgcttcctgtgcgccgccatgcgggaccctgccgcggacctcagaccacggcgcgcggtcctgagctgagcgccgtgccttccgggttccgccctcctccc

SEQ ID NO: 441346 - DNA, 1429 bp, Homo Sapiens
  misc_feature (126)..(135): n is a, c, g, or t
  misc_feature (314)..(322): n is a, c, g, or t
  misc_feature (388)..(388): n is a, c, g, or t
  misc_feature (1381)..(1381): n is a, c, g, or t
  misc_feature (1383)..(1383): n is a, c, g, or t
gccacttgtaacgtgtgagggggtggttttccccggcaacacaccaggatttccctgtcgcttttttccgcgctgtgggggtgggttttatttttctaacccccggttttttgtttctcctcactnnnnnnnnnnggggggcccccgcccgttgtgttcccgacggggttgtccttttcccctgctcccaaaagtatggggggttgtttccccacaacccacccgcggggtgcctcttttccccgtttaccccccgggtggggcgcacgttcccctttttataaaaagagggtttcttttgtttccgctttttnnnnnnnnnggtgggacacccgagggggtcctcttcgggggaaaattttacttttctccccccttgcacaaaacntgggggtggggggttttttctccgggggaccaacacccccctttttggttttttcccccacagaggcccccttggggggggccccccgggtgtgtgttttttcagagggggtgtttctttttttccccatttgccgggggcataaagggctgcgttccccgcggcccaacccccaattttttttccgcgttcccccagtgggggtaattcgttgtcaaagcggtttttttcctttcccccccgggccccaggtgttcaggggttcttttccttcggattgggtggtcccacaaccaatccgttcgttaaaccaaggcttgtttccccacggcgttttcccccttccattggctgcggtccctgcggggttgggtacatggaaactgaccacccagcagccttttggtggccaagcccggacgctttcttccttttaatatgctgtctcttgttcagtttcatttttttatatttgcttattgtggtgccatctgtgtgctgtcgctgagatttctcctgtaacagactctgctgtttctctaattctgcttgttctataagaacattattgggatttttaaattttttctttgatttatgcttcctaattcttcttctctttggctggtcatgaggatcctgatcttctgtgtcatccccgctggaggcgttctcggggctcccacagctgctgggctccggccaacaggggacgtagccctcaggaggcccgctggcagtgtagagccgtcgggcagtcggggtctcagagccagtgtctgtcaaaggctcagcatgtttctggctcactttctcagaggtcactttctttggtggattttggacggccagcgtctggggttccctctttccttggccacttggaacaggaggaaaaagtctctgcagcaccttctccacaaacacgtgcttcctgtgcgccgccatgcgggacccatcccgggaattccggaccggtaccagccggtggtngnccttttctgctcttctcaccatatcgtaaaaatatctcaactacta

SEQ ID NO: 441347 - DNA, 794 bp, Homo Sapiens
gcttattgtggtgccatctgtgtgctgtcgctgagatttctcctgtaacagactctgctgtttctctaattctgcttgttctataagaacattattgggatttttaaattttttctttgatttatgcttcctaattcttcttctctttggctggtcatgaggatcctgatcttctgtgtcatccccgctggaggcgttctcggggctcccacagctgctgggctccggccaacaggggacgtagccctcaggaggcccgctggcagtgtagagccgtcgggcagtcggggtctcagagccagtgtctgtcaaaggctcagcatgtttctggctcactttctcagaggtcactttctttggtggattttggacggccagcgtctggggttccctctttccttggccacttggaacaggaggaaaaagtctctgcagcaccttctccacaaacactgctgagcccggagcgtccgaggatgtccgcgctgaggaaggtgcgagccgccgggggctgccgggagccgggcgcggggctccgagagccgtcgaggcggggagggcgcggtgtgtcggacccgcggggacgccccgagggcgtcagggttgggggcgggggcgagcgggggtcgtgccgcccgccggggccggagcgctggggaccccagggacagcctgtgctcgggggtcgcgcgttgcgctcctcgccgggctccgcgcatccctggccgcgctcgggggtgccgggaccctgggctccgggggtgcgggagcgcacatccggagaattccggacc

SEQ ID NO: 441348 - DNA, 1056 bp, Homo Sapiens
  misc_feature (7)..(7): n is a, c, g, or t
  misc_feature (12)..(13): n is a, c, g, or t
  misc_feature (20)..(20): n is a, c, g, or t
  misc_feature (23)..(23): n is a, c, g, or t
  misc_feature (28)..(28): n is a, c, g, or t
  misc_feature (33)..(33): n is a, c, g, or t
  misc_feature (44)..(45): n is a, c, g, or t
  misc_feature (48)..(48): n is a, c, g, or t
  misc_feature (59)..(59): n is a, c, g, or t
  misc_feature (63)..(63): n is a, c, g, or t
  misc_feature (65)..(65): n is a, c, g, or t
  misc_feature (68)..(68): n is a, c, g, or t
  misc_feature (74)..(74): n is a, c, g, or t
  misc_feature (76)..(76): n is a, c, g, or t
  misc_feature (78)..(78): n is a, c, g, or t
  misc_feature (82)..(82): n is a, c, g, or t
  misc_feature (85)..(85): n is a, c, g, or t
  misc_feature (101)..(101): n is a, c, g, or t
  misc_feature (104)..(104): n is a, c, g, or t
ggatgangaagnngtttaanaanaagcntggtnccgcacggcanngtntaagtaaaacnccantntangctcangnanttgntgngttccactaacctganganaggcagacctcctccaccctctgcccagcccccctttctgcaggcttgtgtcacccacttgttttggtatagtagtacatcagaggtgttgggtaggagggagatggcaagctttatctggctgtgtgtctactctttgcttgctcttagaagcaccattccaaacgaggaatcagcggggccaagcggcactgaattccttctccaggccttggacacactggtcgttgaggaaaagccgctgaccctgtggcaggaagcgggtgaggatgccctcaatgcggtcagcccgcagcagaaggctggtgctgggcgccagcagccggaggtggtcaaggaggaggcgtgtcagcagccggagcgtgccctcagccagtagcaggttctcatgggcatccagcaccagggcaaagcctaacgagagcacgcccagccacaccaccgtccgtggctcctggaaagggttctctgctgccaggcggaaagccccacgtggggcctcgtgcagcggcacttgctcatctgaggattgcggctgcaggtccatggggggccggccagatgcctgctgctgcagccgacacattgactctacctgcctggccacagctaaaatctgttccttccggagaagcctgtccctctcggcaccatgcggccgtgggtcatcaggtgacttctcagcaccgaagacgcaggagtacagcactcggcaaaggcccgtgtcctcagtattcggggccctcaaggtgtgaatgaggaaggcgtggaccatggctccagggtgggtgtccggtcagccaggcctaaatggggcaccccgccctgaatgtgttgcccactgcagctccggtccgctgtcgtcgaggcgtcgcctcagccttccgtccgggcccgcggactgccaccaagcgctcccctccgtggcaggagagcaatggcgtgcgcggcc

SEQ ID NO: 441349 - DNA, 1038 bp, Homo Sapiens
  misc_feature (71)..(71): n is a, c, g, or t
  misc_feature (163)..(163): n is a, c, g, or t
gggttctcccactaacctggaaggccacagccaggagtttccttcccaccccttttggccagccccctttntgcaggcttgtgtcaaccactttgtcctggtatagcagcacatcagagctgctggtaggagggagatgccaagcttcatctggctgtgtgtntaccctctgcctggcctcagaagcaccatcccatcgaggaatcagcggggccaagcggcactgaattccttctccaggccttggacaaactggtcgttgaggaaaagcagctgaccatgtggcaggaagcgggtgaggatgccctcaatgcggtcagcccgcagcagaaggctggtgctgggcgccagcagccggaggtggtcaaggaggaggcgtgtcagcagccggagcgtgccctcagccagtagcaggttctcatgggcatccagcaccagggcaaagcctaacgagagcacgcccagccacaccaccgtccgtggctcctggaaagggttctctgctgccaggcggaaagccccacgtggggcctcgtgcagcggcacttgctcatctgaggattgcggctgcaggtccatggggggccggccagatgcctgctgctgcagccgacacattgactctacctgcctggccacagctaaaatctgttccttccggagaagcctgtccctctcggcaccatgcggccgtgggtcatcaggtgacttctcagcaccgaagacgcaggagtacagcactcggcaaaggcccgtgtcctcagtattcggggccctcaaggtgtgaatgaggaaggcgtggaccatggctccagggtgggtggtcactgcctccgtaaccttgaggcgcaaggcacttcgggggttgtagtttcttactccggtcagccaggcctaaatggggcaccccgccctgaatgtgttgcccctgcagctccggtccgctgtcgttcgaggcgtcgcctcagccttccgtccgggcccgcggactgccaccaagcgctcccctcgtcttggatcgccacccaggcctcgctc

SEQ ID NO: 441350 - DNA, 1102 bp, Homo Sapiens
  misc_feature (3)..(3): n is a, c, g, or t
  misc_feature (24)..(24): n is a, c, g, or t
  misc_feature (29)..(30): n is a, c, g, or t
  misc_feature (40)..(40): n is a, c, g, or t
  misc_feature (47)..(47): n is a, c, g, or t
  misc_feature (56)..(56): n is a, c, g, or t
  misc_feature (77)..(77): n is a, c, g, or t
  misc_feature (99)..(99): n is a, c, g, or t
  misc_feature (101)..(101): n is a, c, g, or t
  misc_feature (103)..(103): n is a, c, g, or t
  misc_feature (105)..(105): n is a, c, g, or t
  misc_feature (108)..(108): n is a, c, g, or t
  misc_feature (128)..(128): n is a, c, g, or t
  misc_feature (143)..(144): n is a, c, g, or t
  misc_feature (192)..(192): n is a, c, g, or t
  misc_feature (908)..(908): n is a, c, g, or t
  misc_feature (912)..(912): n is a, c, g, or t
  misc_feature (919)..(919): n is a, c, g, or t
  misc_feature (925)..(926): n is a, c, g, or t
  misc_feature (944)..(944): n is a, c, g, or t
  misc_feature (946)..(947): n is a, c, g, or t
  misc_feature (949)..(949): n is a, c, g, or t
  misc_feature (1050)..(1050): n is a, c, g, or t
  misc_feature (1063)..(1063): n is a, c, g, or t
  misc_feature (1088)..(1088): n is a, c, g, or t
ctnatcttggcttctcaagattcnttgannattttaaacnacccacnactgcctgnatcggtttggcctgcccattnattcttgagcctccgtttggtntncncnccnatacttgacctcagtttggncttgccccagacatnnttggcctcagtttggccttccgcagcacagacttgtctcagttttggncttgccccagtagttgcctggtcctaaccttgggtctgaccaccagagggacatcattctctctctcaggcccagcgataacctcttccccagccttcttttcaggcttggcctgggcactaggctcaatctctgccccagtcatggtacaagttacaaagaaagtcaggtaatatactcctcccgtagtctaaacctcaaccacagatctgtcacaggtttgtttcttcacactctgatctttaggtgattaaggatataagcttgggaataagagttagagtcaatatccagtccagtagtcactcagcctccttcccaaacacagtctcagtcaataattcaataatacagatagagtgagaacaggtacaaccaagctaaaggaagacagatatttcctggatgggtgcagacccgttgagggtggttgtcagcagcaactccaccaccagcagagcagccactggaggtggatcttcactgatgtggtgcagtttccccctccttttcttgttcaagtggtgtcaagccccacagctgacagaagggggtcctccagagctgtgagccagtctcctcctcttttccttttttgcagaattggccagccttaaagtaggcctccagaaatccaggcaatattcttgctcttttatttcaagcctctcttctacagacgctcactgtgtcctgtcagaatacgccagaccttnagangcccagngcccanntcttcggcctccccctcntnncntcagctctcctctggctcacttggagccactgctttccccgcgatccgaacgggaaagacgcgtcccgccccccacgcctctgcaccaaagtaggcagggntgcgcaggatgcngcaagaaccgctcgccgcgagggtntcgggaaggggggc

SEQ ID NO: 441351 - DNA, 1404 bp, Homo Sapiens
  misc_feature (89)..(89): n is a, c, g, or t
  misc_feature (841)..(841): n is a, c, g, or t
  misc_feature (843)..(843): n is a, c, g, or t
  misc_feature (856)..(856): n is a, c, g, or t
  misc_feature (860)..(860): n is a, c, g, or t
  misc_feature (863)..(863): n is a, c, g, or t
  misc_feature (1096)..(1096): n is a, c, g, or t
  misc_feature (1103)..(1103): n is a, c, g, or t
  misc_feature (1128)..(1128): n is a, c, g, or t
  misc_feature (1139)..(1139): n is a, c, g, or t
  misc_feature (1187)..(1187): n is a, c, g, or t
  misc_feature (1211)..(1211): n is a, c, g, or t
  misc_feature (1218)..(1218): n is a, c, g, or t
  misc_feature (1223)..(1223): n is a, c, g, or t
  misc_feature (1228)..(1228): n is a, c, g, or t
  misc_feature (1254)..(1254): n is a, c, g, or t
  misc_feature (1256)..(1256): n is a, c, g, or t
  misc_feature (1281)..(1281): n is a, c, g, or t
  misc_feature (1335)..(1335): n is a, c, g, or t
  misc_feature (1341)..(1341): n is a, c, g, or t
  misc_feature (1357)..(1357): n is a, c, g, or t
  misc_feature (1384)..(1384): n is a, c, g, or t
  misc_feature (1387)..(1387): n is a, c, g, or t
  misc_feature (1399)..(1399): n is a, c, g, or t
  misc_feature (1404)..(1404): n is a, c, g, or t
gccggccgggagcggtggcgggccgagcttcggacctcgggccggcggagagggtggaccccgcgtcgctctcggcaccccaggaacancggcggcacggacgccttggagccccgcggccgggccgcgatgtgcttttctcctgtgttcgctgcccgggatgcggaatcttgagcctcggtgtcgggttacagagttgtcctggtgacgggatgcggagcgtttcctcctttttgttgtgggggcggctggtggcaggggcagctggtggcagggttgcccacgctaatctccgagtctctaagggcaccgtctttcctggatccctcttgcgcctcgtccataaaggcagacccgcgggcgcgcgccggcaacctgaaatcagagcaggcgtccgtggcgctcaggaaccttgctgagcttcgccgatctttcattgttgcttcatttgggtaccaagggcctctcattctgtggattctttgcctggaggagccccccttaatgttgctaatcacgtgtggttaaattgctcgtaaattccgaacaaaacaaatagcgacctgtgttacactgtttcttggtaactgggaaagttactggtggcttgaagtatacgcagaaaatacaaagattaaaaactagggaagagttcactgaatgaacaccgtaacatttctgctctgcagggtaaaataatttcgggacccaggtctgggaaagatttgtattaacaaggtaaacggtgggtagagtgcctgagaagctattcgtatcgtctttggtagcctctgggcactaggactagacatggaattaggggtcccccgacaatgacggnanttttaggttaatngaanccntctgccacttaagggaaagaaagcgccaaaatgtagataagttgatgttcacccttaaagttatcgtgtgaggtcatgatttgtaggaggattaaggaatgtatctctggaaagggcaagaacgttgcttttaaaagtctaattggttctgaagttttatattttttctgctgattgctttaaaatgttcagctactagagagaaaaaaagtacagtaaaagaaacccccaantcagagncctatcagactgagaatatgtattntctcatgttcnaaagatacagaatacctgtgtggtgtaaaatgtgaaccaaaaattgtntcatttttgtaagtgtgccccccncctgatntaatnacacntaattgttcttgtttatgactctgcntnttatggtgatgttgatcattttagnccttcgatcatagcactgtatcatcttaaaagttaataatagattacttgtaanacaggntcactatgtgagaatncgtcaagctgtatgtacatttattatngtntcttcatgtagnataan

SEQ ID NO: 441352 - DNA, 2697 bp, Homo Sapiens
  misc_feature (1907)..(1907): n is a, c, g, or t
  misc_feature (1915)..(1915): n is a, c, g, or t
  misc_feature (2032)..(2032): n is a, c, g, or t
  misc_feature (2039)..(2039): n is a, c, g, or t
  misc_feature (2045)..(2045): n is a, c, g, or t
  misc_feature (2063)..(2063): n is a, c, g, or t
  misc_feature (2073)..(2273): n is a, c, g, or t
  misc_feature (2282)..(2299): n is a, c, g, or t
  misc_feature (2326)..(2326): n is a, c, g, or t
  misc_feature (2340)..(2443): n is a, c, g, or t
  misc_feature (2466)..(2466): n is a, c, g, or t
  misc_feature (2483)..(2483): n is a, c, g, or t
  misc_feature (2486)..(2486): n is a, c, g, or t
  misc_feature (2518)..(2518): n is a, c, g, or t
  misc_feature (2558)..(2558): n is a, c, g, or t
  misc_feature (2563)..(2563): n is a, c, g, or t
  misc_feature (2570)..(2570): n is a, c, g, or t
  misc_feature (2572)..(2572): n is a, c, g, or t
  misc_feature (2596)..(2607): n is a, c, g, or t
  misc_feature (2619)..(2619): n is a, c, g, or t
  misc_feature (2621)..(2621): n is a, c, g, or t
  misc_feature (2642)..(2642): n is a, c, g, or t
  misc_feature (2655)..(2655): n is a, c, g, or t
  misc_feature (2659)..(2659): n is a, c, g, or t
gggaaggaagagggtaattctcagcttatgatcgctgcatgtgacagggtgagctgtgcgttccctgcttagaatcaagaagaggtcttagttcatctcactttgtcgtggtgtctgcgtgtcgcttcatgcctcacagaacatgggctggctacgagggtcaaaccaggccacagcaacgcgtcaggggccgcttgctttcttaggagcaacaggtccagaggcttccgctccaagagggactggggcctgggccaggaccttgccgaaaatcaaacgaagcccagacaacctgctggggctccaacccttcctcccaccaccaccgccccgcagaatttgggccgctgagaccgctgcaggcgtgccgaccacggctgccccggcccggaaagcagatttgcccctttttgcggggtaagggtggagagggcggcgtcggggggagtcgagtctgcccgcccaggccccgctcggagccgcaggctgggagggcggcgggcgcagcgaccccgggcctcggtccgcccggcagcggtcctcaccctgcagcacaagagccgccggcagttcttgctgttgccgtagctctcgccaaagctctgcgtcaccgaaatgaagtcctgatgaagcagcggcggcggatgcgtggaagggggcctcgaggaaccaccggcggcatcaggagacccggtcctgtaaaagactgagagctccgcctctccgatactcgcgggcagccattgcggcgcacagaaccgtccgcgtgtgagcagcgcgcacgcgcacgcaatgcgcctcaaccccgcagcctatgcgcctgcactgagagctcacggcttgcggcgcctgcgtctaccccgcgcgcagtcgccacggcaacagggcgggccttggttctgcttcgggcgtggtcggtgcatggtcctccagcactgttcgccccgcgggtctggtcctgggttcctttcgcctcctgtcgtcgggctgcaccggctttgcccacggcctcgcggggagacgcagacactcgggacccggggaggcgcccgggcggggccgccatgttgtcagggagtgcccgcgtcccagctcttcggttccgggacccgcggcgcggggatggggctgggctgcccttggtcgccgtcctgggctggtggccacgctggccgcgtggtcaccggcaagaagcccagggcctcacccgggcgcggcgtcgcgggggccgggggaaggaccggaccctcccgaggtcgcggacccggccgggctgcggcggggctggggtggctgctaccccgagctaagctggctgcgccgcatctcacggtccccggggcccgagcgctgcgcctggaccggcgccgagcgaggcggccaatcggccggctggacccacagtccccgcgccataggcgggtcggggctttcagacccggctcccagccctcgaactcggtaaccttggaggtcagcttgagatgactgcgcttcctgcacgcgttgtcctccccagaaacgcccaaaatggcaaagcggcgtccgtggccgcccgaggccctccctgcctgggttctccccagccgaacctcacgcccggcccctccttcattctctcctggccaggctgctcctgcccttgggcgaatccgctgcgtcccacggtcctgactgtggcatttctgcgtgtctggagggctccccgggcagcgacgtcctgcttagcacttggctcgtctaactctgtttccctggccttctgcctcttctaggggtcatctttaggtttctgctggtctctgccccctgtgacacttgctggtacccaaatgaaagtcgtttatgtcacactctaacaagaggccctgaagaagccctcacaaaaacattagcaacggacgccngcggcaancccttctaacctttggtctttatggtttcaaagcagtttatgggaacttctcttttttaaaagattccccttggggccaggcgcggtggcttctgtaatccctaggactttgggagnccgaggnaggtgnatcacttgaggtcagganttcaagactnnnnnnnnnnnnnnnnnnnnnnnnnnnnnnnnnnnnnnnnnnnnnnnnnnnnnnnnnnnnnnnnnnnnnnnnnnnnnnnnnnnnnnnnnnnnnnnnnnnnnnnnnnnnnnnnnnnnnnnnnnnnnnnnnnnnnnnnnnnnnnnnnnnnnnnnnnnnnnnnnnnnnnnnnnnnnnnnnnnnnnnnnnnnnnnnnnnnnnnnntctgacccnnnnnnnnnnnnnnnnnngaaatttcccgtgggcggggcacagtnactcatgcctgtannnnnnnnnnnnnnnnnnnnnnnnnnnnnnnnnnnnnnnnnnnnnnnnnnnnnnnnnnnnnnnnnnnnnnnnnnnnnnnnnnnnnnnnnnnnnnnnnnnnnnnntgagtccagtgtggtggtgtgcncctgtggtcacacagcnacnctggaggctgaggtgggaagaccacctaagcnccaggaggtcaaggctgcagtgagccatgattgcaccacngcacnccagccngngcaacagagtgagatccagtctcnnnnnnnnnnnnttccgcctttcntnaagccccacgccacccccccnccatatgcctgtncacnactgaggcttgcatactctgcattgcaattatgtgata

SEQ ID NO: 441353 - DNA, 1335 bp, Homo Sapiens
  misc_feature (1109)..(1109): n is a, c, g, or t
  misc_feature (1203)..(1203): n is a, c, g, or t
  misc_feature (1205)..(1280): n is a, c, g, or t
gggacggaaagcgggagggacaaattgccaatgtttggagtctggtttccaggttgccgtttttgggggctctgggtgtggcggttgccgtagctgaaattggctgcaccatgtcggccttcgagaagcctcagatcatcgcccatatccagaagggcttcaactacacggtgtttgactgtaagtgggtgccctgcagcgccaaatttgtgaccatgggcaacttcgcacggggcaccggcgtcattcagctgtacgagatccagcacggggacctgaagctgcttcgggagattgaaaaggccaaacctattaaatgtggaacatttggtgcaacatctttacagcagagatatttagctactggagattttggtggaaaccttcatatatggaatttagaagctccagagatgccagtatattctgtaaagggccataaagaaattataaatgccatagatggcataggtggactaggaattggagaaggagcacctgaaattgtgactggcagccgagatggaactgtgaaggtgtgggacccaaggcaaaaagatgatcctgttgctaatatggaacctgtacaaggagaaaacaagagagactgttggactgtggcatttggcaatgcttataatcaagaagaacgtgttgtttgtgctggctatgacaatggggatatcaaactatttgatctcagaaatatggcattacggtgggagacaaacatcaaaaatggggtgtgtagcttggagtttgacagaaaagacataagtatgaataagttagtagccacatctctggaaggaaagttccatgtttttgacatgagaacacagcatccaaccaaaggttttgcctctgtttcagaaaaggctcataaatctactgtgtggcaggtccgacacctgccgcagaacagggagctctttctgacagctggaggcgccggcggccttcacctctggaagtatgaataccctattcagcggtcaaagaaagattctgagggaatagaaatgggagtcgcaggttctgtaagccttctgcagaatgttacgttgtccacccagcccatttcaagtttggattggagtccagataanaggggtctctgcgtctgtagttcatttgaccaagcggtgagagtactgatcgttacaaagctcaataaaatttgacttcaagactttggacttngnnnnnnnnnnnnnnnnnnnnnnnnnnnnnnnnnnnnnnnnnnnnnnnnnnnnnnnnnnnnnnnnnnnnnnnnnnnngaaatccgagaccatccctggctaaacatggttgaaaacccccgtcttctactgg

SEQ ID NO: 441354 - DNA, 622 bp, Homo Sapiens
ggatagtttttccaagtccaacaatgctacgctgatatctgtgcttccacagatatcaaggaattcttccaaggttcagaagggaaatggtctaccccaggtcatccagttagcttaaaaggagaaataagcccagattctctgcccttcaagtatctgccccctaccccagactctcccatgtacagctatttaaaaatctgatgagtaaatcacccatatattaaggcaagagctttcaggctctgcagtctactcttctgagccactcctaaagagtctacatgcaggcaattgtatcccacactctggcctcacccatgctctgtggacttcatggaagattcaaacaatcgatggaatcagggcttgtgaaaggtgagcgttttgaaattcctcctgccttgtcttgttcctgcagcaggttgaggccagtcttctgctctctctacacccacatggcaccagacataatggactataccacaatgagcctccttcattgtctgggaggctcaacaaagaatgagtgagccccagtcttatccaaagaaaggagcctcacatctccccaaatgcctgtgtccccccgtgtcaacattcccacccacctccttgggct

SEQ ID NO: 441355 - DNA, 955 bp, Homo Sapiens
  misc_feature (373)..(373): n is a, c, g, or t
  misc_feature (378)..(378): n is a, c, g, or t
  misc_feature (384)..(384): n is a, c, g, or t
  misc_feature (390)..(390): n is a, c, g, or t
  misc_feature (393)..(393): n is a, c, g, or t
  misc_feature (406)..(406): n is a, c, g, or t
  misc_feature (410)..(413): n is a, c, g, or t
  misc_feature (415)..(415): n is a, c, g, or t
  misc_feature (420)..(421): n is a, c, g, or t
  misc_feature (482)..(482): n is a, c, g, or t
  misc_feature (597)..(642): n is a, c, g, or t
  misc_feature (678)..(678): n is a, c, g, or t
  misc_feature (681)..(681): n is a, c, g, or t
  misc_feature (710)..(710): n is a, c, g, or t
  misc_feature (768)..(768): n is a, c, g, or t
  misc_feature (773)..(773): n is a, c, g, or t
  misc_feature (775)..(776): n is a, c, g, or t
  misc_feature (835)..(835): n is a, c, g, or t
  misc_feature (837)..(837): n is a, c, g, or t
  misc_feature (905)..(905): n is a, c, g, or t
  misc_feature (911)..(911): n is a, c, g, or t
  misc_feature (914)..(914): n is a, c, g, or t
  misc_feature (952)..(952): n is a, c, g, or t
caaaattaacttttttattaatttaaaaatccagaaatacagtgactacataaataagtaccataattaggtacatgtcctgtgagaacagtgaaagggtaatactgttatgttactcttacttgtttacatgagttaactagaaaatggctacaactgctaaatgatgcttatggtctttgttgttccaagtgtttatgatacaaataaatacacaagaggaaccacatccattcttctctactaactacaggcagcttggcctctttaccctatgtcctattctctacacaacaccaaacactggggggtttctactttgacttaacacaggctccccaggctcctgcttcccacagcattttgcaaaggngtgtnccagcncctggnggngggagtatatctngggnnnntntctgnntgttctcttaaggctaagctttcagagaacacctgggtgggaaggctttgggatgaatcanccagaaggagaaacacctctttgccttaggatctagttactagtctccacattatggaatcactgccacctctgggacggagggagcagccgcataacaccttcccccctttacnnnnnnnnnnnnnnnnnnnnnnnnnnnnnnnnnnnnnnnnnnnnnnaactaatgctttgtgacctctcaaccgggatgtacngcntctctctctccaaggagaacgtgtgtgangtgctggtgagagtcttgtcccaagaaaccctggccataaggcccttgtgtctctttnataananntgactcctttatgccaggttgtcataaagactgaacattttacattttcccctattggnancaaaccctcttaggaaagaattctctcacctatagtcatggaatgagacatatggggtttctgggtcntaaaanatntctacagttcattcctgcccctcagagggaacaaatcnaga

SEQ ID NO: 441356 - DNA, 948 bp, Homo Sapiens
  misc_feature (619)..(619): n is a, c, g, or t
  misc_feature (721)..(721): n is a, c, g, or t
  misc_feature (743)..(743): n is a, c, g, or t
  misc_feature (907)..(907): n is a, c, g, or t
cgcgcttgggcggcggaggctgcagctacctcggcgccggctcggctctaggacgtgtcgggctgcacgggtcgggggcggctccctgctgcttccgagcctagccgcctggccttcggcatttgcaggcagacacactgccctccagaaacgatgggtgtcgctagatccagctgggactctgccagcctccggcactcagtctaagagaagggccatcttccagccctgctgtccctgcctgtcatggccacattcggctgctgtctgcatgtctggggacacagggcacccagccccagccctgagaagttaagccaggccttctggctcagttccacaggggcactccagaccccaggcccctttcagagcaaaagcaactgatgctatgggagaagcccctgcccacctgtccactcgcctggcactgcccactctgagacccatgcactgggttcccctggaggtgccaaccctgtgagtccctccctgtcccctgacgctgagaaggccctgccaacccccaccatgtgtgaggtgatgccacacaatcaatgagcgggggaccccctgggtccccctcatggcgccgatgctgacgccaacttcgagcagntgatggtgaacatgctggacgagcgggagaagttgctggagtctcttcgggagagtcaggagaccttggcggccacacagagccggctccaggatgccatanacgagcgggaccagctccaagngccaccttaaactccgccctcccccaggaatttgccaccttaacccgggagctgagcatgtgtcgggagcagcttctagagcgggaggaagagatatcagaactgaaagcagaacggaataacacacggctgcttctggaacatctggagtgcctggtgtcccnccatgaacggtcactgcggatgactgtggtgaagcgcaggc

SEQ ID NO: 441357 - DNA, 892 bp, Homo Sapiens
  misc_feature (696)..(696): n is a, c, g, or t
  misc_feature (706)..(706): n is a, c, g, or t
  misc_feature (708)..(708): n is a, c, g, or t
  misc_feature (715)..(715): n is a, c, g, or t
  misc_feature (717)..(717): n is a, c, g, or t
  misc_feature (720)..(720): n is a, c, g, or t
  misc_feature (722)..(722): n is a, c, g, or t
  misc_feature (727)..(728): n is a, c, g, or t
  misc_feature (741)..(741): n is a, c, g, or t
  misc_feature (781)..(781): n is a, c, g, or t
  misc_feature (786)..(786): n is a, c, g, or t
  misc_feature (789)..(789): n is a, c, g, or t
  misc_feature (801)..(801): n is a, c, g, or t
  misc_feature (827)..(827): n is a, c, g, or t
  misc_feature (880)..(881): n is a, c, g, or t
ggcctgggtggcgaattcggcacgaggcccaggtggagatcctggagggccgcaccgagtgtgtgctgagcaacctgcggggccggacgcgctacaccttcgccgtccgcgcgcgtatggctgagccgagcttcggcggcttctggagcgcctggtcggagcctgtgtcgctgctgacgcctagcggtgaggccccaggcgggggtgtaggaggagccagggcgaatcacggggcaagcccaccgccctgacctcctccccgcctcttagacctggaccccctcatcctgacgctctccctcatcctcgtggtcatcctggtgctgctgaccgtgctcgcgctgctctcccaccgccgggctctgaagcagaagatctggcctggcatcccgagcccagagagcgagtttgaaggcctcttcaccacccacaagggtaacttccaggtaggtggcctggttgtcccctcagtgcctgggcttccctgcttcttgcagccaaactgcaggcctctctgagcaggttggtgctatattcttcagctgtggctgtaccagaatgatggctgcctgtgggtggagcccctgcaccccacttcacggaggacccacctgcttccctggaagtcctctcagagcgctgctgggggacgatgcaggcagtggagccgggggacagatgatgagggcccccctnctggagccantnggcagtnancantncccanngatacctattctngtgctggacaaatgggttgctgcccccggaacccgcccangtganggnctcccaagggcntgggtggcagtgtggacatagtggcnatggatgaaggctcagaagcatcctcctgctcatctgctttggctcgaagccnncccagagggag

SEQ ID NO: 441358 - DNA, 881 bp, Homo Sapiens
agacctttaagttccggtttgaagaatgcccaagatgttcagaatacccaacaaagggtacccgggtaacttttaggtgggggtgggggtagggggccagtttcagggccacaggtgtccatggacgccagaagctgggagctgggggtccaggaatagtgtactcaaagctggcagcagaggcttccctctggggctgggcttcgaggccaaagcagatgagcaggaggatgcttctgagccttcatccatggccactatgtccacactgccaccagggccctgggaggtcctcactgggcgggttccggggcagcaaccatttgtccagcaccagataggtatcctgggcatgctcactgcccactggctccagcagggggccctcatcatctgtccccggctccactgcctgcatcgtcccccagcagcgctctgagaggacttccagggaagcaggtgggtcctccgtgaagggggtgcaggggctccaccacaggcagccatcattctggtacagccacagctgaagaaatagcaccaacctgctcagagaggcctgcagtttggctgcaagaagcagggaagcccaggcactgaggggacaaccaggccacctacctggaagttacccttgtgggtggtgaagaggccttcaaactcgctctctgggctcgggatgccaggccagatcttctgcttcagagcccggcggtgggagagcagcgcgagcacggtcagcagcaccaggatgaccacgaggatgagggagagcgtcaggatgagggggtccaggtcgctaggcgtcagcagcgacacaggctccgaccaggcgctccagaagccgccgaagctcggctcagccatacgcgcgcggacgg

SEQ ID NO: 441359 - DNA, 2901 bp, Homo Sapiens
  misc_feature (80)..(80): n is a, c, g, or t
  misc_feature (83)..(83): n is a, c, g, or t
  misc_feature (136)..(136): n is a, c, g, or t
  misc_feature (154)..(154): n is a, c, g, or t
  misc_feature (410)..(436): n is a, c, g, or t
  misc_feature (591)..(746): n is a, c, g, or t
tagataaaaacacgcgcgcgcgggggcgaatgaattaggtgagggggggcgttataagaaatcacgtgggcgtttgtgtnatnaagagtgtgtgtctctccccgcccggtgcgggctggagggaagaaagatcctnttaaagagacggagatantacggccgccccgccgtgttttcgcgggggaacaaattggagttcaccccgggaggggggaggcagcgcggacaataatatgggtggtgtggtggaggagggcgcgtcccgtctgctgtggggcaacctccccgctggtgtgtgggaggatagaccccgcggcctagagagggcggcgcccctgatagagggtgcgcgccgcttgtgggggaggtgtgtgttgggaagagagcggccgtgggggatgcgccccccnnnnnnnnnnnnnnnnnnnnnnnnnnnagagtgccgaaccccccgttgttccgggccgggggtgttttctttttgaaaaacgagattgggcccattttcccctttctcatggggggcggccggcccaccacagaaggtgtttaaagaaattttctagggggcgggggccccccccaaaaaannnnnnnnnnnnnnnnnnnnnnnnnnnnnnnnnnnnnnnnnnnnnnnnnnnnnnnnnnnnnnnnnnnnnnnnnnnnnnnnnnnnnnnnnnnnnnnnnnnnnnnnnnnnnnnnnnnnnnnnnnnnnnnnnnnnnnnnnnnnnnnnnnnnnnnnnnnnggacaccaactgcagcgtgatttattggacaagacgtgcacttttcaacagggcctcagtaaccacggtttccttcactgatcagtacaggaccagggtaaaggggcttaaagataagaaagacaaactcttcccaggaacagatggggaaagaaaggaggaagaagaggcatgtcctcccttcctccttccctagtactctgggcctccgttcaccccgtgctggagtggggctgaccaagggaagctgggggcagtgtgtgtcacagccagacatgagctgaggctgtgactgtccactcagggtcaaaatggccaggtggacgatcaactctgtgcccactcaggcccccagatctggtcactgttccaggctcccggcacccgccccaccgtgggtatggttaaaaaatacaaaagcggatccaatgcaggatgtcatatgcaaacatacacagggaccgagcttctacagtctctcctggccacagcctccaccgacaggtgtggcagagggcaagtgcgctgaggtgcttggagaagggtctcttctccatccaggtaggatgggcggctgctgtcactaagcttggggaaggtggttgatgaaggaagagcagagactgaagggtgggaccggagcggggcttctcccctcctccagcaggggagggggctggccagtcagaagcaggttgctggtacctacgggaagccagtcgggaagaggctgaggggctggctctcattggtgggcagcggagatcggtagccatcaaagtttcttggtatgctgccgctggtggagcctgagctgttactcagagtctcgatgcttccctctcgctgaagttctgttccggatcccacgacgtcccggctaggtgactcggccatggcgtcggcaagtcgctcccggaggccctcctccgtgtgctccatggaggacatgtgccgcagcccgaagccctcaggccagctcccgcacacctccagcagggtcacgctcctgtcaaaggtaccttgctgcgatgcctcctctgtcaagtcctgtgctcggtcctgactcagccgggggcaggtgagcctgcagctccatggcccatgtctgactcttctcccagtggccatggctggctgcatgcaatgttgactcatcctagagtggctgtggatggtttccatcaggccttgaggcttcaggtgggcagaggaccttgcaccttgcacagaggggtgatgggctgagcgtgagtgtgaaggcctggatgttccccactcaagggcggtggaagagtccactgaggcagcatcaatcactgtggaaactccccttcgatcagagactggacgggatgaccctggcatgctgacggggtcagagcggactggctggatcctgagactgttgagatcaagatcatctgtatcaaaatccaaaagaggctgtggcgtgtcactcggaccatgagactgcaacacagatgaactggatgagataactgtggtttggcctgagggatggatggttttgaactggaactgtggacccatccacagacgtctatggggtccagtgtgtgttacaatttcaacctgggaaagccattcttcatcttcctgtccactatggtcagaagctaaactgtcgtaagacccatgtcgagtaatgggcccaggacttccagggggaaccaggccagcaagcaggaactgataatactgtactgcatctgcagcgaggagcagagggtggtttgcattaaacggtggctgcaattcattccattgaggggttctaaccagagtccagctggctcgaggcgatgtcatcatttccagtggtgtgtcgtcactaatcttgggtgcagtgctgaggggtcgcggctccatcatgtgttccactaaggtgccatagcaactgataatgtacagggactcaactacaacttgtttggactgatctttttctcttttcagacctgcattatttgcaaaccatgacctggatgttccgaagatagcagccacacaaaattctccgcccatcgatttgctgggtgaaatttgtggaggaggtttaactttgcaaattattggtgccttaagatgtctgatttgggatgaagttttgctgaaaaacacagcaaatgcc

SEQ ID NO: 441360 - DNA, 524 bp, Homo Sapiens
  misc_feature (50)..(50): n is a, c, g, or t
  misc_feature (58)..(58): n is a, c, g, or t
  misc_feature (83)..(83): n is a, c, g, or t
  misc_feature (106)..(106): n is a, c, g, or t
  misc_feature (109)..(110): n is a, c, g, or t
  misc_feature (112)..(112): n is a, c, g, or t
  misc_feature (196)..(274): n is a, c, g, or t
  misc_feature (298)..(298): n is a, c, g, or t
actctttcaccaggctggagcaagtggcgcggagacgggtcgctgcagcncgtgcggncgctgcctgggtgtggtgcgagcgntcgtcccgccgtcagcctccccnccnncngctgaggctacaggcatgcgtgcaccatgcctggccaatttttttagtattttctgtagagaaaaatacaaacacgtcgaccannnnnnnnnnnnnnnnnnnnnnnnnnnnnnnnnnnnnnnnnnnnnnnnnnnnnnnnnnnnnnnnnnnnnnnnnnnnnnnatgaaacacgatgctcaggctgtnctgttttcaaagccctttcacacacagtccttaccttccttagtccctgaacagcctcattgtggatcaggattattatggccccaattgcatggccaagggagtgggtggagagaggctgagcccaggaccattcaggacagaactgtggtgcaaatcctcctacctttctgagccagtgagctttctttgctgaggtcctgcctctctgcatcacagtgatccc

SEQ ID NO: 441361 - DNA, 1481 bp, Homo Sapiens
cattggagacagaagccagttttataaaacataaataatcatttatactccatgattagcaatggatcctgtctgaagtaaacaaggacaattaatacagtacaagatatttgtggttttgttttttataacccactaagccaagatttgtatctctgtatggaactgattttcaaatggacagaaatggtctttgatctttctgaaccacttgtcttcaaattcttctgaggatacagtcaccaaggcagtcagggctacggagccaacacacttcacctctgggtgaacttcatcttttattttttctgggatatcttctcccataacctcagctatcaacagcaaagtgtcttctttgaagctgaaccctttcattttatcttcaatttcctgctgagtccttaagttcctctccaaagcaaacgatgtttgctgaggttgggtaaactgaagcagaagcctggttcgtataaaagaggcacatgctttcagctgagtctctatcaacactgtttctctcttttctgccatacagttttggatatttgtcagagctttctcatttttctggctattactgctattcgcttccacagaaaataaagagctctcaggcaaggtttcaggaaaacacaaaagacagtcttttcctgagtgtggaaagaaggatttgatagttttgtcacttgaggtgaaactgtgctgtttctgagatgacgcaagtgctgctgaaagagctggccccagattcaggtaagcctctgccaatttgccccagttccaaggattaaaaggatgcaaagaaatcagtttctgcaggccagaaaattgttttctccaagttctgcaaacttgaacaaatagcaagctggaggtagagtaccgtggttaaatggtctgtgttggttgctttattttccacagtttgcagcaatctccagcgcctccatatgcctacccaggtgagccagacaccgagcctgaccttcctggacatcccttttcatggcaaaattggttgatgacaatttttcagagatactggaatactcctgcagtgctttctgatactcttgtcgtctgtaggccaggtctcctttgaatttcttgagagtcagcacttcaacatcatcactgctttctgtttcttcataaaaccactgcggctcgcagagcttggcgcagtaggacgcgggcggtcctgaccgccgctccggcctctcctcgaacaccgagtcctcgaactcgccgccgaacaaccagcacccggaatccatctcgcgcccgcggcggggcaacgagaaccccgccgtaatgccgaaatcccggcaatgtccgtaccgtcgactgaaaccttcgatataatagtatgctatacgaagttatgcggccgcttcctcgctgccactgactcgctgcgctcggtcgttcgctcggaaacagagctagcgccctatagtgagatatcaaagttcttt

SEQ ID NO: 441362 - DNA, 1039 bp, Homo Sapiens
  misc_feature (504)..(504): n is a, c, g, or t
  misc_feature (507)..(507): n is a, c, g, or t
  misc_feature (655)..(655): n is a, c, g, or t
  misc_feature (681)..(681): n is a, c, g, or t
  misc_feature (687)..(687): n is a, c, g, or t
  misc_feature (713)..(713): n is a, c, g, or t
  misc_feature (732)..(732): n is a, c, g, or t
  misc_feature (747)..(747): n is a, c, g, or t
  misc_feature (756)..(756): n is a, c, g, or t
  misc_feature (774)..(774): n is a, c, g, or t
  misc_feature (776)..(776): n is a, c, g, or t
  misc_feature (782)..(782): n is a, c, g, or t
  misc_feature (800)..(800): n is a, c, g, or t
  misc_feature (808)..(808): n is a, c, g, or t
  misc_feature (814)..(814): n is a, c, g, or t
  misc_feature (821)..(821): n is a, c, g, or t
  misc_feature (823)..(823): n is a, c, g, or t
  misc_feature (830)..(830): n is a, c, g, or t
  misc_feature (834)..(834): n is a, c, g, or t
  misc_feature (839)..(839): n is a, c, g, or t
  misc_feature (843)..(843): n is a, c, g, or t
  misc_feature (845)..(845): n is a, c, g, or t
  misc_feature (847)..(847): n is a, c, g, or t
  misc_feature (850)..(850): n is a, c, g, or t
  misc_feature (864)..(864): n is a, c, g, or t
  misc_feature (866)..(866): n is a, c, g, or t
  misc_feature (873)..(873): n is a, c, g, or t
  misc_feature (889)..(889): n is a, c, g, or t
  misc_feature (907)..(907): n is a, c, g, or t
  misc_feature (913)..(913): n is a, c, g, or t
  misc_feature (921)..(921): n is a, c, g, or t
  misc_feature (930)..(930): n is a, c, g, or t
  misc_feature (952)..(952): n is a, c, g, or t
  misc_feature (959)..(959): n is a, c, g, or t
  misc_feature (963)..(963): n is a, c, g, or t
  misc_feature (965)..(965): n is a, c, g, or t
  misc_feature (967)..(967): n is a, c, g, or t
  misc_feature (974)..(974): n is a, c, g, or t
  misc_feature (979)..(980): n is a, c, g, or t
  misc_feature (989)..(989): n is a, c, g, or t
  misc_feature (994)..(994): n is a, c, g, or t
  misc_feature (1002)..(1002): n is a, c, g, or t
  misc_feature (1008)..(1008): n is a, c, g, or t
  misc_feature (1020)..(1020): n is a, c, g, or t
  misc_feature (1028)..(1028): n is a, c, g, or t
ttttttttgttctgatatgaaatttaatgtcttaggctgaaaaacactaaatttccatttttttgtaggtcagaagtggttgcaaactggatttttagactcttcctgttgggggtctcggacatttgctcttttccacagcggccaattcttcagagccacaaagaactgggcgacgcaggccagaggtgtgggagtccagcccttggttcgaatcccgctctccactgtccatggggttctcagcaagccctctggcctctccaagcacacgcagggttcctcaagcaattccaaactccagagaagacatcccaggtaaaatcggatggcagggacctgggacaccgctgtgacgggcagcccctgggctcgagtccacaactcccacgggagggcagggccccatcctgctcacaccggggtccccagccctcgatcctcacgagtcctcgtccaagaacaaactgtgcacacacgggcggtcagtcctggattcaaggnggnccatcggagctcgaactcaacggcctgacctagggacgcctccagtcccacccctaccttttggaggtgggagaatcaccgtgcaggtcactgacccactgaccacagatcaccactctctcccgcccccgtttcttcctcctgagancactgctgccttcaaacgcaagtaanccaaanctgctcccaaacccatggcaagactnacccggagcctaacccagncctgccccgagcctnaccctgatnctcgagactagaccccanantggaancggtcccaaagtgggacnacaaagancacagnggggacnancaggtcnccanagagnaaancngngtnggactccagggagntnattgtancccttttcctggggancttcatttactttggcanggacgngtgttcgntttctcatnaacgagggcttcaagatgtgtnaagtacntganananggctggngcggnngtctgtttnttagntgagtttngacgcntacactccgggntcgttctngactggggaga

SEQ ID NO: 441363 - DNA, 402 bp, Homo Sapiens
  misc_feature (357)..(357): n is a, c, g, or t
  misc_feature (364)..(364): n is a, c, g, or t
  misc_feature (386)..(386): n is a, c, g, or t
ttttttgttctgatatgaaatttaatgtcttaggctgaaaaacactaaatttccatttttttgtaggtcagaagtggttgcaaactggatttttagactcttcctgttgggggtctcggacatttgctcttttccacagcggccaattcttcagagccacaaagaactgggcgacgcaggccagaggtgtggggagtccagcccttggttcgaatcccgctctccactgtccatggggttctcaggcaagccctctggcctctccaaggcacacgcagggttcctcaaggcaattccaaactccagaggaaggacatcccgggtaaaatcgggatgggcaggggacctgggggacancgctgtntacggggcagcccctgggtttnggagttccaacaactt

SEQ ID NO: 441364 - DNA, 1694 bp, Homo Sapiens
  misc_feature (990)..(990): n is a, c, g, or t
  misc_feature (1202)..(1465): n is a, c, g, or t
tttttggtctaacgggcagtagagtgtccggcttcggtgccgagtgccaccgcgagtgggccgagacgcggagggaggcgcggccggagctcgggtcgccgacgctggccaggaccgcgcttcttcccggcggcaggcggcgcggtccccgtgactctcagaagccgcccgatgtagagccgcttctttgtctcatacccctgaccattcgtgcgtggcacggagccgggtatctgcgggtacagcgatgaacagggcagacgtggccaggccacactaccatcacccctttctccaaccctgaaaaacagttcctgagacctgaactattgaccatcattttaatcggaccaactgcagctgtaacaagcttctctttggggtcacaatgaccactgcaggcaggggaaatttaggcctcatccccaggagcactgctttccagaagcaagaggggcgcctgactgtgaagcaggagccagcaaaccagacctgggggcagggcagcagtctccagaagaactatcctcctgtctgcgaaatcttccggctacacttcaggcaattgtgttaccacgagatgtctgggccgcaggaagcattgagccggcttcgggagctctgccgctggtggctcatgccagaggtgcacaccaaggagcagatcctggagctgctggtgcttgagcagttcctgagcatcctccctggggagctccggacctgggtgcagctgcatcaccctgagagtggtgaggaggctgtggctgtggtggaggatttccagagacacctcagtggatcagaggaggtttcagccccagcacagaaacaggaaatgcattttgaggagacaacagctctgggtacaacaaaggaatctcctcctacctcacccctcagtgggggctcagcccctggagcccacctggagcctcctttattgacccagggacaacaccacttccccagtggggacttcggtcaatntacttctccagttcctacccttcctcaagtggggaactcaggagaccaagcaggggcaactgtacttcggatggtcaggccccaggatactgtggcatatgaggacctatctgtagactacactcagaagaaatggaaaagtctcacactcagtcagagagccctgcagtggaacatgatgccagaaaatcaccatagcatggcctccttgnnnnnnnnnnnnnnnnnnnnnnnnnnnnnnnnnnnnnnnnnnnnnnnnnnnnnnnnnnnnnnnnnnnnnnnnnnnnnnnnnnnnnnnnnnnnnnnnnnnnnnnnnnnnnnnnnnnnnnnnnnnnnnnnnnnnnnnnnnnnnnnnnnnnnnnnnnnnnnnnnnnnnnnnnnnnnnnnnnnnnnnnnnnnnnnnnnnnnnnnnnnnnnnnnnnnnnnnnnnnnnnnnnnnnnnnnnnnnnnnnnnnnnnnnnnnnnnnnnnnnnnntttaagtttcttgatgtagtggcagtagtcttgtgctcttcaggagagtgtcccgagttctacgtcccacatcaactgagggtgtgaacttgtggaggacttttgtctgaatctctttttcaatctctatacaatgtggcggagttgtgccacctacatgagccaatggagaagaaagctcctggtatactttaagtactcaacaatattaaatactgaatatttaaaa

SEQ ID NO: 441365 - DNA, 733 bp, Homo Sapiens
  misc_feature (283)..(283): n is a, c, g, or t
  misc_feature (286)..(286): n is a, c, g, or t
  misc_feature (290)..(290): n is a, c, g, or t
  misc_feature (295)..(296): n is a, c, g, or t
  misc_feature (299)..(300): n is a, c, g, or t
  misc_feature (316)..(318): n is a, c, g, or t
  misc_feature (329)..(329): n is a, c, g, or t
  misc_feature (344)..(344): n is a, c, g, or t
  misc_feature (364)..(365): n is a, c, g, or t
  misc_feature (369)..(369): n is a, c, g, or t
  misc_feature (373)..(373): n is a, c, g, or t
  misc_feature (378)..(378): n is a, c, g, or t
  misc_feature (382)..(382): n is a, c, g, or t
  misc_feature (421)..(421): n is a, c, g, or t
  misc_feature (547)..(547): n is a, c, g, or t
  misc_feature (569)..(569): n is a, c, g, or t
  misc_feature (647)..(647): n is a, c, g, or t
tttttttggatttacattttattcaaaggataaatacaaaattaagaaagagttcaaattcaaagtaaatatgcttgatatttcaaaacaattctacatacaaagtacaataggaaaaaaccaaaagcccccataaattagagtggctagacacattcaagtctagcagaaagaaacttgaaatttaatgcaacgttatttctcttgcctagaagctaaagccttaattgtctcagatatcttccatctccttatggggcattacttgaaggataacaatggngcnagcnttttnntgnncttgccatagtggaannncaatgacagangccacactggaaagnggacaacaatgtaacctaanngggngctnctggnaggnataaaaactagtgatactgataacatctagacctttgcngacgtttagagtactgtacaatcttaaattattgtttatcaacctttgggtctcacagattaagaatgtactagttaagaaccaaggggttatacccagttcacaatactgtttccttcacttgcnctttagatataatgggtctggnattctcaatgagtgttacatggtttgggaattctggcaattttccttccaagacctccctatacttatctccatttcngaatatacaaagctgagtgacagaggcaaaagttaattcctaaagatccaaagggtatacaatacctgtcaaatttgatatgtctg

SEQ ID NO: 441366 - DNA, 1093 bp, Homo Sapiens
  misc_feature (54)..(54): n is a, c, g, or t
  misc_feature (136)..(136): n is a, c, g, or t
  misc_feature (189)..(189): n is a, c, g, or t
aggaaaaatctcagccatgctgaagagtgcccttaaatataaaaggtgaccatnccctgtacaacctgtacactgacgcttcaccaactcatgctgtggatgagagggcagcccaggataaataaccttttctacncaaggattagattccaggaactgggcaactgccattccgtttttgaaatgctnttccattcggacatgtagagtcttcagacctcgattgcagaggtaacaatcaataggagatggacctgctccaagagagttttgcaagaaacgaagtctattatgaaggctttcacaattaacagacaccaggcccattacaacatcactgtggccattcatgtattttgttgcagaatacatagaaatatcagctcccagagccaaagggcgctggaaatatggtgacataaaagtgttatccacgaccacaataatgtctccatgcttatggacaatatgtgcacagccttcaatgtcaatcaccttctgggtgggtttgtggggtttcgatccaaacaagcttggtttctggtgtaattgctgcctctagtaatttgattttggaacaatcaacaaaagaaatctttaatccaaattcagatgccacttgcctgaagtacctgtttgtacctccatacacatcatccatacaaataatttggtctcctgcttttaaaagatgggtaatagttacagtggctgctaaacctgaagcaaaggccaaacagtacttagccccatccagtgctgccactgctttttcaaggcaattcctagtgggatttccagaacggctatattcaaaacccgagtgctggccaggcgccccttgcttgaacgtggtggacagtgagatggggggcactacagccctggaggtccattgctctggatcctggcccacatggatcgcctgcgtggcgaaatgttggaagtgtggcaggaaaccttgtgaggaggcgtctttttcctgcatgctgaaccgcgaaagaagaagagaggaaaagaacaccgaagatataaccagtcgaagccgggtgtccggggttgggagagacagaaggatcaggcgagaaggagc

SEQ ID NO: 441367 - DNA, 412 bp, Homo Sapiens
  misc_feature (391)..(391): n is a, c, g, or t
ctgttggaggagggggcttttgttaaagagcactttgatgagctgtgctggacgctgacggccaagaagaactatcgggcagatagcaacgggaacagtatgctctccaatcaggatgccttccgcctctggtgcctcttcaacttcctgtctgaggacaagtaccctctgatcatggttcctgatgaggtgagggtgatggcagccccagggactgaatcacttgggaccagacctaagcaaaaccatgaatgagaccaaaccacctttggtgccttcccatatcccctttctttctttaccatcttcccatgctggtatctgtcctcacccagctgtctccagatgcctagaactgcctgtgtcagagtaattttgccttcttcaaganaactgaaattacactttcatg

SEQ ID NO: 441368 - DNA, 1082 bp, Homo Sapiens
cccaggagtttccccatatgattccaaatggaagttccaataaggtattggaatttggtacatctcattccaaaccagtgtttatctaccataaatggatgagtttgtgattttaatatggaaataaaatgagtgattcgagttgttcaaaaatataatttttgaatatacttttgtgattgatagttatggcctcaatcactatgaaactcagagtattattaaaaagaaccttcccctctttcttagcactaaattcaggctcttgtagatctttcccaagctctgctctgagatcaggtggtgctgtggcattaaagttgcaggtttcagtcaaaaaatcccaaagcaggtctccattttcattaccatcaataaagcagtcagatatatccatggtggacaaaaggtcatagcactcatacttaagccctaggttgtccagcatctgagtgaggtcatctgatgtgatatactggcagaggtcatcctggggaaagcgtgatccgtactttttccacagcttgtcccagccactgcttcctgacacaacaataatgagcatcttagcattggtacctaagagactatggaagaatttcagggtagctgggatgtcttttacataatacagcatttgaatcatatgaataaagtcccacttttgaagctcctttttctccaacattctactttggtattcagatgatgtctccttatgccaagcaaactttacgttctcgaggttcgatgtcttggctacaagctctttgtatttggcaatttgttcagcacttggctcaacaacttcattgttgatacaaactcctgggtattgagcctgaactttggagagaatttgaagatcaatttcacctgcacctccgcctatgcttagaatcttaatttctgattttgtgtctccaatccttcctattatgcctggcagcttcttgtccatgaattcctgcatgcactggtgttccgtggaatggttgagaaacctccggaaagattcaacatatttcccgtggtcagaaaacaagctcctcatggaagatgccatatttggttttcccccc

SEQ ID NO: 441369 - DNA, 950 bp, Homo Sapiens
  misc_feature (899)..(899): n is a, c, g, or t
  misc_feature (927)..(927): n is a, c, g, or t
  misc_feature (941)..(941): n is a, c, g, or t
agcggggaggcggggcgcagggatccggaaacacctgatcatctataggtttagtgcctaatgggtgttgttcctggctggacttgatgtccagggcctgaggggttttctcgccgagtctcctggggcggtccggaggctcgtgccctgttgtggggcccccatttgccgccgccatgcccacggccgccgcccccatcatcagctcggtccagaagctggttctgtatgagactagagctagatactttctagttgggagcaataatgcagaaacgaaatatcgtgtcttgaagattgatagaacagaaccaaaagatttggtcataattgatgacaggcatgtctatactcaacaagaagtaagggaacttcttggccgcttggatcttggaaatagaacaaagatgggacagaaaggatcctcgggcttatttcgagcggtttcagcttttggtgttgtgggttttgtcaggttcttagaaggctattatattgtgttaataactaaaaggaggaagatggcggatattggaggtcatgcaatctataaggtcgaagatacaaatatgatctatatacccaatgattctgtacgggttactcatcctgatgaagctaggtatctacgaatatttcaaaatgtggacctatctagcaatttttactttagttacagctatgatttgtcccactcacttcaatataatctcactgtcttgcgaatgcccctggagatgttaaagtccgaaatgacccagaaatcgccaagagagctttgacatctttgaaagatgaaaggattaattacacaagggggaagcggggtatttgggatctgtagtgagccttatatgaaatatgtatggaatggtgaacttctggatataataaaagtntgtgcatcgtgactggcttttgtatatnatcatgggtctgtngggagtaaa

SEQ ID NO: 441370 - DNA, 1147 bp, Homo Sapiens
  misc_feature (1070)..(1070): n is a, c, g, or t
  misc_feature (1074)..(1074): n is a, c, g, or t
  misc_feature (1085)..(1085): n is a, c, g, or t
  misc_feature (1095)..(1095): n is a, c, g, or t
  misc_feature (1100)..(1101): n is a, c, g, or t
  misc_feature (1103)..(1103): n is a, c, g, or t
  misc_feature (1113)..(1113): n is a, c, g, or t
  misc_feature (1117)..(1117): n is a, c, g, or t
  misc_feature (1119)..(1120): n is a, c, g, or t
  misc_feature (1125)..(1125): n is a, c, g, or t
  misc_feature (1127)..(1127): n is a, c, g, or t
  misc_feature (1135)..(1135): n is a, c, g, or t
  misc_feature (1138)..(1138): n is a, c, g, or t
ttcatagttcaaagtttcctttaatagaatacccagaatacataggaaatcaacatgtgctagacatagaattagtatgttcactgaagcatggcaaggtcacataaaatgcatatagctagggtcccaagcaggggtgtgttactgttagatttttttgaagtttaattttgttcagcagaggaatatactctaggagcatttacagttcattttcagtcatcaaataacatacatcacttccaaaacgtagcctcttgtgtgcagagaaattgccttcccacagcattcacaatgtaaaaagaccttttggattaaagggtcagactctttctatgtaacaaaaagtggaatgcaagtgacagatggacttattattgtgcagaaaaaacgtctgaatgtatgctaagaattctccgccctcccagctctttacatgctggaacctaactcagatgctgggtcaccagcacaggagggcctctgataaggaaaactgtttaaagagtacctgtgtggctaaaagtcaggtcattcatcatgcaaaattgtcaccacttcttaagactgttctgtaaattcatttcattgagtcaacttttaacgtgcaatatgacctttaacagttctgaaaaatagccttggccagtaacacgtacttctagttcacatattacatcatcgaatgttctctgacctaaagccatcatggagtccattccagtgcttatacaaagaagcagtgggaagactttagagtccttcagaatgacagctttcacagatgacttcagtctctccagactaatgtcggctgaggcaaacaagcgctgcacaatcccaaacctttctgtatctttcaggggagtcaaggttgggtcttcaagatcagatactccatcatcagacagagcacgaagcaagtggcacagtgtgggaatgatctggagtttgcagcaagtgcccagcagatgactgactgcgctatctggcactttctgtcgagggcactgaccaagaagtaggctgtcataaacagctgcttgctgcctgcatcctcgggggccggncacncaccctgttanctgcaccccncaacnncngggaggccanaggncnnctgtncngggggttnctnccccacacc

SEQ ID NO: 441371 - DNA, 281 bp, Homo Sapiens
  misc_feature (250)..(250): n is a, c, g, or t
ttatccttgagcaacttcgcttctttgagcctcattggtgttctcaattgtgaaatatggataatagtatctgccccatgggtattttgagaaggttgaatgaacaggaaattattacggggagcctataggtgtctgatatatagtatgttccagtaaatgttcactattcttagcatctcaggcagatgagctagtatagatagatgattaagtcagcttgcttcatagaaattagtgcaagaatttnttagcctaccaactgatagtatcagacttgg

SEQ ID NO: 441372 - DNA, 818 bp, Homo Sapiens
  misc_feature (34)..(34): n is a, c, g, or t
  misc_feature (158)..(187): n is a, c, g, or t
  misc_feature (397)..(405): n is a, c, g, or t
  misc_feature (434)..(470): n is a, c, g, or t
  misc_feature (473)..(473): n is a, c, g, or t
  misc_feature (502)..(502): n is a, c, g, or t
  misc_feature (522)..(522): n is a, c, g, or t
  misc_feature (526)..(526): n is a, c, g, or t
  misc_feature (547)..(547): n is a, c, g, or t
  misc_feature (624)..(624): n is a, c, g, or t
  misc_feature (631)..(631): n is a, c, g, or t
  misc_feature (633)..(633): n is a, c, g, or t
  misc_feature (663)..(663): n is a, c, g, or t
  misc_feature (672)..(674): n is a, c, g, or t
  misc_feature (678)..(678): n is a, c, g, or t
  misc_feature (680)..(680): n is a, c, g, or t
  misc_feature (683)..(683): n is a, c, g, or t
  misc_feature (687)..(687): n is a, c, g, or t
  misc_feature (707)..(707): n is a, c, g, or t
  misc_feature (712)..(712): n is a, c, g, or t
  misc_feature (722)..(722): n is a, c, g, or t
  misc_feature (729)..(729): n is a, c, g, or t
  misc_feature (732)..(732): n is a, c, g, or t
  misc_feature (742)..(742): n is a, c, g, or t
  misc_feature (744)..(744): n is a, c, g, or t
  misc_feature (751)..(751): n is a, c, g, or t
  misc_feature (764)..(764): n is a, c, g, or t
  misc_feature (768)..(768): n is a, c, g, or t
  misc_feature (770)..(770): n is a, c, g, or t
  misc_feature (776)..(776): n is a, c, g, or t
  misc_feature (789)..(789): n is a, c, g, or t
  misc_feature (814)..(814): n is a, c, g, or t
  misc_feature (818)..(818): n is a, c, g, or t
acagtatcatgtaactcgtgaaaactttacttanactggcagtttgccatatcagttgcatttgtctttggtacgaaaaaataaaacaatcgcaataatgtgcaagtatttgtcttcttccggtcaagtaccgaaatatgagttttctagagccatcnnnnnnnnnnnnnnnnnnnnnnnnnnnnnnatacaatacacagactctgtggcatatatctacatttcaacatagtcctatatacattcaaaaaatctgaaaaagagttggaacaaaaaaacatttaaaccccataatttttccatctatatatcttgttttttctcattagggttttcatcatacaaaatattaccagttttagagtttccccaaaatacaaggcacaaagaatatgcnnnnnnnnncttacttgcacagacatttgtgtgtgtgnnnnnnnnnnnnnnnnnnnnnnnnnnnnnnnnnnnnncancttgagctctgacaatgaacatctaatanggcccacaggcacaagtgcngggngtgccatatacaagggagaanaatgggtggggaaaaatagaacaaaaagcaataattctaaaaacaatttaaaccgactgggtaaaaaaatgcttccncaatttncncgtgggggtcagagctaaatcggccacaanactgggcannncacnanttncacncccccaaaaggggttgcgtnaatanatttttgtantctgtanttnacattttacntntacacangattttcaatacngttncnagtttnagatttaaacttngtttatgctctgaaaattcaataancaan

SEQ ID NO: 441373 - DNA, 1111 bp, Homo Sapiens
  misc_feature (6)..(6): n is a, c, g, or t
  misc_feature (22)..(23): n is a, c, g, or t
  misc_feature (29)..(29): n is a, c, g, or t
  misc_feature (37)..(37): n is a, c, g, or t
  misc_feature (40)..(40): n is a, c, g, or t
  misc_feature (62)..(62): n is a, c, g, or t
  misc_feature (69)..(69): n is a, c, g, or t
  misc_feature (92)..(92): n is a, c, g, or t
  misc_feature (104)..(104): n is a, c, g, or t
  misc_feature (106)..(106): n is a, c, g, or t
  misc_feature (109)..(109): n is a, c, g, or t
  misc_feature (121)..(121): n is a, c, g, or t
  misc_feature (130)..(130): n is a, c, g, or t
  misc_feature (153)..(153): n is a, c, g, or t
  misc_feature (178)..(178): n is a, c, g, or t
tatttntgatttgaggtgattnngaattnctagaaanacngcattttttccttggggatctntttgttngctgctggatagataagcatggntttaaaaatgtntnccncccagttttctnccttctccngtgtactctgaattctctccctncctccctcactgtcttcctctctcnttcctttccttcctttttctctaccaggccatttttcaaatttacatcaaagatacctgaagtgttggtatctgagaatatctgtcactcctcttatctgagaagtgaccttttatttttaagatgactacagacctatttttagatatgttttcagtacaattttgaacagcaactttttaattaaacatcttccagtgttaggaagttgagaaacgttcataggcaagtctgctgttctatcgtcaccatcttttgtctcccttagtcccccaggagctcttccctttcccctctagttttgggtgtgcatgtttggagtttgtagtggttggtttgtaaaattggaccattttgccttgctatgggttgttcaggaagcctcattcttttcttgtgaccctttcgcttttgcattcaccctcctttcccacctacctgtcttgggcttgttgagcagcataataatcccgggagaatgattcccctcatagaaggacaaaagcatccatcccctcatagttaagtagccactggtgtcctgggaatttctggttggatttggtgccctgaacttttttattaagaaatcagatcccagggtgagagtaacaggccatttggccaagaaagaaacctgtttgtttttcttttgaactatgaaaagaccctgtttgtgaatatattttagaaagagaggaaggatgtctgcagaactttgttctgttttctgccacaaaaatgtgaatagttcagagtgaaaaccttttgtgatggttgatgtctcaggaataagctggatctccaatgttttggggatgctttgagtctcaaaaaaaattgataatcagaaaagtaatttttgtttgtttgtttaatgtatccctgttctgtttttaattaaactccaagtctcattttaggccaaaaaaa

SEQ ID NO: 441374 - DNA, 469 bp, Homo Sapiens
  misc_feature (278)..(278): n is a, c, g, or t
  misc_feature (331)..(331): n is a, c, g, or t
  misc_feature (376)..(376): n is a, c, g, or t
  misc_feature (419)..(419): n is a, c, g, or t
acttttctgattatcaattttttttgagactcaaagcatccccaaaacattggagatccagcttattcctgagacatcaaccatcacaaaaggttttcactctgaactattcacatttttgtggcagaaaacagaacaaagttctgcagacatccttcctctctttctaaaatatattcacaaacagggtcttttcatagttcaaaagaaaaacaaacaggtttctttcttgggccaaatggcctggttactcttcacccgggggatctggatttctntaattaaaaaagttcaggggcaccaaattccaaccaggaaatttcccgggggncaccagtggggcttactttaactatggaggggggatggggatggntttttgttcttttcttatggagggggggaattcatttctcccngggggtttatttatggcctggcttcaacaggccccgggggcaggtagggt

SEQ ID NO: 441375 - DNA, 919 bp, Homo Sapiens
  misc_feature (265)..(265): n is a, c, g, or t
  misc_feature (267)..(268): n is a, c, g, or t
  misc_feature (279)..(279): n is a, c, g, or t
  misc_feature (281)..(281): n is a, c, g, or t
  misc_feature (286)..(286): n is a, c, g, or t
  misc_feature (312)..(312): n is a, c, g, or t
  misc_feature (363)..(363): n is a, c, g, or t
  misc_feature (381)..(381): n is a, c, g, or t
  misc_feature (475)..(475): n is a, c, g, or t
  misc_feature (478)..(479): n is a, c, g, or t
  misc_feature (499)..(500): n is a, c, g, or t
  misc_feature (508)..(508): n is a, c, g, or t
  misc_feature (513)..(514): n is a, c, g, or t
  misc_feature (531)..(531): n is a, c, g, or t
  misc_feature (533)..(536): n is a, c, g, or t
  misc_feature (538)..(538): n is a, c, g, or t
  misc_feature (546)..(546): n is a, c, g, or t
  misc_feature (552)..(552): n is a, c, g, or t
  misc_feature (555)..(556): n is a, c, g, or t
  misc_feature (561)..(562): n is a, c, g, or t
  misc_feature (567)..(568): n is a, c, g, or t
  misc_feature (570)..(570): n is a, c, g, or t
  misc_feature (588)..(588): n is a, c, g, or t
  misc_feature (592)..(592): n is a, c, g, or t
  misc_feature (594)..(594): n is a, c, g, or t
  misc_feature (596)..(597): n is a, c, g, or t
  misc_feature (606)..(606): n is a, c, g, or t
  misc_feature (608)..(608): n is a, c, g, or t
  misc_feature (610)..(610): n is a, c, g, or t
  misc_feature (616)..(616): n is a, c, g, or t
  misc_feature (620)..(620): n is a, c, g, or t
  misc_feature (623)..(623): n is a, c, g, or t
  misc_feature (632)..(632): n is a, c, g, or t
  misc_feature (635)..(635): n is a, c, g, or t
  misc_feature (640)..(640): n is a, c, g, or t
  misc_feature (648)..(648): n is a, c, g, or t
  misc_feature (652)..(653): n is a, c, g, or t
  misc_feature (658)..(658): n is a, c, g, or t
  misc_feature (665)..(665): n is a, c, g, or t
  misc_feature (749)..(749): n is a, c, g, or t
  misc_feature (772)..(772): n is a, c, g, or t
  misc_feature (776)..(776): n is a, c, g, or t
  misc_feature (781)..(781): n is a, c, g, or t
  misc_feature (809)..(809): n is a, c, g, or t
  misc_feature (825)..(825): n is a, c, g, or t
  misc_feature (840)..(840): n is a, c, g, or t
  misc_feature (843)..(843): n is a, c, g, or t
  misc_feature (850)..(850): n is a, c, g, or t
  misc_feature (853)..(853): n is a, c, g, or t
  misc_feature (860)..(860): n is a, c, g, or t
  misc_feature (863)..(863): n is a, c, g, or t
  misc_feature (867)..(867): n is a, c, g, or t
  misc_feature (897)..(897): n is a, c, g, or t
  misc_feature (906)..(906): n is a, c, g, or t
  misc_feature (911)..(911): n is a, c, g, or t
  misc_feature (916)..(916): n is a, c, g, or t
acttgtaaataaacaattttattgttcatcttcacatatgtgaaagacatcactacagcatccattactctcaagttacaaagttataaaacaagattttttaactttatatcttgataaggtgctttacttctaaacaaggaaaaattaacattgtttttaaaacttactgggttattatgcttcttatgcaagttttttccaaaagtaaatttaacatgacatatccctaatacaattaaataatctataattaataagctgngnnttggggttcangnccacngtttgaatttttaaaaaatttaaatnggtccattggcacagttagttttgactacaggcctgttatcaatctatgtnatgggtggcattactttnactcattaggggacgggggttggtggctttcgttgcctctccttttggtcttttgctggtaccgattggggtgtgattgggggctttgtgactnggnnttttgactatggggcggggnngacacatngggtnngggtgggtgtttgttcncnnnncnttttcccnttgggntcnncctgnntggcnngngggggatggggggtgggntggngntnntgggggtcngngntggttngcgnggntttcgttgntgnttgtnggtctctntgtnncgggnctggggnggactctcaaaagtttttaattatgaaaatagaaacagccgagttacacaattttcctttcttttttaaattcaatttcaaaangtggttttctgtacttctctctnagangggtnctgccctctacactaacttccacatttnattagttcttttcacnatcacattctcctcngcnggcgtgngcntaatcanagnatgncattgctatgcatttcccgcaaccattttnttacccagntcccnctttntcg

SEQ ID NO: 441376 - DNA, 1174 bp, Homo Sapiens
  misc_feature (17)..(17): n is a, c, g, or t
  misc_feature (175)..(175): n is a, c, g, or t
  misc_feature (295)..(295): n is a, c, g, or t
  misc_feature (372)..(372): n is a, c, g, or t
ctctaaccatgtcaaanggcagccggcctcctgaccaccccacaatcctttgccaggattagtgttctctgattacatacttgggcaccccctggctacgatagtacttgtttattattgagattataaaaataaccattctctaaatgattacacatagtaaataaaattaganctatacataaggatttgaataactgcatttctttaaggaccacttgcaacttcttctctctgtttcacaaaccagagtagaccagcgtaggacaagaagagcatggaacgcaaagaagangatcagcggaacgtttctcttgttctgcttccactccttcactttctgtgtcacttggcaagatccatggttgatgnactacctgcaattgctttaaggattcatcttcttccatgtagtttttcagtgagtgtcctactccactggaggcttctccaggtcctgttagtttagatgctttctcaaattcgtcaccctcctccattagtgcttcttcagtcccaggcaaggaatcgaatgaatctgggattttttcatctggagaatggagtattggtagtgactcttctgtcctttcttccaggttgtctccttgaagcccagcaattccattgcatcatcttcattatcaatatcttcttctgttacagatggggtagggctgtggatggactcaaaagaatcttgagagagcattgcggccaggagtttcttatgttgctgttgctgctgttttaatcctttgttcttaggctccatctttaagcttcctgcaggactagagccactatcttcactttcccattggtcatttttgcttcttggaattggaggctgtagcatttcagcagctaggggatcagcatcattttcttctctaccaatccattctccaatcacacggggcctcagaagagaagaattaaatgtcactgtttccttatcgagttcatctgaaattgcaatacttcgagagagattctcaagggctttccccagcttcttgctctcctgaaggatgtgattcaattcatcaaaatcacggctttgtggtttagtcctccagttccactttggatgctctactgaccttggcaatgatttggagtccggtgatggtggagaaatattagacacagcaaggtcactttttgattt

SEQ ID NO: 441377 - DNA, 1860 bp, Homo Sapiens
  misc_feature (177)..(237): n is a, c, g, or t
  misc_feature (827)..(827): n is a, c, g, or t
  misc_feature (832)..(841): n is a, c, g, or t
  misc_feature (1282)..(1282): n is a, c, g, or t
  misc_feature (1285)..(1285): n is a, c, g, or t
  misc_feature (1295)..(1295): n is a, c, g, or t
  misc_feature (1323)..(1323): n is a, c, g, or t
  misc_feature (1587)..(1587): n is a, c, g, or t
  misc_feature (1604)..(1604): n is a, c, g, or t
  misc_feature (1661)..(1661): n is a, c, g, or t
  misc_feature (1674)..(1674): n is a, c, g, or t
  misc_feature (1681)..(1681): n is a, c, g, or t
  misc_feature (1687)..(1687): n is a, c, g, or t
  misc_feature (1697)..(1697): n is a, c, g, or t
  misc_feature (1707)..(1707): n is a, c, g, or t
  misc_feature (1710)..(1711): n is a, c, g, or t
  misc_feature (1727)..(1727): n is a, c, g, or t
  misc_feature (1729)..(1729): n is a, c, g, or t
  misc_feature (1732)..(1732): n is a, c, g, or t
  misc_feature (1748)..(1748): n is a, c, g, or t
  misc_feature (1751)..(1751): n is a, c, g, or t
  misc_feature (1757)..(1757): n is a, c, g, or t
  misc_feature (1766)..(1766): n is a, c, g, or t
  misc_feature (1768)..(1768): n is a, c, g, or t
  misc_feature (1780)..(1780): n is a, c, g, or t
  misc_feature (1782)..(1782): n is a, c, g, or t
  misc_feature (1785)..(1786): n is a, c, g, or t
  misc_feature (1789)..(1789): n is a, c, g, or t
  misc_feature (1792)..(1792): n is a, c, g, or t
  misc_feature (1796)..(1796): n is a, c, g, or t
  misc_feature (1805)..(1805): n is a, c, g, or t
  misc_feature (1808)..(1808): n is a, c, g, or t
  misc_feature (1810)..(1810): n is a, c, g, or t
  misc_feature (1815)..(1815): n is a, c, g, or t
  misc_feature (1821)..(1821): n is a, c, g, or t
  misc_feature (1827)..(1827): n is a, c, g, or t
  misc_feature (1835)..(1835): n is a, c, g, or t
  misc_feature (1838)..(1838): n is a, c, g, or t
  misc_feature (1842)..(1843): n is a, c, g, or t
  misc_feature (1857)..(1857): n is a, c, g, or t
gctgcaggaattggcacgaggtgtgttcacatatatctcagttgaatgtcacaagaatccctgaagtgattaaaagtcttgagaggtcaggcaatttttgtaaggctagaaggaaaagtgaggttttagacttcatttcttttaaagttggcaaacaaacattttctgtaatggacnnnnnnnnnnnnnnnnnnnnnnnnnnnnnnnnnnnnnnnnnnnnnnnnnnnnnnnnnnnnntaaattatttcaggctttgcaggctataaagtgctgcagctccttagctttgctgttgctatagtgtagctggagccatagacagttagttagttagttatgagtgagcacagctgggtgccagtacaattttaatgatcaagactcgtggcaggcagaacaaaccatcatttgatgatcctctgcttgaaagcacgaataagtgagaacagagccagtccatagggtttccagaaagtgttattctgggatttccaggataaatttttgtaaaactactaacaaacaacacacaggaaactaatttggtataagaaacgacatatccctaaatagtgcttatttaacttcattataaatacatctacttaacaaaaaaatatattttgtgatcttgaggtcacttcgtttaggtcattatctcaacccaacctccccaaactctggtttgagccaatatgtgttctattgttctcagagcaccagccgactgtacaacaagttgttataaaaatgtttattgtttaccaaaaccagtggacctcttatcaaatgctgcttggtaacaaaatctatcacagttttaatanaaagnnnnnnnnnngaagctaactatttgtctcattgtcattagttagactttctgcaaggtcacttaatccagacttattcagtgcattaatcagattctcaggtgttgcatgaactccctcttgatcttgccaggcaaccaggagctgcttagctctcatcttcatgtcttcactgtcacactcaatctgcctaatttctgagtctttcatttccaagtagggagccagaatcttccattgttcacccagcttgttggcaaatacctctatttgttctcctgttacaggtttgtctcgccgaacatcaggactttcattttccttcagtagagcatcattatcttcctcatcttcatcctcacctgtttttatttcttcagaaggaggcggtaattccttggctagctttattaccatattttcaagatattctggtaaacttttaaactgcnggntggtgtggcngggagaagtgggggcttctccgtgctantagtctcggggctctccaaccgtaatttgaattgttcacagccttatattcattttccaccatattttcagggtctgcctgttcaatggcttcttcaaagaattcctccaaagtgggcatgtgttcccttgtctctgatttacaggcttccatattatcagggcaaagattccaaagccttgttaactcctcatttcccatcagaatttttttggtgggtcctttccctaggaagtcctcgggtgctgttctcttccgaattantctcgtaggtttggtanctgatgattcttcctttcacaaaacttgggcaacttcatttttcccgagttccagtnttcttcagtgttnaatatangccccnccacctttgnaaatctttcnccnncggggggggttcaganangtncagagattagaagaanatntaagcntccaccacntnccgcaccaaggngnggnngcnggngagnaccaggggngtngngggcngtcccncgctancttacccnatntccnnttgggggggaaaanaaa

SEQ ID NO: 441378 - DNA, 1052 bp, Homo Sapiens
  misc_feature (1010)..(1010): n is a, c, g, or t
aaagtaggtcttttctcttttattctcaaagaaccccttaataaaggaggcactgacaggtacattacacattaataggagattttaacactgctcataactgataatctagtgaccattaactccaagttataacttggaaaacataaaactatatcctattaagaactgattaaaaagcaaaagaaacaaaagtaagacattagcagctagacaacaaagcaatgacccttaatttagaagacaactttttaccaggtacctaagactccgtggagtaaaactcaggaaaggagaatcaattctagaccccatcccataaggactttagtttccgaaataccaaaacaaacttcttacttcccctgtgggtaggtgccacagaatgaagagtaaagcaataaaatgcatattcagtgcatgtgaagtagaagggtatatatcctatatatacttgttaacgtttacgcctacagtctctttacatatctcaagttcagcttcacaggtttctccgtacatagaactgtagcctcactggacgtgtaaacagacggtaccctactcttgtggcatcactaagtttcagccaaccaaagaacagcgaactgttcaaaccatatccaaataaggcaaacgctgaactgtaactaatcccgcctgttgcccgtatctcaacttccatttttccataacatcgcttttcctctctgtccactaaaatccttccaactaaaggcaagcctggggaccttgaaaacccctccttgaaggcgcccacttataatagggcttccccaggggggggccacaaacccttggaaagtttttgttgagaaaaatttggggttcccttctttgggcctcccaaaatattaggaaaacccctttggcgcccaacaaaatccgcaaaaaattcttcgaccccccaaaaagggcgcctttttctaaactttttcaaaaacccctttaaatattcaaatcccccgtacgttgtacgtacccccccnttatgcacactgaaaccgctaaataaacctatctgccgcatt

SEQ ID NO: 441379 - DNA, 1251 bp, Homo Sapiens
  misc_feature (5)..(6): n is a, c, g, or t
  misc_feature (11)..(11): n is a, c, g, or t
  misc_feature (271)..(271): n is a, c, g, or t
  misc_feature (312)..(312): n is a, c, g, or t
  misc_feature (322)..(322): n is a, c, g, or t
  misc_feature (329)..(329): n is a, c, g, or t
  misc_feature (337)..(337): n is a, c, g, or t
  misc_feature (353)..(353): n is a, c, g, or t
  misc_feature (356)..(356): n is a, c, g, or t
  misc_feature (365)..(368): n is a, c, g, or t
  misc_feature (389)..(389): n is a, c, g, or t
  misc_feature (391)..(391): n is a, c, g, or t
  misc_feature (403)..(403): n is a, c, g, or t
  misc_feature (408)..(408): n is a, c, g, or t
  misc_feature (421)..(421): n is a, c, g, or t
  misc_feature (444)..(458): n is a, c, g, or t
  misc_feature (475)..(475): n is a, c, g, or t
  misc_feature (477)..(536): n is a, c, g, or t
  misc_feature (538)..(539): n is a, c, g, or t
  misc_feature (547)..(548): n is a, c, g, or t
  misc_feature (550)..(550): n is a, c, g, or t
  misc_feature (553)..(553): n is a, c, g, or t
  misc_feature (557)..(557): n is a, c, g, or t
  misc_feature (563)..(563): n is a, c, g, or t
  misc_feature (570)..(570): n is a, c, g, or t
  misc_feature (574)..(574): n is a, c, g, or t
  misc_feature (597)..(597): n is a, c, g, or t
  misc_feature (606)..(606): n is a, c, g, or t
  misc_feature (611)..(628): n is a, c, g, or t
  misc_feature (664)..(664): n is a, c, g, or t
  misc_feature (666)..(666): n is a, c, g, or t
  misc_feature (670)..(670): n is a, c, g, or t
  misc_feature (672)..(672): n is a, c, g, or t
  misc_feature (675)..(675): n is a, c, g, or t
  misc_feature (680)..(680): n is a, c, g, or t
  misc_feature (683)..(683): n is a, c, g, or t
  misc_feature (686)..(686): n is a, c, g, or t
  misc_feature (696)..(696): n is a, c, g, or t
  misc_feature (702)..(702): n is a, c, g, or t
  misc_feature (710)..(710): n is a, c, g, or t
  misc_feature (712)..(713): n is a, c, g, or t
  misc_feature (722)..(722): n is a, c, g, or t
  misc_feature (726)..(726): n is a, c, g, or t
  misc_feature (730)..(730): n is a, c, g, or t
  misc_feature (736)..(736): n is a, c, g, or t
  misc_feature (913)..(921): n is a, c, g, or t
  misc_feature (925)..(1202): n is a, c, g, or t
acatnnattangcaccaagaatatactgtggtggttgctatatgaaaacataattaccaatatagtatccctgccattgagcttacaatctaaaacgaaatacaaggctatgagcctatctaaaaacttccttaacttagaaatggctactttggcaaatagagtgaggcaaaatgacctattattcaggtgcagtgctaataaggctttgaatatcatccaaagaatgattttacttgtacccattgttcctgattatgttacacttgcnaagaaaaacagtaattagaattttggcatgaacaatgaatnatttcaaatngtcttgnaggacttnaaacaaagagatgctnacnggcctaagnnnnccagcagccagggaaagcccnanaaaaaaaataangaacnagaccaagaatcnacaaaaaaaccacatacactttnnnnnnnnnnnnnnngagacggagacaaagcncnnnnnnnnnnnnnnnnnnnnnnnnnnnnnnnnnnnnnnnnnnnnnnnnnnnnnnnnnnnngnncaagccanncnccnaccncagccncccgagnagcngggacgacaagcgcccgccaccncgccgggcnaaagnnnnnnnnnnnnnnnnnngaagagacggggaaacaccaagaaagccaggaaagncnggancnccngaccncgnganccgccccccncggccncccaaagngnngggattacnggcntganccaccncgcccggcccacttacactttttaaacttcttcctcttctcctatacctaagggctccaatgatactacttatcagggaagaaagtactgtatctagataaactacccttaagtattacaggcttagcaagttgaatttctagaaaatactcattcataatgtgtatgttaggtgannnnnnnnngagnnnnnnnnnnnnnnnnnnnnnnnnnnnnnnnnnnnnnnnnnnnnnnnnnnnnnnnnnnnnnnnnnnnnnnnnnnnnnnnnnnnnnnnnnnnnnnnnnnnnnnnnnnnnnnnnnnnnnnnnnnnnnnnnnnnnnnnnnnnnnnnnnnnnnnnnnnnnnnnnnnnnnnnnnnnnnnnnnnnnnnnnnnnnnnnnnnnnnnnnnnnnnnnnnnnnnnnnnnnnnnnnnnnnnnnnnnnnnnnnnnnnnnnnnnnnnnnnnnnnnnnnnnnnnnnnnnnnnncccggccataatggccgaattcccgggcatatgtccggtaccgtcgact

SEQ ID NO: 441380 - DNA, 458 bp, Homo Sapiens
tattgttaacaattataaacatttattaagcaccaagaatatactgtggtggttgctatatgaaaacataattaccaatatagtatccctgccattgagcttacaatctaaaacgaaatacaaggctatgagcctatctaaaaacttccttaacttagaaatggctactttggcaaatgagtgaggcaaaatgacctattattcaggtgcagtgctaataaggctttgaatatcatccaaagaatgttttacttgtacccattgttcctgattatgttacacttgctaagaaaaacagtacttagaattttggcatgaacaatgaattatttcaaattgtcttgtaggactttaaacaaagagatgcttactggcctaagttttccagcagccagggaaagccctattaaaaatattatgaactagaccaagtttctcttttaatccacttacacttt

SEQ ID NO: 441381 - DNA, 1029 bp, Homo Sapiens
  misc_feature (399)..(399): n is a, c, g, or t
  misc_feature (408)..(408): n is a, c, g, or t
  misc_feature (416)..(416): n is a, c, g, or t
  misc_feature (429)..(429): n is a, c, g, or t
  misc_feature (459)..(459): n is a, c, g, or t
  misc_feature (464)..(464): n is a, c, g, or t
  misc_feature (471)..(471): n is a, c, g, or t
  misc_feature (478)..(479): n is a, c, g, or t
  misc_feature (482)..(482): n is a, c, g, or t
  misc_feature (541)..(541): n is a, c, g, or t
  misc_feature (546)..(546): n is a, c, g, or t
  misc_feature (553)..(553): n is a, c, g, or t
  misc_feature (558)..(558): n is a, c, g, or t
  misc_feature (566)..(566): n is a, c, g, or t
  misc_feature (569)..(569): n is a, c, g, or t
  misc_feature (581)..(581): n is a, c, g, or t
  misc_feature (588)..(588): n is a, c, g, or t
  misc_feature (600)..(600): n is a, c, g, or t
  misc_feature (609)..(609): n is a, c, g, or t
  misc_feature (621)..(621): n is a, c, g, or t
  misc_feature (625)..(625): n is a, c, g, or t
  misc_feature (635)..(635): n is a, c, g, or t
  misc_feature (671)..(671): n is a, c, g, or t
  misc_feature (706)..(706): n is a, c, g, or t
  misc_feature (829)..(829): n is a, c, g, or t
  misc_feature (837)..(837): n is a, c, g, or t
  misc_feature (862)..(862): n is a, c, g, or t
  misc_feature (915)..(915): n is a, c, g, or t
  misc_feature (918)..(918): n is a, c, g, or t
  misc_feature (925)..(925): n is a, c, g, or t
  misc_feature (929)..(929): n is a, c, g, or t
  misc_feature (943)..(943): n is a, c, g, or t
  misc_feature (951)..(951): n is a, c, g, or t
  misc_feature (962)..(962): n is a, c, g, or t
  misc_feature (981)..(981): n is a, c, g, or t
  misc_feature (999)..(999): n is a, c, g, or t
  misc_feature (1005)..(1005): n is a, c, g, or t
  misc_feature (1010)..(1011): n is a, c, g, or t
  misc_feature (1014)..(1014): n is a, c, g, or t
  misc_feature (1021)..(1021): n is a, c, g, or t
atatttaaaaattaatttaatgcttggctaaatcttaattacatatataattatcaaacgatagtccttaatttccaaaaaaattcctcttttgaaaatcacagaatcagaaagcataaactttaaaacaagttctctgaatatttacaatgtggtataaacattatagaagaccatggatattaaattgcctgggtgtggctaatcagcaaggcgtattctttattgcatatttaactcacatatgtgggattttaaatatgacagactactaaaattcaaatgcatgtatctgcaagctgggcagggggtaaaatcatgaatgggacagggcggtcagcccaaaaccatgcaattaggttgtgggtttattattttcaaaagtgaaatttctatgtnccatttganactatgtngcatattcatttngcattcacattaaacccccatttgactctnacgcngattcanggggggnngtncaacattcactcagtggctaggtccacaactcaactctcaatgttagggcggcccggcnacggnggtagcnacgcnaaccaaanggnaatggacatttngtcactngccagccctttngttacaacngtgtggtaattncccnagggcaattngcggccgggtaattttcggcggttaaggggcttccnctggggggaaacaccacaaatttccgagtgtgagngtgagtccatggtggtataaatatatatatgcataattacacaatttacactgcacacatcgtttacaggggacaattaactgagagggttaatttaaatgaccatacaaaatacttcagtanacaaagtntgacaggcagtatagaaaacattcntagactcctagaaataatctgaattccttacattctgaagaaatatcatttcnggncacagtnttgnatatactgtttttngatttacnccagaattgcnatttttccgtttaagaacntttcctatttccaaattncccatnggggnnggnatcagcnataggttt

SEQ ID NO: 441382 - DNA, 892 bp, Homo Sapiens
cccacatgttgacttctaaccctgattcaaggaaaaaaagttcaaccatcaactcaatgactaagtccacaactcaactctcaatgttaaggccagcacagctacagtgatagcaacgctaacctaaaggtaatgaacatttcagtcacttgccagcccttttgttaacaacagtgtagtaatttctccctaagacaatttgcctaccggataatttttctgcctgttaaaaggcttccttctgtggaaaaaccaccacaaatttcccagtgtgaaagtaaggtccatggtggtataaatatatatatgcataattacacaatttacactgcacacatcgtttacaggggacaattaactgagagggttaatttaaatgaccatacaaaatacttcagtaaacaaagtatgacaggcagtaaagaaaacattcatagactcctagaaataatctgaattcctttcattctgaagaaatatcatttaaggacacagtattgaatataatgttttttgtattaaaacaagaattgctattttacagtttaagaaactttacatatatacaaaatttacacattgggaatggtaatcaagcaaataggtttttcagtctcatagatctattttccttcgatcaaagacttaaattctttcacattgtggtcacttgcaacagacatagcatgatccaaagctcgaacacttgcaaggagttttactatctgttttatgttttcccttgcatttcttttttccacatcagaacacccgatactatttctataaattgtatccgctaagtgtacaaggtatcggcaaacactctctaactgagaaatagtcctttctcctttcagattcatgaaccattgtttggggaaacatcccc

SEQ ID NO: 441383 - DNA, 2049 bp, Homo Sapiens
  misc_feature (620)..(662): n is a, c, g, or t
cagttcaccttagcagtggtaaaaatattgctttattccaaatgaacatacaacacaatttactgttcttttggggggcttcttgtgaactgaatagtctgggtatttttatttcaacaatttattcttcccatactaaccacagaagccgaagccctggtccacacatagcagacttgctataaaataaatggtaatgagaatgatgagaaagcaaatggtaactgtcaatttgttaattgtcttgtattaataatttaagtaggcatgattcaaaataaacacacatccttgatgaactcaccttatgatactgatatcattaatgagccaatagttgatcctctcaaaagtattcacatcagaaaatggtctagacagtgtcaagggttttatacgaccccaccatgcaagtgaccttgatttaagaactaactgaactttatacttaatggaaaaatttaaagtgaaaagatctaaggggggaataatttttctgaatagtagattccctgatgtttcagaacaaattttagcaagcgtaatacgcgcacacatgcacacacatacgcacaatgaacacatgtgcttacagcatatgtgcccgcgtgagcgagtcnnnnnnnnnnnnnnnnnnnnnnnnnnnnnnnnnnnnnnnnnnnaaaaactgagaaacgctcctccagagcctctaaacaatctcaaggaaaaacatttctattagcatgattttagtgacacgatataaggatttttttgtctctttttctgtaataatttcatacctccatctgagatctgtgcattcaaatctcagaggaaggtggcacacaagagtagttaagattgcccccggtttctccttctatctcctgtcctccttcccattgcagagtcttttgtggcattctccaaaaatcaaatagaaaacactacatgtgtcgacatgacataacctgtgatgaggctattgggtgaatagaaatttagggcttgggactggcaagccaaatggcaagagccacctgctcactggtgcatccacctgcgggatgcagctctcctctttttgaaaccaggtaactgccagtgttttttaatgagacactggcactgtggggcccaagggtcctgaattgcccccacatcttcctaagagcccaaagaggacagtgttgggactaaacgaaattggattccagaattcctaccccaaaagctttaatggtaagctttatccctcctgaaacatttctttcccttaaaaaaatattttgttaaaaaacactatgatatgagggcgatagactatttggtttcttctaagtagatgctcttaaattaatgcatataaataatttgtatttgatttcctctctttcctgttgagcaaagcatagaatgcacagattcctacatctcaagtcacttggtcaatgcagagtctctttgtatttcatttcttaagacaaattgcgcctctcgttctgatttggctgtgggactcagggggagaaaggctgtgttttcgcttgcactgtcctcggtttctacgctggccagttcgtagtcttctgaccgtctggcatcagtcagaattcggatctgctcctggacagtttctagcaatattttcacttcttgttgttctgctataagacaatcgctgactggaatactcacattgacaacgtcagctgaataggagtttttgcaccatttgatgcttttgacttcagaaatccctggcatttgcaggcaggtttcctctaaacccactgaagggatgatgggcacagaactggcccttgtggatgaatagcccaccaggtccttttgctccaagctattaaaataggggtttgtctctcttgaaggcagttgcatatttattgatgtatttcgttgggtttttaaaccactggatgaatactttaagtccaggggtctttcaacacaccacagctgtataggcaggtgggatatagtcttcctgacctctatcccttggcaaggtatcgtatcctggtctgggatccttgattcttc

SEQ ID NO: 441384 - DNA, 528 bp, Homo Sapiens
  misc_feature (391)..(391): n is a, c, g, or t
  misc_feature (425)..(425): n is a, c, g, or t
  misc_feature (459)..(459): n is a, c, g, or t
  misc_feature (487)..(487): n is a, c, g, or t
  misc_feature (516)..(516): n is a, c, g, or t
ttttttttcagttcaccttagcagtggtaaaaatattgctttattccaaatgaacatacaacacaatttactgttcttttggggggcttcttgtgaactgaatagtctgggtatttttatttcaacaatttattcttcccatactaaccacagaagccgaagccctggtccacacatagcagacttgctataaaataaatggtaatgaggaatgatgaggaaagcaaatgggtaactgtcaatttgttaattgtcttgtattaataatttaagtagggcatgattcaaaataaacacacatccttggatggaactcaccttatggatactggatatcattaatgaggccaatagttggatcctcttcaaaggtatttcacatccggaaatngggtcttggacagtgtccaggggttttatacggnccccaccctggcaagtggaccctggttttagggnctaaccggaaccttatacttatgggggnaattttaagtggaaaggtcctgggggggnatattttttccg

SEQ ID NO: 441385 - DNA, 1059 bp, Homo Sapiens
  misc_feature (778)..(778): n is a, c, g, or t
  misc_feature (780)..(781): n is a, c, g, or t
  misc_feature (783)..(783): n is a, c, g, or t
  misc_feature (788)..(788): n is a, c, g, or t
  misc_feature (797)..(797): n is a, c, g, or t
  misc_feature (872)..(872): n is a, c, g, or t
  misc_feature (917)..(917): n is a, c, g, or t
  misc_feature (933)..(933): n is a, c, g, or t
  misc_feature (941)..(941): n is a, c, g, or t
  misc_feature (966)..(966): n is a, c, g, or t
  misc_feature (996)..(998): n is a, c, g, or t
  misc_feature (1001)..(1001): n is a, c, g, or t
  misc_feature (1005)..(1005): n is a, c, g, or t
  misc_feature (1008)..(1008): n is a, c, g, or t
  misc_feature (1011)..(1011): n is a, c, g, or t
  misc_feature (1015)..(1015): n is a, c, g, or t
  misc_feature (1017)..(1017): n is a, c, g, or t
  misc_feature (1019)..(1019): n is a, c, g, or t
  misc_feature (1021)..(1021): n is a, c, g, or t
  misc_feature (1025)..(1026): n is a, c, g, or t
  misc_feature (1029)..(1029): n is a, c, g, or t
  misc_feature (1041)..(1041): n is a, c, g, or t
  misc_feature (1045)..(1045): n is a, c, g, or t
  misc_feature (1050)..(1050): n is a, c, g, or t
  misc_feature (1055)..(1055): n is a, c, g, or t
  misc_feature (1057)..(1057): n is a, c, g, or t
ggtgctggttaggttttattttaacaggatgttttctcttatttttcaaaatatcagttatatcaatattagaagtgtaaacaggtacaaaatatacagtacatagaaacaattttcttaactagtctatcgcctaataaaagtatgcatgagggggctgaatgaatgggcactgccaggtccctccgtctgcaggggaaacaagaggaccagtggctgcttcaacaaaacaggaatggatatttgtgtggtaggaacagcactgtggtcgaatcaagaaatctgggcccacctttatgatgttagatgctggaatgaacaagccacttggcccccaaacccagcctcgcgagctgtgccctctgagagtgcacacattaaggaggctggggcacaggggaggcggctgctacaagcagaagttcctttgaggcctggtgactggactcttgtcggtgtgggacaaatattttaagagggaaaacctggaaatctctgttcacccacagtgatgttccagtagaatgaggcatctcgcctgttgctcttccccactcatggcacgccacgtgtacccacagtgagaggctgaggtgtgtcccctctgagcagtttgcacctctaaaaagaaatccctgtcctgctgcttcccaaggtcacagtaatgatcaaatgagatgcattttgaaaataagaaactaccacacaaagtgaacaggagacagaagcatctcacggagtgggaaggcagccccaggttggggtgggcggccaggcntnncncccanctctgcgantagctagacgtttgtggtgcagctccccagtttcagcttctccatctccccagacctaacgctgggatttcaganaactcgtccttatgaggccagggagtcacacactaggggacacancaagtgcccttgggangggtacanagatggcccaaaatagagaaaactngggccacacttttggggggccttttcaggnnnggnagcnggnaangcancncnantccnnggnctccttctgctnaatnagggntgtcnangg

SEQ ID NO: 441386 - DNA, 818 bp, Homo Sapiens
aaaatttaataattactctttatttaaaataaataagccctcttacttacagggaaaatatgaaagcaaactctgtcctcctggtctaagacagaaaccacattcagaatatgttcattgaaaaaggaaagatttgttgattatcaaacaaatctaggtacttcaatacacattgtttctttgaaaaataaagactgaaaggaataattcatttcaaaaagtcacaggttagaaaaccaattttccttctgaggctcattttagcaaatcctccaagtgttcccaaatcttttaaaaaagctacatcccctgagaaagggccctttccctgtagccctcttgctctgacaccagcagccctgcacccttctgccaagtggctccctgcaggacggtgctgtttccgggcaggaattgggcctccatggcaaccttcagcaggcaggagctcaccacctgctttctgcaaactcactcacttggctcagctattctgcaatggagaggaagtttccttagcagccaaagtattctaagtatcacattttccagtattttccagatccgtagtgtgctcagaaagccagagctgtatcaccaggcttttagagaagattaacacctgcacatctgagtgacctttaacaggctccgcagcactgaacgcctgcagacactgcttcatgtgccctttaatgctgatcaatttccagattcaacagttacacaaattacattgtcatgaaaaacagaagaaaaagccccaaagtctttttcagacctcccctccttacccaaaatacagacacacaggcaag

SEQ ID NO: 441387 - DNA, 1170 bp, Homo Sapiens
  misc_feature (545)..(545): n is a, c, g, or t
  misc_feature (560)..(561): n is a, c, g, or t
  misc_feature (566)..(566): n is a, c, g, or t
  misc_feature (592)..(592): n is a, c, g, or t
  misc_feature (641)..(641): n is a, c, g, or t
  misc_feature (649)..(649): n is a, c, g, or t
  misc_feature (659)..(660): n is a, c, g, or t
  misc_feature (831)..(863): n is a, c, g, or t
  misc_feature (876)..(1059): n is a, c, g, or t
  misc_feature (1066)..(1066): n is a, c, g, or t
  misc_feature (1070)..(1070): n is a, c, g, or t
  misc_feature (1085)..(1086): n is a, c, g, or t
  misc_feature (1089)..(1089): n is a, c, g, or t
  misc_feature (1107)..(1108): n is a, c, g, or t
  misc_feature (1110)..(1110): n is a, c, g, or t
  misc_feature (1119)..(1119): n is a, c, g, or t
  misc_feature (1126)..(1126): n is a, c, g, or t
  misc_feature (1129)..(1129): n is a, c, g, or t
  misc_feature (1141)..(1141): n is a, c, g, or t
  misc_feature (1151)..(1151): n is a, c, g, or t
  misc_feature (1156)..(1156): n is a, c, g, or t
aggcttttagaaaatttattatgaattccgagaagtctgctcatcatatacctcccccagccccaaataaaacaaacaacatgtttgtacataaagcctggatttacttggtacaaaatttgagtctttgaaaaaaatagttaatggaaaatctcaataaaaattcattttgaaagtaaccagtactgttcagaaataaggaagtcatgttacttgagaagtcacacagttttattacagaactatgtgtatatattttgggtttaaaacttgccaatagctgtttgaaaggatagctcataatttattcaaatagatattttattaatcaaatgtttttggtttatcaacataaccaaatgtataaaaaatgtttttaaatacaagacataactataaagtcatgaggctgattgaccttttaaactaacataataaaatctatatggtcaaaatgagtggtgatgctttaaggtaatgattatgcgtcccatctaaggatgctgcaatggcctagggcagttttgaaatgtctctttgcaacnaccttcaaaagggtnngggcntcataatttaatcattcatttgattnggtccccaatattattccagttcaatcatcatttatattcaccagtccnggcgattntgagaaatcnnattaatcttatttgtcacttattagcctattcaaagggatgtcaattgaggtgcggagtggtaattctgaaatttaagcatttacacacttttaagatgtgtaaattttagtaactactcacattatagacttgtttttggtatatgtctatcattttgaaataatgagannnnnnnnnnnnnnnnnnnnnnnnnnnnnnnnngagacagactctnnnnnnnnnnnnnnnnnnnnnnnnnnnnnnnnnnnnnnnnnnnnnnnnnnnnnnnnnnnnnnnnnnnnnnnnnnnnnnnnnnnnnnnnnnnnnnnnnnnnnnnnnnnnnnnnnnnnnnnnnnnnnnnnnnnnnnnnnnnnnnnnnnnnnnnnnnnnnnnnnnnnnnnnnnnnnnnnnnnnnnnnatggtcncganccccggaacccatgnnccnccgccatggccacccatnngngggggatanggggggngcnccagcccggccngaataagggnatgtncaagcacagggttc

SEQ ID NO: 441388 - DNA, 1061 bp, Homo Sapiens
  misc_feature (925)..(926): n is a, c, g, or t
  misc_feature (935)..(935): n is a, c, g, or t
  misc_feature (950)..(950): n is a, c, g, or t
  misc_feature (976)..(976): n is a, c, g, or t
  misc_feature (988)..(988): n is a, c, g, or t
  misc_feature (990)..(990): n is a, c, g, or t
  misc_feature (998)..(998): n is a, c, g, or t
  misc_feature (1000)..(1000): n is a, c, g, or t
  misc_feature (1007)..(1007): n is a, c, g, or t
  misc_feature (1009)..(1009): n is a, c, g, or t
  misc_feature (1032)..(1032): n is a, c, g, or t
  misc_feature (1039)..(1039): n is a, c, g, or t
  misc_feature (1046)..(1046): n is a, c, g, or t
  misc_feature (1048)..(1048): n is a, c, g, or t
  misc_feature (1053)..(1053): n is a, c, g, or t
ttttttttaaggaatgaagacaaacaatttaatctctatattatcatattatcagtcaattaatacagttggactttcaaactataactgttggtagtaaaataatctgatcacatttcatacagcaattaaaaataacagaaacagagtctcacctatacaatcagagcatctcctgatatgaacaacagttaagcccacatacattttaaagatgctacccagactacaatctatctcaaaagcaaccatggcataatgcattttataaaatgcctacctaaaaatacattgtattttgtaatgtttattaccaatgtgggaggcatttctagcctaaacactataaccaaactattcaacagtaagccggtagtagtcttacaataagaaatttcacatatacttgttattataaatagcattttatgttcattatttcagccatctctcaaactaagacaattttcaacagttaccagaagacactgagctagagtcaacagaccagatatctagttccagctctgcctctacctacctgtgagacacggggaaagttctcttaaccttcgtaaggcctcagatttctcaaccatagaacaaaggggctgaacaaaatgaattctaaagagcattcccataaaacgggatttggctaaattttcaagaacttaatttctttaaaaaaagatagctatgagataccaaacttggtatttaccaccaataatattgattatataagagctttaagccaaggaattactgattctgcacttatggggtgaaaatataagactatttttagcatgcttttccagttaccagaaaaggggagagggggatttttacaaagacagtaaagcatacagcaatggcagtaaagcatgcagcatagcatgctagtaatggataggcatanntgtgttccntttaggaacttttgncacaagcaagaggttttataaaaganacacagcgccantnacacatantngtgtgancngcaaattcaaacccagttgtatngaaaggnaccaaanantcagngtattcat

SEQ ID NO: 441389 - DNA, 1615 bp, Homo Sapiens
gcagatgaaaccaatgcattctttattgcagactgaagcttaggggctcactcactgtgagctctgatttgggggcatctgtggctgcccacactttccaagacagacaagggcaaactctccaagcagaggagaaaacaacttccagaagctgccccttcaaaggcctgaggtgaggacctggggcagcaggcagcttggcatgcaggggttaaccagaaaggccgggtctggagggctgggcacacctaaccctcatctcctggtgactgcaggtcacactcccttcttcaggagtgccatgcagactctggaacaatctaacaggccaagtgtctcccagggtgggttagggaggaggctgaacacaggctcagatccctggaagtggcagggagagaactgagagaaacttcaccctctgctcgggggacatccccagcctaggtccttgcttctcaaactctaaagtgcttataggaatcagctgggggtcttgctaaaatgcagggtctgagtcgggaggtatagggtggggcctagactctgcattcctaacaagctcccaggtgtcactgccgctgctggtccacagaccacactttgagttgcaaaggctctggtcaatacattgtgtttgtgcaacatcagagaaggatgcctcttcttcaacaaggagaaaccccactccagggcacaaggcaggtggggccagcgcagcctgcacaggacttcagcccccacttgcccccaacacccacagatgaactcggtagctctggacatcctgtcttgacctcctcatcctgaaaaccctttgcccagagtttgaccaaccaggccttgggatacgagcagaatgaacagagtctcttgagatactgagcgctcagtgatggcccaacaatggcccgacctatcagttccttcccaagagacaagagacctgggcagggacgagggaactgggagcattctgagcagggattactgctctgagcagtggtctgagctctcaacatcttagccttaggagtagtaaagtggccactcgtccacggcacacaggatttggacggcctggctttgcctcaagctctggggcctcaggtgtctctggagatgcaaacaaagatgcagatcaggtggggtctggggcactgagttggcttgctccacagatgaggagaaggtgggaggtagatacctgaggaccaagcagtcaaggttcttcaagccacaggcgttctcgggaagcaaagagccccaggccctctcctggtaggggaccaaccatccccacttgctgggtactgtcccagttttagcattgaaagttccatgtcctgggaaaccaggacagctggtcaccctgttgcctgaccataccctaagatgccaggttgagggcctcagaagaaccaggtcatcagggctttgggcgttggcctgggagctggctggctacaaatcccgtggtccacatcgccttctgcccccaggaggccatgacaaggcagccaggctgctgctggactggacagtggtgagggtggccatctaatcactttagacaagagctgcaggtgtaactgactctgctgttctctgggcc

SEQ ID NO: 441390 - DNA, 462 bp, Homo Sapiens
  misc_feature (295)..(295): n is a, c, g, or t
  misc_feature (345)..(345): n is a, c, g, or t
  misc_feature (374)..(374): n is a, c, g, or t
  misc_feature (388)..(388): n is a, c, g, or t
  misc_feature (403)..(403): n is a, c, g, or t
  misc_feature (417)..(417): n is a, c, g, or t
  misc_feature (426)..(426): n is a, c, g, or t
  misc_feature (432)..(432): n is a, c, g, or t
  misc_feature (450)..(450): n is a, c, g, or t
ttttttttgaaaccaatggcattctttattgcagactgaagcttaggggctcactcactgtgagctctgatttgggggcatctgtggctgcccacactttccaagacagacaagggcaaactctccaagcagaggagaaaacaacttccagaagctgccccttcaaaggcctgaggtgaggacctggggcagcaggcagcttggcatgcaggggttaaccagaaaggccgggtctgggagggttggggacacctaaccctcatttcctgggtgactttcaggtcacactcccttntttcagggagttccattcaggactctgggaacaatctaacaggccaagtntctcccagggtgggttagggaggaggctnaacacaggctcagntccctgggaagttgncagggagagaactnaggaggaantttcanccttttgttcggaggacntccccagcttag

SEQ ID NO: 441391 - DNA, 1157 bp, Homo Sapiens
  misc_feature (12)..(12): n is a, c, g, or t
  misc_feature (46)..(121): n is a, c, g, or t
  misc_feature (1035)..(1035): n is a, c, g, or t
  misc_feature (1065)..(1065): n is a, c, g, or t
  misc_feature (1069)..(1069): n is a, c, g, or t
  misc_feature (1088)..(1089): n is a, c, g, or t
  misc_feature (1105)..(1105): n is a, c, g, or t
  misc_feature (1115)..(1117): n is a, c, g, or t
  misc_feature (1123)..(1123): n is a, c, g, or t
  misc_feature (1129)..(1129): n is a, c, g, or t
  misc_feature (1132)..(1132): n is a, c, g, or t
  misc_feature (1135)..(1135): n is a, c, g, or t
  misc_feature (1138)..(1138): n is a, c, g, or t
  misc_feature (1140)..(1141): n is a, c, g, or t
  misc_feature (1144)..(1144): n is a, c, g, or t
  misc_feature (1153)..(1153): n is a, c, g, or t
  misc_feature (1156)..(1156): n is a, c, g, or t
tttaattaaaanaataatcgtaccacggaatgaagaagtagctttnnnnnnnnnnnnnnnnnnnnnnnnnnnnnnnnnnnnnnnnnnnnnnnnnnnnnnnnnnnnnnnnnnnnnnnnnnnncattttatattcatctgtataaacatatccgctaaggcaaacgcaatccgggtccgaggctgttgcgctgggctcggtgcctcctaatttctgcagattctaaggccaaaaaataaaacctctgcaagtccgcgtagcttccaggactcctgggcattttactaaaataaagagttatcgagtttaaaaagcagtgacgtcgttatgacacacactgaaagttgcataactgtggcctcgagggccactcacttgtttggactgagtgatggtcacagtttcacgacacagcaacagacaccacacacaggcacacgcatgtcagcaagcacgtgggaagctgtggcagaacccggccggtggcctgggcctgaccacggcctgtctggtgcagggcaccagggtgttagggtccccatgcttcctcagggggtgggcatgacaggcaggtcgctggtgacaaggcagtggacgtcacttggggaaggatggcgggagagggctggacaggcccccgctgcccaccgcctggcgcatgcaaacacacttaaagcacttctcggaggcttctcggagaatcaaggcgaagcgctcgtctccttccctaggaaggtgccaattcttcctcccgccccactctctccagagccccgagaccctcagggtgttctggctgggggtgctaggccgcggtgtctccgatccccagagccttccctgtccatgatcccacggcatgcccggcagggggtgggcctgtgaggtagattggcacagttgcccccacactctgcgtggctgggccccagagatctggggttctcgcgagtcagcatggtggtgctagggggcctgcccgggtcccttcaccagaacagaagctccccaacccctctcccatttcagtagatggnagacgcagaggaggaaaaggccctgggggngggnccctcgtgcctccaattanncccttgggtcccattntgtggggggnnnccctgnttcttnctnttnttncnnctncccagctanggna

SEQ ID NO: 441392 - DNA, 1620 bp, Homo Sapiens
  misc_feature (1248)..(1290): n is a, c, g, or t
accgccgcgtgtttccccgactgaggaaagttttaatttgccaagggggcaaaaaggctctataaatccgcaagggcaaattaaaggtattctacccaccccgtttgtaaaggatctccatcttccctagaaaagctattaacatataaaaacggattttgccggaaaagggggacacccggggggttatttttaatcaggcattgggtggaggttctccgggggaaaaggcccccacagtcctccggaaaacccactgggattcttggaaagcgacggaatccctcccggccgttttaaagggggggaagtccaatcccaaatgtgggccgggatttcctggcaaagggtcgggcaccgtatatttaacctagagggctcaggggcccaaaagaatttcatccaaatcttggagggggctaggggggcggacgagatagagaattaattatataaccagctttgattgtcgtactttttattctttactcaagtgctggcatattggacttatgtttttgtgatgtgtaatatttggctagaattttatcttcctttagttaaaaaaaataatcgtaccacggaatgaagaagtagcttttttggggggtaggggacagggctgggcgttcaggagttctccgctatggtgtcctcgatccacttcacataagacagcactctgacggcgacagaaggcttattgggggtgccacaagggacgtagccccatgatgtgacaccttggagcacaccatcacacatcagcgggccccctgaatcacccacacaggtgtctttgccaccttccaggtgtccgacacacagcatgaagtctgtcaccttctggacgtgggcttttttgcactcatcattaggcaggattttgaggtccacacactggagatcatctggaaatgagaaattctctggttcgatgctgccccagccggaagccaaacaggtgctccccacttcgggttcctgggtgggcaactccacgaccttcacagcgtctgtgatggtatcagcaggctctgtcaggcggagcagcatgaggtcgtggctgtagtcctcgtctgcttggcgggtgtggttctccaggaggctcatgttgaagccagggtgtgggaagctctcactgacatgaacaaactgggctgtgttttcgtcgtcaaacaagttgtggcgacccagccagagctggtaattgctggggaaagatgggaatggagggatgagaagacnnnnnnnnnnnnnnnnnnnnnnnnnnnnnnnnnnnnnnnnnnntccccaaagagagaaagggaaagagaaaaatgtgggtgggcggagacagaggaagaaagatatagttatggagaaatacagacagcgaatgggaagatgaaagagtttgagagtgcaaaaggcaaatgaagagacagagcaaaaaagagctcaaaaggacagaggggtgagaaaggcggaggggagggcagtgagaaacagggtgagcaaaaaagaggcagatgagaaggataaaagacagggacagcgagaaacaggcccagggaagagggaggaagagggaacagaacacggaagggagcgagaagcagacaaatgaaaaaggacccc

SEQ ID NO: 441393 - DNA, 1240 bp, Homo Sapiens
ctgctttgaaattagccttagattgccaaccaatagatgagaattttgaggaaaaaaattaaaaatatgtaaaattaataatttgcatgaacacagatgactacattttccaaaacttagtggactctatgtgatgtactaaatgtatacaccttgtaagcaatagttatatttaggtggtagaacatagcaaaaatataaccgaaagttggccgactgcacttgctatggaataagaccttttattctccctcagtctcgagataaatagccagcctagagcacaacagggcattgggtacttgcatcttaggtatttcttcccagtcacatccattttgtggaagattaacccaaccccttacactacactgaacactaaagaataacatataagcacacaaattggtgacagaatttcaattacgtgaacgcatcctctttgctaggtccaaaaacaaagggcaaagcagacattttagtatacagagtgattggcaaatatttttcaagatttaatatgagcaacccattatttgccctatccaaaatatattcaagggccttccaagttgtagaagaacaatgatcttcccataatcaaaagtggagagtcgaaatgctgtgccagttgctctggtattcaggtttctctgggttttacagaacgcatggaccccattcacgtttggttggttaacctccaaattggagtggaaacgagtgcgatttatttaagtggtatataaaaataaaaggatagcatttttatacaaatatctttaaaggcacaaaagatttattcacaagttttggagggctttttgttcctctgatagacatgactgacttttagctgtcataatgtattaacctaacagatgaaatatgttaaatatgtggttgctctttatccctttgtacaagcattaaaaaaactgctgttttataagaagactttttgttgtactatgtgcatgcatactacctatttctaaactttgccatattgaggcctttataaactattgatttatgtaatactagtgcaattttgcttgaacaatgttatgcatatcataaactttttcaggttcttgtttaagtacattttttaaattgaacagtatttttcattttggttataatatagtcattttgcctatgtttctacaatgaagtgttaaatactttataaaaaattgttgactgacttatttaaatgaaattctacatattt

SEQ ID NO: 441394 - DNA, 1394 bp, Homo Sapiens
  misc_feature (545)..(571): n is a, c, g, or t
aattctctttaaaattattctttgattatgtttttggcccttcccctctttgtcatacttggcttcagcctgttttaagctgaatgagtaggcatttaagaaggttcagcactatgaaatgtatgtataatgcgactggactctacatacatattttcatcaaaacattttacagggatctcagcactaagtatgcagtagatgggacaaaagtcacaacaggcaactttattttagaatttgatccataaatcaacaaaataaataaaaggagctgagtctctctctattatgttagtacacaaaataaaccaaaaaatacatcaacatttaccatgagatcatttaaatgtatttgcaaatgatctgataagggaaacatgatttacaacacgggaaacttcttttaacaaccattgacttaaatgcacggcactgtaggtcacctagactaggttagcaagaatgagcaaagtggtaggtccaaaaggcaacctccaaacaccgtcctcaggtgggaactttggcaattatctgtggttaannnnnnnnnnnnnnnnnnnnnnnnnnnctaccgattcctatccttaatcacgttgggtggtcttttcgtccattcttctgcgttgtgtcccctgttaatacttcaatttttttgggggcactcaaaatccccagaacaacagactcttccattcttgcctttcccggttgtgcgggggggtccagccatcgtccacactgggccactaagccgtgaaacaccattgctgtccaggccagtttttctgatgtcctaggtggtgttatcggctgggcgggggtcgctggcacagcgggggcaacattccccttctcagatagctgtatactcacagctcaagttggggccaagtgagtggccagcaatctacctctccttccagacaccgacactgctgacagctatgggtcccaattgtctccacttcgatacagcttgtgaccattttggtctaaacattgacttgtgactctggtgtcacattctgggcaacagaataggtcagcacttggattctggcaatcacaagctgtccgtcggcagaatatcttgccatccttgcaggagcagacagaacacctgtcttctttcaaggtccacacctggccattgtgcttcagccccccttcatgaggacagtcaccagagcaggagggcccagaggggcagagacagtcaaagccccctgccaggttgatgcaggcagaatcgttccaacaggtgtgagttcttaaggcacattcatcaatgtctttctcgcagtggcttcctgtgaatccagatggacagacacatttgttgggagccacacacgttccaccgtatctgcagccctcttcacagaaagctc

SEQ ID NO: 441395 - DNA, 727 bp, Homo Sapiens
  misc_feature (50)..(140): n is a, c, g, or t
  misc_feature (446)..(446): n is a, c, g, or t
aaaggaagaaataaactgtctttatctgcagttgacatggctgccaaagnnnnnnnnnnnnnnnnnnnnnnnnnnnnnnnnnnnnnnnnnnnnnnnnnnnnnnnnnnnnnnnnnnnnnnnnnnnnnnnnnnnnnnnnnnnacttgaaatgtaaaagtaccatttacaatagcagtccccaaatgcagaatgtgagaaaagaattttaatgtatcacaaatgtatgaaacaatctcactgaaagggatgggggaataaggtactgacataggtaaatttggaaatgagtggagtctgtaagaccaaaggcaaaaggaactgtacatagcactctactccagttgataaagttgttttccacaggggcacaggtttacaattttgaagccactatatatttatataattaataaacaattagtaaaatggatggcagatagtaggagncaggtttctcacagttggagtagaaggttacaaataagcaaggggaggctagaatgatccatgcagtaatagactgtagttggagacactagtataaatttatgtttagccttatataaatacagatggttatatacagaaatatttatatttccataaatactttatatatgtatgggtattatatacacatatatctttttgctatgtcaactgagagggcctagaagcaattatatttcagcagcagatcagtatgtctagcacccagatcttgtttt

SEQ ID NO: 441396 - DNA, 602 bp, Homo Sapiens
  misc_feature (511)..(511): n is a, c, g, or t
  misc_feature (556)..(556): n is a, c, g, or t
  misc_feature (570)..(570): n is a, c, g, or t
  misc_feature (599)..(599): n is a, c, g, or t
gagttaagggtcttgcgaggtcattctggacttggggtgggccttaaattcaatgaccagggttcttataaagagagcggccacaggaagacggaggagagactggaagatgcagccgcagcaagggacacggtggccaccagcgtgggaagaggctgggagctgccccagagcccctggaaggactgtagccccgctgacccggattccagatctctggcctccactgagagccagcctgtcgggggcagccctgggaagctagtgtggcagggagggcccagcccggctgggcgggtgcccgggctttagcagagggccagcgcggtctcggggtcccccacgatgtccctgtgcaccagcttaaaggtgtcaatgaacagctccatccagtcctgccgctctaccccggtggcgaacttggcccgctcggcggtgtagaccaacacggccaccagctgggattaggcggccgggtccttcttgagctccgtggcgtttagcaactgtnggatcaggggaatggtcctggggaaggtggcgtccggcccctctnccgtgcggaggaangtgaccgggggctcgccgccagccacggngca

SEQ ID NO: 441397 - DNA, 873 bp, Homo Sapiens
aaggttggcaaaggggaagtttaatgggaccatcaccgtgataccccatcacagcagtcccaggctggaggccccaggctctggccgcctctcccagcatggtgggcctggagagagcaccagcaccacctcccactttccctggggtattgctttgcccctgtgcctcccaccccaggaagctacaagagacaggctgtcctgtccccacactctccctgggtcctgggactccctgttctgaggggctaaggttgcctggggccagagggccctccccagggacaaccatcctctccctgtgtcccctgccccccacactgagggaatgtctgtgtccttgttcctctgccaggggccaactgaggctgccaaccctaggggcggggtgcagggctgtgcggggagggtggctcagatccctgcaaggaggcgtgctgcagggacagcacagcctgggcccccggcagacattaaggcacagtgtggcggtcaccatagggctgctggggcccttgccccggggcggcacctggcaggtgctggcatccggggctaggcacagctgtcagtgttgagacaggaggcatggtgtgtgcgggctggccccagggcctgcagtgcaagagagctgggagtggggaggccaggtccacaggtctctgccagacacaaggaggtccctctccccattctccctgcctgggagagcccaggggaggggcttgtgggcctgggcagagctcatggccagagccgagacgcagtcatggcaggcctggcccacagaaggcacaattgtggtgtctgggaggtcgagggtcagcccgccaacagggctaggcagaccctcgtgccgcctcgtgccgaatt

SEQ ID NO: 441398 - DNA, 1272 bp, Homo Sapiens
ttgtttttcagagtgggaaacgtgtttattgtttgatcagtctcaggcctggttggggggtggaaggcaggactggggtcccttccccaacaacagcgcagaagccccaggaagatggcgcagattcctgacgacccacagccaccttttatgaggccagagactttacacaccacactccccacctccatccagtcaaggctctgccatggaacagctgatatctttaggctagaggactccattctgtgtaggggctcattcccatctcagctccagaacacggaggacctgaagattactcacggattcctccttcaggcagggctctgcctttgagatgcggctgctctgtgtctgtgtccagggccctgaacaccagcctcaggctctcaccaggtgtctggacaggagtccaggctccctgcaaagtcctgtggtacctggggcacccggcagcccggctcatggatgcttccaccgcgtgtgtttctgcagtgtgttctgctccataaagcggcgagggcagtgtggacactgaaacgggcgttccccagagtgcacccggctgtgctgggccagctcacccgcatcccggaagcggcgagggcagagcgggcagccgtggggccgcccaccacccgccaggtgaatggaatggtgccgtgccaagtggctggcgcgcttgaatgccttcccacagatgtcacactcgaagggctttacctccgagtgggtgatgctgtgtcgctgaaggtaggacatgtactcgaagacccttgagcacacggggcagctgtagcactttttctggcctggagccccactggcccctggctccctctgtgactcctcgtccaccagcactgtgtaggggacaccctgagtgtcaataagcaggtagtggttgggccttggaggagatgaagcctggggagatccgatggaggaggaaggtccaggttctggggagcggcaagtccgacggggagggccctccatggtctcaacggaggaaaatgccagaggctgagggcagggggatggcagcaccagcatccggagggctggctgaggcccagtgcagcagcctctcaggtccgggcgactccaagcggccccgggctaccctcgcagttgcaggcggcggcgagaaggggacctctgggtgtgccccaggaactggcggcgccggccgaaagagagaagccgaagggagagaagagggtctagggaaggaaggttggggcggggcgcccgggcccgcccgct

SEQ ID NO: 441399 - DNA, 1371 bp, Homo Sapiens
  misc_feature (664)..(664): n is a, c, g, or t
  misc_feature (685)..(685): n is a, c, g, or t
  misc_feature (688)..(688): n is a, c, g, or t
  misc_feature (690)..(690): n is a, c, g, or t
  misc_feature (694)..(694): n is a, c, g, or t
  misc_feature (697)..(701): n is a, c, g, or t
  misc_feature (704)..(704): n is a, c, g, or t
  misc_feature (710)..(711): n is a, c, g, or t
  misc_feature (714)..(714): n is a, c, g, or t
  misc_feature (718)..(718): n is a, c, g, or t
  misc_feature (722)..(722): n is a, c, g, or t
  misc_feature (725)..(729): n is a, c, g, or t
  misc_feature (740)..(751): n is a, c, g, or t
  misc_feature (757)..(758): n is a, c, g, or t
  misc_feature (762)..(763): n is a, c, g, or t
  misc_feature (766)..(766): n is a, c, g, or t
  misc_feature (771)..(772): n is a, c, g, or t
  misc_feature (781)..(781): n is a, c, g, or t
  misc_feature (788)..(791): n is a, c, g, or t
  misc_feature (797)..(797): n is a, c, g, or t
  misc_feature (811)..(812): n is a, c, g, or t
  misc_feature (819)..(819): n is a, c, g, or t
  misc_feature (837)..(837): n is a, c, g, or t
  misc_feature (847)..(847): n is a, c, g, or t
  misc_feature (872)..(872): n is a, c, g, or t
  misc_feature (879)..(879): n is a, c, g, or t
  misc_feature (893)..(893): n is a, c, g, or t
  misc_feature (916)..(917): n is a, c, g, or t
  misc_feature (934)..(934): n is a, c, g, or t
  misc_feature (937)..(937): n is a, c, g, or t
  misc_feature (944)..(944): n is a, c, g, or t
  misc_feature (1107)..(1107): n is a, c, g, or t
  misc_feature (1122)..(1122): n is a, c, g, or t
  misc_feature (1130)..(1130): n is a, c, g, or t
agtgtcaacatgccatttattttttgtcatcttgaactaaaagtacagctgcaagcaagcttgctataggacaagcttcagcttgggaaacatcaactatctgcactcaggacttacctatttccagaggaatatcgatggaaggtcaggttaatacttaatttcaggttgtttgctacttttaaatcaatgcagtgtctagttataataaagagtcaaacaatgctttacattgtatatatgttcatagatttcatccaatataaaataaagacagtccttttaaacaaaagatagggaagaggtaaatgtgacactttttccgcttacaaaaagtaatgccttataataaattttaattcaaccatttaggggggtcagctgcagtgaaccttttatttcttcaaaatgctgcttctgccaacagaatttcatgttctcttctttacagatagataggaactccttcaattgtaattctgtttgccctagagtaggcacaaaattcagtgcaaccatggcatagtgttcttctggccagttcccacatctccatttcatgatgatcttcttatttgttaactcctttacagtgaagatgctatacagctgctctacagttgtgtcaaacagttccatcatgtgaagagccacagtgggaatncttacacccagtgccactggngangngggntgnnnnnggngggtannggnactnaggnttnnnnngagagtgaatnnnnnnnnnnnnataggnntggnnggnaaaannattgccgtngtaaatnnnnagtgtnatctacttcatttnnctcaganagattgggtatttgaatnaatcccttgngcttcactccagattctttaaggangcctttncagcccagtttgangttccactcatagaagaaaatcnnccttcctttgcgggtgntgnacgaagnctccccttccacctgcttcaactcgttgatctcgccgcggccagcgtcattctccacaacgatgcccaccaggagctcctggaacttccctttggacaagctggtggcatcccgctctgtcctgccagggaccagaaagtcgtgaatggaagccccagctggnatccacctgcctggntgccaggntcacgtccaagcccagcccagatcggcccaagtcctctcaagcagcctcgaaacctgccaacctccaatgtgctcctcaaacctgctttctatcaaattcttttcatcctgctcagttctttaagatattattgtccactatgcaagtagtattctgtcttaaaaacactggcttatttaagggaggaggatctagctagctcgcccactggaaataggcaagctaggccacagggaaagt

SEQ ID NO: 441400 - DNA, 896 bp, Homo Sapiens
  misc_feature (815)..(815): n is a, c, g, or t
tgtttatcgatgccaccaggagtcgtggtggggcatcgtggtggagaatgacgctggccgcgggagatcaagagtagaagcaggtggaaggggaggcttcgtgcagcagccgcaaagggaagctgattttcttctatgagtggaacatcaaactgggctggaaaggcatcgttaaagaatctggagtgaagcacaagggattgattgaaatacccaatctttctgaggaaactgaagtagatgacactgagaatttacaacgggaatgattttaccaacgaaagctatggcaacccaggaattgactgtcaaaagaaaactgagtgggaataccctgcaggttcaggcctcatctccagtggcactgggtgtaaggattcccactgtggctcttcacatgatggaactgtttgacacaactgtagagcagctgtatagcatcttcactgtaaaggaggaagagagagcttgtgttttattttctttaacaaataagaagatcatcatgaaatggagatgtgggaactggccacaagggcaaacagaattacaattgaaggagttcctatctatctgtaaagaagagaacatgaaattctgttgggagaagcagcattttgaagaaataaaaggttcactgcagctgacccccctaaatgggtgaattaaaatttattataagggcattacttttttgtaaggcggaaaaagcgtccacattcacctcctcccctatccttttggttaaaaggaccggcctttatttttataattggcatgacaatcctatgcaggcgtcatatacccactggccnggcccgcttccagcgcttgccacgcctccaaccaggtaaacattgtctggggccgccccttcgcggcaccctctgaagaac

SEQ ID NO: 441401 - DNA, 1083 bp, Homo Sapiens
  misc_feature (761)..(761): n is a, c, g, or t
  misc_feature (769)..(769): n is a, c, g, or t
  misc_feature (771)..(773): n is a, c, g, or t
  misc_feature (793)..(793): n is a, c, g, or t
  misc_feature (1013)..(1013): n is a, c, g, or t
  misc_feature (1019)..(1019): n is a, c, g, or t
  misc_feature (1021)..(1021): n is a, c, g, or t
  misc_feature (1023)..(1023): n is a, c, g, or t
  misc_feature (1030)..(1030): n is a, c, g, or t
  misc_feature (1048)..(1048): n is a, c, g, or t
  misc_feature (1051)..(1051): n is a, c, g, or t
  misc_feature (1066)..(1067): n is a, c, g, or t
  misc_feature (1075)..(1076): n is a, c, g, or t
agcgctctggaggctgtgcgcatgcagcacctggtgagttctggggcctgccccatcccccaggcttcggactgggcctgggatggatgcaagctctggtgcagagctttttaggtttctccatcctcttatgcacagcctttcattatcctccaagttacagcagcaagagggtgggggtggaagtggaggtggcttttttttttctcctgttctgcattcctgcccacacccccacccctccatttccttctgctctggaggcatcctccttcattggacaccacacagtttatttcacttctgacttcaaggttgtgaattcttcccatggcttaagtcctgggatacttctgcagtgaaaggaggtcttgtacctcttcctcagagtcagaagttctgagtacctttgccctattctgaaaagggctaggggctcctgctcccagctgccctcttcctttggcttccaattcagttccctctgccccgcatcctgcagacaggcgctcccgcagggggcccttgtggacctgcactggagtctgttgccttcactgagctgcctgtgctggccttgcatggtgcctgtagggggatttgctttgctgtgccattggggtacagctgctgctcttactctagaccaaaaagtcgggttgagtgactggtggcagggcccagatagagacagcggggagggtggctgaccctggcggccctggactgagcgtctggaggagtcgtggaggatctttccnaaaaatcncnnntgagagctcgttcttcaggntcttccagcttgtcatgtcgagtgcctggccactgctcagggttggaggctcagtccctttgccctgtctgttccagctctggagctaactcagggatccctgatcagggttacataggtttggtaaaatgagtgctggaaattaactttctcccagtagtcttaggtcatgctcagtgaacattaaactttatccagatatggttttccttcagccttnatatancntntcaagcnagtgaaagacccgctacncantgacctaagccccannaaaccccnnagattaa

SEQ ID NO: 441402 - DNA, 936 bp, Homo Sapiens
  misc_feature (265)..(267): n is a, c, g, or t
  misc_feature (421)..(421): n is a, c, g, or t
  misc_feature (423)..(430): n is a, c, g, or t
  misc_feature (542)..(542): n is a, c, g, or t
  misc_feature (591)..(591): n is a, c, g, or t
  misc_feature (603)..(603): n is a, c, g, or t
  misc_feature (811)..(812): n is a, c, g, or t
  misc_feature (816)..(816): n is a, c, g, or t
  misc_feature (892)..(892): n is a, c, g, or t
  misc_feature (930)..(930): n is a, c, g, or t
ttccctgtcacacacacacaaatacacatatgcacaatggcaactttgtcaagactgagaaagaacagaatgctggtgatttactgagaatgatcagcaatttacagcgcctagaaacagtaatcaggttaaagaaagaactttccatcccaaaggaaatctgtgaagaaagcatgtcccctcaagttgaaaagatagataaatgggcatttttcccagagccttcccaaacaggggccaaataactgagtgggacccgccaaannnggagaaggagacaagagtataaaggaggcacaaaacgcctttagaaagtgaccacacaagatctccagtattgtcgtcattcatttgatttaccaggcagcttgccaaataaggcattggtaatttagtggcattaagatgagcttagtcagcnannnnnnnncgggaaaaaggaaagctttttgtgttgccaaaaccagaataagaatttccaaatgtccgtgtgccatagtcaaagcagggtaatgctaaagtgacttttctgcaggctagancatcttgctggccattcttcccgtcacctcccatgatgagcattttaanatgatcaccagngagcccaagagccaaaccaagattttctccaaacagtaaggcattccacacaaggtcttctcgtaactagaggcaacacatttgtgctttatttgacaaataacaatctcagagcttagcactgacaccaagggaagaatgttaccttcctctagggtgcttagaattaccaaacattcagaattgcagggaacagactgcttccccnngggnaatatgtgattttttgcaaaaataatgcaattgttgttatttatttaacacaatattttgtcattttatttttagnaaatcagctccatattttataaaggaagcatagttttnagagag

SEQ ID NO: 441403 - DNA, 870 bp, Homo Sapiens
gtccttcacccaagttccccaggtagcctgtttccccaattcacgacgtttttaaacgacgggcccagtgcctagcgttattattcgactcactatagggacccccgtgtggaccaggaaactgggtacgcggtaaggcttgggcccctcgagggaatacttctagagccggccgcccctgtttttgtgtcgttttgtttcggttttattattgggtgggtaatgtgttaaaggtgttcttttccccccttttccccctcccggccactccggtttgtgtttgccacaagactcataattcctttagaaagtggagtcgaattcataaaagtgatggggggagagcgcggagagggaaggctgggagccccagggagtcttcactacctacactgccgctcagctcccggcgcgagtggaggtcggtgtggggagacgcgactcctgcccgggatggctgacactctgcgagccccggcggcccgcggccgggccgggtgactaggcggagggcgcggagggtccgcggcgggcgggtggcgctgcagcagcctgggcacggctgccgccgcccgcgggcgagagtgtgcacgggtgtggaaggccggagtgcgggccgtgaggggtgtgcgcgcttgagccggagcggggctcgcccctcgccggcgcccgccgcccagccggtgattgctctctggctgtccccggcacctcggcccccacggccgttggtccgggcgggtgagggtgttagtgagacttggtgtcatcaccatcctttgtcagaaggggaggaaattggaatccagccagcggcgagcagcagctgggcggtcacatctgggaatgcaaagccgacctccccctcct

SEQ ID NO: 441404 - DNA, 986 bp, Homo Sapiens
  misc_feature (306)..(306): n is a, c, g, or t
  misc_feature (317)..(317): n is a, c, g, or t
  misc_feature (323)..(323): n is a, c, g, or t
  misc_feature (333)..(333): n is a, c, g, or t
  misc_feature (335)..(335): n is a, c, g, or t
  misc_feature (339)..(339): n is a, c, g, or t
  misc_feature (347)..(347): n is a, c, g, or t
  misc_feature (349)..(349): n is a, c, g, or t
  misc_feature (356)..(356): n is a, c, g, or t
  misc_feature (360)..(360): n is a, c, g, or t
  misc_feature (364)..(364): n is a, c, g, or t
  misc_feature (368)..(368): n is a, c, g, or t
  misc_feature (370)..(370): n is a, c, g, or t
  misc_feature (390)..(391): n is a, c, g, or t
  misc_feature (394)..(395): n is a, c, g, or t
  misc_feature (397)..(397): n is a, c, g, or t
  misc_feature (420)..(420): n is a, c, g, or t
  misc_feature (486)..(486): n is a, c, g, or t
  misc_feature (496)..(496): n is a, c, g, or t
  misc_feature (508)..(508): n is a, c, g, or t
  misc_feature (515)..(515): n is a, c, g, or t
  misc_feature (519)..(519): n is a, c, g, or t
  misc_feature (574)..(574): n is a, c, g, or t
  misc_feature (642)..(642): n is a, c, g, or t
  misc_feature (736)..(736): n is a, c, g, or t
  misc_feature (959)..(959): n is a, c, g, or t
  misc_feature (963)..(963): n is a, c, g, or t
  misc_feature (968)..(968): n is a, c, g, or t
  misc_feature (973)..(973): n is a, c, g, or t
  misc_feature (975)..(975): n is a, c, g, or t
ctggaaagcaactgtgtatttacacaacagtggacgccttttacattgcagaggggcgggtaagagcgggatggctaggaagctacatcacctatttggttatgaacacagcattttcagatggctgggggaatagatgccacttcccactcaagacagggatttgctcagcgggaaagcaggtaataaaggcagcacatcctgcactttgaactgcatccgtctcatcctgcagccaccctgtagctcaaagcacagttctggagcctattaggtccaaatctcaattctacccttgagtcagcnaagccttaagnaaaaantccctcaaantntgtnttcctgtngnaaataangacngccncacnanaaggcattcgctgggccggnnccnntntccgaggtggcagtgtgcttggnctccatttgcctagcccgtgcgtgtgttcatcactggcagcggtgactgcgtgctgcttggggganagcacttganctgcctcaaaanaccctgntaancggaggacacttgcatggatggaagcaggaccgaggcaccgtgttggtccctgtnaaactctgggtgcactgaactttggggaggggtggtggcacagacctgggcctttctactctcctggnacacagaaataagcgctcccacttcccttctccactacggtgtttctctctggtgtggtttgggtggaagttaccagaaacgcaaagccctggncactgctacttctcctggggggagaacagatttgtggcctgcctttcgccaggagggctcctggccttgccttgctgatcggcagagacttgctcctcaaagggaaggggtagttggtccttctgagccatgtttccaacccatctggtaggctggtccctgcccgctctcactgcagcctgggccgcttttctctggcctgcatggaaggctgaccactggnttanagaanatggnanagagggcaggg

SEQ ID NO: 441405 - DNA, 1700 bp, Homo Sapiens
  misc_feature (240)..(240): n is a, c, g, or t
  misc_feature (370)..(370): n is a, c, g, or t
  misc_feature (379)..(379): n is a, c, g, or t
  misc_feature (392)..(392): n is a, c, g, or t
  misc_feature (394)..(395): n is a, c, g, or t
  misc_feature (401)..(401): n is a, c, g, or t
  misc_feature (411)..(411): n is a, c, g, or t
  misc_feature (414)..(414): n is a, c, g, or t
  misc_feature (416)..(416): n is a, c, g, or t
  misc_feature (429)..(430): n is a, c, g, or t
  misc_feature (433)..(433): n is a, c, g, or t
  misc_feature (437)..(442): n is a, c, g, or t
  misc_feature (444)..(445): n is a, c, g, or t
  misc_feature (450)..(450): n is a, c, g, or t
  misc_feature (465)..(467): n is a, c, g, or t
  misc_feature (472)..(472): n is a, c, g, or t
  misc_feature (475)..(475): n is a, c, g, or t
  misc_feature (479)..(479): n is a, c, g, or t
  misc_feature (481)..(482): n is a, c, g, or t
  misc_feature (488)..(488): n is a, c, g, or t
  misc_feature (498)..(499): n is a, c, g, or t
  misc_feature (512)..(512): n is a, c, g, or t
  misc_feature (517)..(517): n is a, c, g, or t
  misc_feature (521)..(521): n is a, c, g, or t
  misc_feature (527)..(527): n is a, c, g, or t
  misc_feature (536)..(536): n is a, c, g, or t
  misc_feature (550)..(550): n is a, c, g, or t
  misc_feature (566)..(566): n is a, c, g, or t
  misc_feature (598)..(598): n is a, c, g, or t
  misc_feature (615)..(615): n is a, c, g, or t
  misc_feature (667)..(667): n is a, c, g, or t
  misc_feature (675)..(675): n is a, c, g, or t
ttttttttcatatttgcatatactttaataacaagttcattttagtaataaatgaacaaagaaacagagacagagaacttaacacatgatacttccacaagtttgggtctaaaaaggtttacatcaaagtttaaaacatatactgtctgtgttaacagaggctacaataccaatttggattacgcacattatctaaaacattattatcaaagagtgcaaagttagatcaaacaacatcanggaaaattctgtcctaaaattttaacgtcttttaagaaagtctaaaaacctccttttttcccactgacttcaaaactttgagttttatatcagaatatcaatttgtcattttaactttaccatacatganaaattatcnaaaatatatcgangnncctatnctaatccccnctntntatctttcccttnngcnggtnnnnnngnngggtnctttatattcgtgtnnnggttngtnctcngnngggttngttggggggnnggggggcgcagtngtgtnattngggacngcatatttnaatatgtgactgcnttccatcaatggggantatttttgaataacttaattgagaagtattgngctccccaccaatttcngctgcaacagtattcctcctgaatgttttctaattagtgctctgtctctggnctttaggnccaatactctgtgtgtcctcttcctgactaggacgtttcccaccactgagaccagtgcccatggagcttcttccttgcttcaacaggtgagtttgctgactgtcgccatgagcatagtgtaaaataccactcccttgagagcaacttccactgctgctacaacctgggatattttctgcagaatatcccatgaagcctccattcccattaggattagaaggtactgatgccagaagacctagtcctctatatcgtgaaagctgctgatagatctgtttcatcctttcgatattcaaacggcttgcctcagcatggttcaccattggtttaggataattaactcctatcaaacatttggctaccttttggataccttctggtgcattccagggatcatagatatattttgcagggaagcctcttaggacaggcaaataacgcctgatatagtctccattgggatctgttctcctacctaaacccacagggcaatagcagtgaaaaaactgttgaaaaagggaactacaagacagccacatccaacttccagcatttatgctccaatctgcatcaagcaataattcttcaaataccttcattccttcttcccaactaatccacaggtcccctcgtgtcaggaagcaagcaactgcatgcctggctagatgatgaatccaacccttcctgacgaagctgtgttatgatggcatcaatcccatggaaagcctgtccggccttccgcccattttgctaaagcctcaggatttttatcccaaggaatctgaacacagatagggtttccttccattttatcaaagcgtggattatttgttgctgctgtatagaaaaattctcgccatcaacagattgcccataaagggaaaggggaggggaactgttcttctttacctttttgtagagatctgttagtttgaagtaaaacagtcgacatgacaaacaaccaaatcggagataaggactaagtccagtagggcttgcaagcagagaattcgcattcattcgag

SEQ ID NO: 441406 - DNA, 834 bp, Homo Sapiens
gtatagaaatcagcagccggtgtgttcaatgtactgtttcgacgtgagcagcggtttgccaagccatcgttaaaagaagttgcactgtgccatggtaatacctttataagatgtctgcagcagatccacaccctttttggtcttgatttcagttaactttaatgagatattcacacaatttggagctgaaagaggcgcctttccttctccatttcttcgcgcaatctcagcttccttttatctctgtgcggatcatcccatttttgttttgcgtgctctcttttctttttctcaatttttgtaaactttgtctcatattctttccaggctttgtcaaatggcttcttgagatctcctttgactccctttaggtctccttttaacacagaatccaaggtgaagatcacattgtggctcaaaccctggagcagatttttcagcagtgtggacagttccatttgtaagagtagaaaacttgacaaacgcggtgccaaggtcggggttgtctcgacttaaaaaattactccccaacttatcaagaacttgtgcatagttttcttcattttgtacatgatcttgaccagaattatatattgcttttacagacttcttcactttctgaagggcatgttctatcttggtctagagcctcctccagcagcgtgacggtgttcctgcagttgtgcagccgcgtggtgaagctggacgtggtgggcgagttgtagtcctcggtggtctcggcgatgaactccgagacagagatctggtccggcatccgattccatagtgaatctctcgacgaaaaactggagagcctggaggctgaagatctcc

SEQ ID NO: 441407 - DNA, 1146 bp, Homo Sapiens
  misc_feature (520)..(520): n is a, c, g, or t
  misc_feature (800)..(800): n is a, c, g, or t
  misc_feature (1008)..(1008): n is a, c, g, or t
  misc_feature (1018)..(1018): n is a, c, g, or t
  misc_feature (1024)..(1024): n is a, c, g, or t
  misc_feature (1041)..(1041): n is a, c, g, or t
  misc_feature (1050)..(1050): n is a, c, g, or t
  misc_feature (1062)..(1063): n is a, c, g, or t
  misc_feature (1066)..(1066): n is a, c, g, or t
  misc_feature (1073)..(1073): n is a, c, g, or t
  misc_feature (1091)..(1091): n is a, c, g, or t
  misc_feature (1119)..(1119): n is a, c, g, or t
  misc_feature (1121)..(1122): n is a, c, g, or t
  misc_feature (1140)..(1140): n is a, c, g, or t
gtaaaaacataatttaatgcatcgcggtgagtctgagtcaggagggaatgtggtgtggagaggtgaattttctgtttgctggaattctgctgtgggtggggttttggctgatggacagggaaatctgcacaagtatttcgggtcacaaagaaggacgccccaggaagcccgcgctccctctggcctacctccctggccagggcccggagccctccgcttctaggcactgggaggaggctgtctgaggagggcaggctcccggccctgcctgtccagtctaatcaggtttgcaaagtctgtgccgccgcctcaagggctcgggcgtcccttcctcccttgccgggatggggatggagaccaggagcacagccctgagcgtggtgggtcgcagacgcactgaggccaggagcggggcagggaggacgcagggatttgtcttttccaaaggagatgtcaggaagtgttatgaatcgagagtggcctttgctaaggtgctgcgcccgggcggagaccgggcggncctgctgccatccccgcctcgcaccccccgcgcccctaatccgggtacagaagatagctcgagaacgtgctgtacttgttattattgcctccgtgagccttcccgccatccagcttcacatacacttcgtcccctgaatccaagtgcagcaccacgctgttactggcgtagtcgtagttctggtcggcgtcctgtgcaatggcgctggcccggacctgcccgttcttgcagaggtccgcccacatgctggtgccgtcgccgccgcgcatgaggatgtggntaggtgaagaagtagatgccgcgtacctggcagctgaacttgcccgtggtggggtcatagtgattgctgaggttggtgaccacgtcatcgaacttcagcacctcatagccttcgtggggggctcttgagacccacatagaaggcgatcttggggccgctgaaggtggcgctcagcgagctggtcacttcaccctcggaatcgccacgnaccccgggcncgtcgncccacaccccgacgcgntgggcgctnccgcggtaagtnnagncctaganagccgggcatccggagtngccttttctccgagggcacctgggtcangnnggcaggctctaaggcgcncgcgcg

SEQ ID NO: 441408 - DNA, 1562 bp, Homo Sapiens
  misc_feature (1345)..(1345): n is a, c, g, or t
  misc_feature (1387)..(1387): n is a, c, g, or t
  misc_feature (1409)..(1409): n is a, c, g, or t
  misc_feature (1537)..(1537): n is a, c, g, or t
atggcggaaagcactttttaaaaaatatatgagaaacttcagcatgactagaacaagctgagtcttatcaagactctgacatatgttctcaaatactaatatctactagcgtctaggattttgacagaattactaatagggtgagactagaaaatacgtcagagtacaaagttacaaatgacatattcctagataatatattcttacatgtaattagtgtgtgagtacatacacatgctaattatgtttgcgtatcattgataaaatgacggactgcaaacacacatcaggggcttctgaacaaagcctacagaaccttggagatgctttcagcaaggcagcttggtgggtttgactttcactctctttacagtgcaaagtgttcaagattaagtgatttatttgtttgcttttctctcggtctaacatctcacactgtcagacacacagataaatataacacttgttcctccatttttcaagtgataagcagtgtgccgaggccacaggtgctccaatggttctggtgaggtggtttcaagatgtcacttggaatctcctcttgaaagtcaaagttgtcctctgaaaagatttaggcacatattgtgaacctgtcaaaatactttgacctgtccatgtgtgagcagcaaattccatttgtgtcaatgaactttttcgaggcgtatccgactgccggaacgtgtgggttgtgctgggccttgacaaccgttccagggtggctgttctttctcgaagacgcgatcgttctgtaccgtcaggcatggcactcaacacacggttttgtagatgccttcctctgtaagaaacaaggcggcatccaggaactgctgtattctgccccctggtctccgtgactagcggggggaacctgctccgtgacgtttgaaccagtggggaagccatgtggtccacgccagtcggcagttttgttccccgaagaacttcgtcactatagatgttgggagtttttagtctctgtgaatctgaagcaagagaaggcagcctccagggcactggtgttttctttgcagaaggtgataatccatgagtgtctgaggcccgtcccagtctgtgcggtgcggaggagagagcacctgcccctccacccgatgctttgtcctccttctcattctgcgttctgtcagcaaaataggcaggtctccgctgaagcggttttgcttgaaattgtccatgacaccattcatgtcactataaaaactgctggagaagtgatgaatctggggcgggttcagacgagaagccagggagatgccgtgagcctcggcgtgtccggacggggggccactggctccatcggcgtgancgcgtggaacgaggacgtgcggaaatctgtttccagccactntcaatgtttctctctgtttttncccttctgtgagtgtagtttcccagtgttttctaatcagctcttccaaaagttctaccatatttgtccagacgtgatcaaacacttctgctccacggcatctttgacacagtcacgcggggaaacagnaggaagtccgagttcgcgccatttc

SEQ ID NO: 441409 - DNA, 812 bp, Homo Sapiens
  misc_feature (583)..(583): n is a, c, g, or t
  misc_feature (699)..(699): n is a, c, g, or t
  misc_feature (706)..(706): n is a, c, g, or t
  misc_feature (708)..(709): n is a, c, g, or t
  misc_feature (711)..(711): n is a, c, g, or t
  misc_feature (714)..(714): n is a, c, g, or t
  misc_feature (732)..(732): n is a, c, g, or t
  misc_feature (738)..(738): n is a, c, g, or t
  misc_feature (746)..(746): n is a, c, g, or t
  misc_feature (760)..(760): n is a, c, g, or t
  misc_feature (803)..(805): n is a, c, g, or t
ggaaggaaaattagatttctgacggacatcctgatgttggttttactgttttcgttttgaatacacaggctgggtcaggagcagtgagatttgccagcactcagggttctaagggtcttgggccagctctggatggaggaagagccccacatgcccagagcaaggtcccccattaagggactgcagccacctccaagggctcctccctccacccaccggctcccaaatgccagagggagcctttttgccctccctccctgcccaccatccctcaaccatcagcctggcgttcaaagcctttccaagtcccacctcacttttccctctcccaaaggtgcccaggctctgggcaggccctgctcatatccctgatcatggcacattctctggggggccctcctgttctcgggtaggggccgtgccccacctaggtagccgtcccatgtgggatcctgtaggatctctaaaacctagctctggccccaactttctgtctgccctggaggtttctcagcctcctgagagctctgctgggccccggtctgggcagaacctgggcctaaacaaacaagagccagggcanccagggtctctgcgtggctgggcccagggcttgccctcagagctcacctgtccaacagaagaggagtgtgcctccaccttccctactgcccgcccctttttcagggtcttagggcntcttttntnntngtngggtgctgggtgccccangtgganctgaagtnatggggctgttgangagttggtgtccacctggagtctgtccagtgagtttaggtcannngtgtgca

SEQ ID NO: 441410 - DNA, 828 bp, Homo Sapiens
  misc_feature (1)..(1): n is a, c, g, or t
  misc_feature (13)..(13): n is a, c, g, or t
  misc_feature (36)..(36): n is a, c, g, or t
  misc_feature (52)..(52): n is a, c, g, or t
  misc_feature (57)..(57): n is a, c, g, or t
  misc_feature (62)..(62): n is a, c, g, or t
  misc_feature (73)..(73): n is a, c, g, or t
  misc_feature (83)..(85): n is a, c, g, or t
  misc_feature (87)..(87): n is a, c, g, or t
  misc_feature (101)..(101): n is a, c, g, or t
  misc_feature (104)..(104): n is a, c, g, or t
  misc_feature (111)..(111): n is a, c, g, or t
  misc_feature (125)..(125): n is a, c, g, or t
  misc_feature (164)..(164): n is a, c, g, or t
  misc_feature (234)..(235): n is a, c, g, or t
  misc_feature (239)..(241): n is a, c, g, or t
  misc_feature (246)..(246): n is a, c, g, or t
  misc_feature (249)..(279): n is a, c, g, or t
  misc_feature (285)..(285): n is a, c, g, or t
  misc_feature (294)..(294): n is a, c, g, or t
  misc_feature (296)..(296): n is a, c, g, or t
  misc_feature (302)..(302): n is a, c, g, or t
  misc_feature (342)..(346): n is a, c, g, or t
  misc_feature (348)..(348): n is a, c, g, or t
  misc_feature (350)..(351): n is a, c, g, or t
  misc_feature (361)..(361): n is a, c, g, or t
  misc_feature (367)..(367): n is a, c, g, or t
  misc_feature (376)..(376): n is a, c, g, or t
  misc_feature (487)..(490): n is a, c, g, or t
  misc_feature (492)..(492): n is a, c, g, or t
  misc_feature (513)..(513): n is a, c, g, or t
  misc_feature (519)..(519): n is a, c, g, or t
  misc_feature (523)..(524): n is a, c, g, or t
  misc_feature (527)..(527): n is a, c, g, or t
  misc_feature (531)..(531): n is a, c, g, or t
  misc_feature (533)..(533): n is a, c, g, or t
  misc_feature (539)..(539): n is a, c, g, or t
  misc_feature (545)..(546): n is a, c, g, or t
  misc_feature (561)..(561): n is a, c, g, or t
  misc_feature (580)..(581): n is a, c, g, or t
  misc_feature (601)..(601): n is a, c, g, or t
  misc_feature (618)..(618): n is a, c, g, or t
  misc_feature (638)..(638): n is a, c, g, or t
  misc_feature (672)..(672): n is a, c, g, or t
  misc_feature (693)..(693): n is a, c, g, or t
  misc_feature (695)..(695): n is a, c, g, or t
  misc_feature (697)..(697): n is a, c, g, or t
  misc_feature (726)..(726): n is a, c, g, or t
  misc_feature (749)..(749): n is a, c, g, or t
  misc_feature (753)..(753): n is a, c, g, or t
  misc_feature (773)..(773): n is a, c, g, or t
  misc_feature (802)..(802): n is a, c, g, or t
nggagggagattnctttgaaaaaaatactcccttgntctaaaattataaaanttttnttttntttttaaattnattaaaaaannngngtgattaggtaagngangggaganggggtctccttgcntttttttaaaccattaaagtaaaatccataattttctanagagtacaacacaagttcacacaaaaaagacattttcttttgcaaatcaaaacaggaaagaaaggaaaanngcannnaaganaannnnnnnnnnnnnnnnnnnnnnnnnnnnnnntgggtngattgggtncngttgtnggtggagaacagactgtgcgtttggtcatagtggcaattnnnnntngnnttgacattgngaaatnactgtaaanttgttttctagtagaaaaggcaaaaaactgtacaaaacccctagtgttaaatacaacgtttgtaccaataaaaaactcacacaggtttgtctccaaaatgtaaagtttctnnnncnttttctttttaaattattcanaaaaancagnnggnaatnanaaaggnagctgnngctccagggtctcanatccattaaaaccaccacnnttcaattaaaacaatcaganagagaaaaggaaaaggnaacaacgtccaacatttggnatttggttttatccacaggttttcccagagctcntcttggaattgaaagcaaaananantggcaaacactgcttctcaatacacaggnaggggagcctcagtgcctcctgncaanagaggcggctctgtgcagtnagactgtggggtgcacagcagtctctcangctggggtttctggcctctttccatc

SEQ ID NO: 441411 - DNA, 2362 bp, Homo Sapiens
  misc_feature (104)..(117): n is a, c, g, or t
  misc_feature (535)..(546): n is a, c, g, or t
  misc_feature (2019)..(2074): n is a, c, g, or t
  misc_feature (2184)..(2206): n is a, c, g, or t
gagctcggccagtctgtctaccattgggacaaaggaaaaacacacaaaaaaggaaggagatcctttgaaacacatactcccttgctcccaacacttataacaannnnnnnnnnnnnnaaattcactacacaaactctgtgattaggtaagaaaagcgacaagggctctccttgcctttttttaaaccattaaagtaaaatccataattttctacagagtacaacacaagttcacacaaaaaagacattttcttttgcaaatcaaaacaggaaagaaaggaaaagctcaaacaagataaaggaaaagcatttctacggctgaatcacgactgagttgattgaatcccgttgttgctgcagaacagactgtgcgtttggtcatagtggcaattttttttctcttcacattgtgaaatcacttttcattgttttttagtagaaaaggcaaaaaggctgtgcaaaccccctagtgttaaatacaacgtttgtaccaataaaaaactcacacaggtttgtctccaaaatgtaaagtttcnnnnnnnnnnnncggggtggattattcacaaaaagcagctggaaatcagaaaggcagctgccgctccagggtctcaaatccattaaaaccaccacagaacaattaaaacaatcagagagagaaaaggaaaaggaaacaacgtccaacatttggcatttggttttatccacaggttttcccagagctcctcttggaattgaaagcaaaatatattggcaaacactgcttctcaatacacaggaaggggagcctcagtgcctcctgccaacagaggcggctctgtgcagtcagactgtggggtgcacagcagtctctcaggctggggtttctggcctctttccatccaatcaccccttccaggaaattcagcagcctaccagacactgggcctctgcctggctgccctttcccccaggcagagcggccttgggcataataccaggcaacctgccagccccagagcagaaaccctgctgggatcccttccttcatcaaccttggtgtggaggatgctcaatagcgcttccacctccccctccccagcccctagctacatctctccacccttccctggacagtcctacttcccagctcacccacccaccagcagcttaagtctgggtgggatctatcatcagctcctccccctgtaacctcttccctccacagatccaccctgtgctcctctcctcacctctccccctccactcacattcttactcaagtctccaagaccctgaggctggatggtgccacaagagaggagggtcagtttccctcagggaaccaaaaaactggcttgcttggcacccagggacagtagctgtttggctctccacccaattaaaaaaacaaatccctgccctttcccccaccccactagctaagcaagagcagagctgtgatgaagagccagtgccgggtggctggtgcccagggctgtaaacagtgtgaagactgtagtattgtgcttgtcacttaggaaaagcgccagcaggtgaattgccgcttggtgtgcagatggcctcctacgggtgattgggagcgccctccttcctccaggtgctcactgcccctaatgtgctaaataagcctcttacccacctgctgccaccttctaggctctacctctgcttctcgtgtctctccaggcccccttcccaccctctctgagcaaagcagccagcctcccggaagccccggtaagacctggaggccacacgaagtgacagtctaagtgcacaggcaaacgctctaagggcaatagaggagaaagttgccacttcaaaattaaacaatacaatcttgaaaaaaataatcaaccctacaacaatttaaaacagcttctttgaaacccttttaaatcgatcagtttttgcacaaactatagaaaacagagaggtgaaggtgatatatacgaaggtgtgaagaaacagcaggaaacatgcaaaacttttttctgggcataatcttagtaggaaaggnnnnnnnnnnnnnnnnnnnnnnnnnnnnnnnnnnnnnnnnnnnnnnnnnnnnnnnntcaaagcatcacattttgctgtggagactgttggaacaagcatggggctgaggggaaggggcaggcgggatatccaggactccccagagtcgctccagggaagaaccacnnnnnnnnnnnnnnnnnnnnnnnggctggctggggcccaaagtgcagcctgcggtcaaaaaggaaagggggttcaggtgctctccgcagttgagaactcagaagaaaaacaaaagaaagaacgatacatgcggtctcctcaagccccacagactgtatcagcaaatgtgctcaggagcc

SEQ ID NO: 441412 - DNA, 1111 bp, Homo Sapiens
tttcccaagtgtccccatttaaaaatttcccccttaaacaaatcccccctttcttttgtccatcccccctcagccaaagggtaagaagtggggccccccaagggcaaaacgcgttactctttaggtttattgacggttgaacatggtccttggggaggaaagagtccaggtagaaggttttttatcatcgtccagtagggtgcccgtggggttcagaggtcatgtagccgccggtcagcggtttccatagtcattgtgggttccttcaaagttttctctttttgatggcattcattggacgtccagggtggctcaaattgggcagcctccacaggatcagtggaattggctgaaatcccgcttttccctgcagtagatcaagcccactccagcagcaacaatggctgctacagcagtcgcaatgaccacagccacaatgatccccattggtgaagagctgcccatgctgggcacttggacagtgatggtcacaggcttggatgagaacagcgtgtagcctatgtttcctgtgcagtggtaatcaccactgtgactgtggtttgcttgtgggatggagaaggtgggatccaaacgggagaatttctgggattttccattctggaagaatgtgaccttgaccagaggcttgtccttccagctgtggcacctcagcatgatggtttctccctcctggaactccaggtgaggggtctggagcaccagccattcggaaagcacagtcagatgcacagggtcgctgaggctggtctggccagtctggcacgtgtactccccgctgtcattgttgttggccttgaacctgtagctgggctgcgtgtgggtgggaatgagattcccattgtggaaccactgaatggagtcgctctcagggctgcgagccccctggcatgtcagagtcacagagtcctcctggagcacgttgatccacgggggctcaagtttcagcacagcctttgggggagcagcttgactgtctgcagaagccagcagcagcaaaactgtcaatggttgaagcagccacaggtttctgggacatacattctgagacatttgggtctccatagtcatcccagcactgtgccaacgtcca

SEQ ID NO: 441413 - DNA, 937 bp, Homo Sapiens
  misc_feature (86)..(135): n is a, c, g, or t
  misc_feature (144)..(156): n is a, c, g, or t
gccacatgccctcctaaatccccagcctactgggaaggctgaggccatgagaaatcgccttaaaaccctgggaggcgggtttgccnnnnnnnnnnnnnnnnnnnnnnnnnnnnnnnnnnnnnnnnnnnnnnnnnnactctgtcnnnnnnnnnnnnngatgttaaaggaaaaatcctgaggcgcaattccatgaaagtttagtgttccagtggcaaaatgtcacaggcaagtatttattgggaaaatgtggaagcaaaataaaggcaatcggttggttttcaattacataattgttttttgggggtaggtatcttcttagaaagtccctagtcacctaattatatgttagtaggctgcttgtgattggctggggttgtcttatttctaacataagcatttaccagaaatgatccaagttaagttttgcttatgcttgtatgtagtatgaccccgtgaagttttgcttgtgtttgtagtttaagcaaagttaaagctatttctaagggccaggtggttttgtttgctcaggatttttccagtctccatttaagttttcctttaacaattcccctctttttgtcatccactcagcaagctgagagtatgaccacatggcataacgttactctttagttattactgttgacatggtcgtggggaggaagagtcaggtagatgtttttatcatcgtcagtaggtgccctagggttcagagtcatgtagccgccgtcagctgtttcatagtcattgttggtttcttcaagttgtctctttctgatggcaatcatttgacgtccaggtggctcaaattgggcagccttcacaggatcagtggaattggcttggacagtgatggtcacaggcttggatgagaacagcgtgtagcctatgtttcctgtgcagtggtaatcaccactgtgactgtggtttgcttgtg

SEQ ID NO: 441414 - DNA, 1015 bp, Homo Sapiens
  misc_feature (49)..(49): n is a, c, g, or t
  misc_feature (81)..(81): n is a, c, g, or t
  misc_feature (137)..(137): n is a, c, g, or t
  misc_feature (230)..(232): n is a, c, g, or t
  misc_feature (917)..(917): n is a, c, g, or t
  misc_feature (977)..(977): n is a, c, g, or t
tacctggaagatactctttaataggcaatgcatgtgtggggatattttnaagttttatcggtacaaatgaaatatattgancacaaatcgagcaaatatgacttggtcgttaacatccctctgattaaacaggagtnctgctatgagaacgggctgtgccattctgcaggcacacgagttttgctgggttttagggtagtctctgtggagaatggtgactggaccacgtnnnagaggggcttgaggcaggaaggtgagcagactccagagttcaagagatgtttgcatacagcgccctcttgtttccccttacagtgtggctgtggccagtattgagaaccaagtgttcaggaactcatgctggcctgccggtcccacctgacctgagagtggcgggcactcagcgtttcagcaagctgcttcctcaacgatgcttttgatctcttattgttgctggggaggctggagtccacccaaatcaagtgggaagtgctgtcagctgctacgtctctcacctaggagctttagaggctcaagggcatgactggaacagactggaacccaatggaagagtttggatgcagcatctgtcctgctccactgagccccagggaggaagcctcggccactggctgtgctgaagaaggtcccaatccgagtgtgaggcagaagagcagaggcgtcctcgaagcgaaggccggggctgcaaaccacaggagcagggtgtcctgagaagcaatgggagcaaaatcaagatgcccagagtcttggggctgtttcagaaaccccaaaagcaagaacacgggttgtccagtgggtggagtcagcagtcccagtgccatttggagttcagtcacaggaagaacttgcaaatgacaacacagcactgggcacttgaccaggtgggggaccctgcnttccctgaggtgggctcaggggacaggacagaggcaggaccttggatccgggaatggggngagagcacagcaggacaaaccaaaccatctccatcgtt

SEQ ID NO: 441415 - DNA, 994 bp, Homo Sapiens
  misc_feature (922)..(922): n is a, c, g, or t
  misc_feature (934)..(934): n is a, c, g, or t
  misc_feature (937)..(937): n is a, c, g, or t
  misc_feature (939)..(939): n is a, c, g, or t
  misc_feature (941)..(941): n is a, c, g, or t
  misc_feature (946)..(946): n is a, c, g, or t
  misc_feature (948)..(948): n is a, c, g, or t
  misc_feature (950)..(950): n is a, c, g, or t
  misc_feature (957)..(957): n is a, c, g, or t
  misc_feature (965)..(965): n is a, c, g, or t
  misc_feature (968)..(969): n is a, c, g, or t
  misc_feature (974)..(975): n is a, c, g, or t
  misc_feature (980)..(980): n is a, c, g, or t
  misc_feature (983)..(983): n is a, c, g, or t
tccattcttgccaactgcagtagcacaagtgtgcctggccttgctcacattgcattcctttctcttgctttctgccttctctgatgctgagaggaaaatggtgtagaccttacactgccagaaaaatctcaagagagtctcaaaacaaaatgtatgctgttccacaattagtcacagctgcaggggaaatgcataaagcaaacattaaatgaaagcactctctaagaattcacctcagactggaattagagactttatccacgtgggacagagtacgcggggttcttgcactcctgactggcctcctccagccaacttccctctgtttaccaggccccaaactattctgggtttgacaggcatgcagatgtgcggagaggagaagaggaccgtgcaggcttgaagcagcaggatactgatcactactggctctgctttgaggggtcacggtcacggctgtcaggacacaaagatgggagaggagctccctgcacaaagcccttgtccaccctgcctggacacaggtccttaaggccccttcccagtttctcttctgaacggacagcccagcccttgtgggatggcgttagcccgcagatgggaaggcagagcagaggcgttacaggggtaggtgggaaaacaggacgtccccagggcagaaagtaataggagcgattggcctcgcccagcaccccagcaccctatagataataggtgcttgctaaacagttgcaggaagcacaggcagatggggcatcagagggccctaagcacagagcacgaaagggggacagttcatgggatgataccaagtcggtgtacagcagacagcacaggctgtgaccgtttgctgaggggctgcgcacagaggaggaggaagcccaagctttcaacaacctggctttatgagcggggggatcanatctggcttgtnaananangccanangntctggtnaaaaaaanaannccggnntgtcnacngggccggcttt

SEQ ID NO: 441416 - DNA, 1110 bp, Homo Sapiens
ttacagtttaactgctttgaatagcatttttaatagcaaaaatgtgtttatactataatagcttacaaccatcttttcaaccatctttttcaatacaaaataaacatattcattttcatattttacatttctcacctctataacatatacaataaaaatcccagacattgttggctggctgattcttgcaaagagatgcataagtaaactagtcaagtacatcttaaccattttgggtgtcatttagtcagtcagtcatgaaacagtaatatggagacataattttgaaaattaagcaaatgaatctgttctctagaaatgccttttctcgagttatagtattatatttataactattaaaatttatacaaatcagtaggttttatttccacaccttcacaatcccatctctagaagcagttacgatgaagccctgtgtggtctggaatgtggcgacatcagtgatgatgtcatgatgtcccacgggcagggactctgggccccttcgaggggtgtcatcacttggtcctactttctgcttattctgaatttcctggacaacttcagtgccttcaattattttcctgtagtaggacacagatggggaactagtacttcctgcaacaacataggacctttctgggtaagccaagtcccaaaaccttattttcatatctgagccagctgttagtaggataggatttccatctgcaggactacagtagataccatggacgctatgaggagaaggctgtaattcagaaagtggtggtgcactgctggcccagagagtaaatcttctgtcaccagtctccatgtcccacatggacacttcgttgttgccctgaacagctgcaatcacccaggactgatacagagggtgcattgagaggcgtctgattcgagccctggaatgatatatagtgacttgaacattggcagctggaacctcatgtcccaacaagccatggtaccactgcttgtaccaatgcagagccagcacttggtggatgtccacagcaaaggaagtgatgaggcccgactttaaatcatgctttaaagtccacgcatagcttgaagacctaagcctcgtgccgattaacccccggc

SEQ ID NO: 441417 - DNA, 1062 bp, Homo Sapiens
  misc_feature (22)..(22): n is a, c, g, or t
  misc_feature (38)..(38): n is a, c, g, or t
  misc_feature (42)..(42): n is a, c, g, or t
  misc_feature (101)..(101): n is a, c, g, or t
cacggggggagagatttaattnacatagcagccacttngggnccagtcagagctggggcagtgggggaatctataaccccagagggtaccccccagacccncacccccgggagaccagtcctcaccaacccttggatgggctcccaaggttgtgcagaagatgctccagtcaaaaggatagagacatttgggaataaggctgtccccaagttgggggaagtccacggcctggagtggtggcctacatggtggcccaggggtctgagagaccagtccatgtcctgggcgagtcctcagcctggtggccctagaggaagccttcgcggcggaactgttcctggaggagggcgcggtactggtcaaatcctccttccacacgggtgacgccgcctccttcgcatacccacaactcccggcacaccagcctgataaagcgctcatcgtgggacaccagaatcacaccacccctgaaattgttgagggcacggcccagagcctcaatggtctccatgtccaggtggtttgtgggttcatccagaatgtagaagttggggcagggcatagtcatctgagcaaaggccactcggctcttctggcccccagacaggctggcaagaggacgcatggccagttctccggagatgccataccgacccagctggtgacggtactcctcctcaggccgcccaggaaacttgcgtgccagcagttccacagcactgacgtttaggtccagctgctccacatggtgctggctgaaatagccaatcttcagattcctgtgagcgtgtctgatgccccgaacaggtgccaggtcccccaaaagcagcttcagcatggtagacttcccagccccattctctccaaccacacagatgcgagactcgagatcagcagacacagagaggcgactgaagatgacgtgcttcagatcgtagtagaaatccacctcatctagctgcagaattggcggcgagaacttctcaaacccatcagggaacttcattacgacctcctgattccttgtccacaggcttcagctcaggcctgggagaagagatg

SEQ ID NO: 441418 - DNA, 566 bp, Homo Sapiens
  misc_feature (452)..(499): n is a, c, g, or t
  misc_feature (531)..(531): n is a, c, g, or t
  misc_feature (543)..(543): n is a, c, g, or t
  misc_feature (554)..(554): n is a, c, g, or t
ttattgctctctttagtgttgactatggtgtattgggttttgtttttgttgaaagggtctgaaaaggtgaagccccctacccaatggcaatatgaaaccttttgtgcttctcttcagccccttccctgtgtccacctttctctcctcttcccaagcctttttcctactacctttacccagtttgtgtgtttgagctctgcattcaggcagctgcaacattccagtgtttgaactgtcactgattcttgcgccctagacaagctaaccaggtttaccatctcactcccagtaatacccagctcctatctaaagccccattctgcatgagaatttggtgtttggaatgttttctgactcttggggcgggattcctcgccttatcatcctcactgtggagtaatgagggggaggagaatctttatcagaaactggttttgtgtagtaaactttcnnnnnnnnnnnnnnnnnnnnnnnnnnnnnnnnnnnnnnnnnnnnnnnnctgtgcaagacctgcagctgctgaaaatcagntttgcctttaantaaaccatgtnctctccaaccaa

SEQ ID NO: 441419 - DNA, 758 bp, Homo Sapiens
  misc_feature (694)..(694): n is a, c, g, or t
ggtgccgtagccagatacgattcactcggtccccccaatggatccaggatagggcaacacaggacagggaagacagcgaccatgcagggtgaccaaacagacttgagagaaataaatggaggcccctgaaagcttctctccctcaaagcagtcaggagtgctggcccagacagggatgcagggatggagccacagaggaagtgagatcccctaggataaaatgagaacactctatttaaaaagtaagacctgaaaagaagcacaaacatctgacaatgagaaactttcctgccaggaggagtgacatgttactgttcacaagaagtaatggtatggacgataaataatgtgatctcacttagcagcaggggctcagatgcccctatatgacctactaccatccaaggacccgtacaaagggctacccatcctggcaggaaatgacatcactcagcaggtaggaaggggtgggtctaccagcccaaacgcttctgggagggccaatccatagagggttagtcctgaaggtccatgtccctcctcaatcctccatcttggccaagagagaagccaaggcttctagactttgggtgaagtaattatgcccccatctcttcatctgttaactccagggagtcctaaattccttaaatccttacttagctggcggggagtagtgagagatactaaatancaaaagccataggtcaatcctttagagtcaatatctctatagaagtatctctaggggctgggca

SEQ ID NO: 441420 - DNA, 2204 bp, Homo Sapiens
  misc_feature (43)..(79): n is a, c, g, or t
  misc_feature (1347)..(1355): n is a, c, g, or t
  misc_feature (1749)..(1749): n is a, c, g, or t
  misc_feature (2026)..(2026): n is a, c, g, or t
  misc_feature (2041)..(2041): n is a, c, g, or t
  misc_feature (2043)..(2043): n is a, c, g, or t
  misc_feature (2045)..(2045): n is a, c, g, or t
  misc_feature (2049)..(2049): n is a, c, g, or t
  misc_feature (2060)..(2060): n is a, c, g, or t
  misc_feature (2071)..(2071): n is a, c, g, or t
  misc_feature (2109)..(2109): n is a, c, g, or t
  misc_feature (2123)..(2123): n is a, c, g, or t
  misc_feature (2132)..(2132): n is a, c, g, or t
  misc_feature (2135)..(2135): n is a, c, g, or t
  misc_feature (2138)..(2138): n is a, c, g, or t
  misc_feature (2152)..(2153): n is a, c, g, or t
  misc_feature (2165)..(2165): n is a, c, g, or t
  misc_feature (2169)..(2169): n is a, c, g, or t
  misc_feature (2181)..(2181): n is a, c, g, or t
  misc_feature (2188)..(2188): n is a, c, g, or t
  misc_feature (2190)..(2190): n is a, c, g, or t
tgatgactatatggggacctgggcgtcacgcggtggcggccgnnnnnnnnnnnnnnnnnnnnnnnnnnnnnnnnnnnnnatcaggccaaatcggccgagctcgaattcgtcgagagcgggggaaggagccgggaggtgatccgcagcgctgcgacgggaccgcgcgattcctctcccacgcatctggcccgcgttcctgggcctcggcaccggatcccggcgggggtgtggacccaggcccactctccccggcgcggccagggccccccagcgtgcgagcgcctaggggatgccgagctgctcaagatgaggaggtgcgcggggccggggcggagcagtcgcgttccccgcgtgtgagcccccacccatccctggcgccagcgcttccccgaccactcgggttcggctatgcgggagccgtgaggaggaggcttgcagtcgtggacctgagacctcgggaggtcatgctgtcttgcttttaagtggcttggggaaagtgaagaaaccccaaaatggaggactttgctaccaggacctacggcaccagtggcctggacaacagacctctgtttggggagacgtccgccaaggatcgaatcatcaatttagttgttggcagcttaacatccttattgattctagtaacgctgataagtgcttttgttttccctcaactacctccaaaaccgttgaatatattctttgctgtctgcatctctttgagtagtattactgcctgcatacttatctactggtatcgacaaggagacttagaaccgaaatttagaaagctaatttactatatcatattttctatcatcatgttgtgtatatgtgcaaacctgtacttccatgatgtgggaaggtgaggctgccaaggagaagtacttaccaggactcttcaaaatgatacattaggacagtgagtaatttttggataaggtatgctgaagaatctcctgcagaagtctgatacatgattttcatgttaattgtaaatgttaattccctcttgcaagggagacatatcctagatcactttgctttttctttaaggagctgatgttgcacctaaacattccaacccttaaagctaaaacagcacaaaaaaatttcacttttgaaatgaaatttttataattgtatggcaaaaggctatgtaaaaacaaatcttgcatcttaagacaaatattcttttatttctgttaaactgaatatacaattgttccctaggcaaccaacttttgcttataactacaatttaatttcacgttgacaaaacacagtgaaaagacaactttgtgaagatctaattacaataataaataaaataatttatacaagggnnnnnnnnncttgacttttctataggggtcatattcattaaaaagcccaaaaggctacctttgccttaacccttctgtagtacaggaatgattcttagatttgtttccttttgttatagaagcaaatattgtttttttaaaatagcctgagatgagaggttatattgtaccccaccagctaacacactaagtggatgacaaactattctctcggtaatttatatagcaaaacatctaataaatggtcatggtatcaaggataggtaacattacttccttcctcatttagttttacttcaaagtgctaactttgtaaactaatgacagtggtttctgagggggtgagagctgcttagattctggtgggttttgttactatgcttatccatattccctttaaaantaacaaaaaacctgtagtgaattttaacttttaatgctttcctgtttaccctgcctaaatcagctcccactgccagcaatgggttaaccaaatgtaccaccacaagaccacctcctaggtctctatacttgtatgctggtcaagtctcaaacttagtcttcttgaagatcagaagatcactggtaagctctagaccatgttgaagaccatgttgaaaagactcatctgaactacaaccaggcttgagaggagacagtgccatgtctgatctttaganaactgtactttaaancncngcanttaagctttcntgattctaaanttttcttagtggctgaagtgaatgaaattccttattcncatgtaaaataaanaggggtttntgnttnaaactccagcctcnntcaactaaatantgtnataaaatcaacncagatgngngtttaaagggggaa

SEQ ID NO: 441421 - DNA, 497 bp, Homo Sapiens
ggagttcagatgagtcttttcaacatggtcttcaacatggtctagagcttaccagtgatcttctgatcttcaagaagactaagtttgagacttgaccagcatacaagtataagagaccctaggaggtggtccttgtggtggtacatttggttaaccccattgcctggcagtgggagctgatttaggcagggtaaacaggaaagcattaaaagttaaaattcactacaggttttttgttacttttaaagggaatatggataagcatagtaacacaacccaccagaatctaagcagttttcaccccctcagaaaccactgtcattagtttacaaagttagcactttgaagtaaaactaaatgaggaaggaagtaatgttacctatccttgataccatgaccatttattagatgttttgctatataaattaccgagagaatagtttgtcatccacttagtgtgttagctggtggggtacaatataacctctcatctcagg

SEQ ID NO: 441422 - DNA, 2111 bp, Homo Sapiens
  misc_feature (489)..(490): n is a, c, g, or t
  misc_feature (512)..(512): n is a, c, g, or t
  misc_feature (1152)..(1204): n is a, c, g, or t
  misc_feature (2089)..(2089): n is a, c, g, or t
ttatttcattgagaatttactaacaaaatatagaaaacaagaatttacctcttttaaatggcatgtctgtattacttacaatttgataaatgagttcctttccatacataccttaagatccacaaccttggtggcataaataacatgattaaagggtcaggtacaatgtatattttaatatgggatttgtgtagtgatttagagcataaatatcacacagtgaaaaatttatcacaaactaaatacagtaacaaaaggaaagaaagagcttatgtccacatttccaaggtctttacaataagttatagcgtccaggtccaacacagcatatttgcatacaaagccactgatgtgaacactgaaaggaatctgtcctgtaggtctttcatcttgatttaataaagtttgtacagtatcaaataatatcaaaagtctaaaaaacacaatgagcttttatgtttataaattattgtttttataccataaaannagtcaaaagtgcagtttaaaanaaagtggaagttgttattcttgataagagctagaaaaatgtcatgtcccagttaagaagcaatctcaaggctcatccaatttctaaggaattttaactggcatctaaccttggttaccatatgctgtaagcaaaaccaacagaatgggagctatgtaacaatctagcgaagagaaacattgcaaataaatgtaattataggcctctcccaaagtgaatgaaatgattctttactggaatgaatgggctgtcactgaatgtgactatacttggtaaacttcaaaggcttgctagaaatttttatctttttcaaatttttagtcatagctgacaatggtacatatatcccaggattatgatattttctagtataactgagaaaaatataattgaaaggtaataaatcatatcatctattatttctcacagaaaataaggaataagggcccagtaattaaaaggcagaagtacagagattagccaagaagaaacagatgggtgaaatacaactgggtcttaattggcacagtaactagctgtattttgacacactcaagaacaaatgcctatactgaagtatgtggtacattaaccacttgtacttatgtaagaaaatgaaatggtaaaacgataggcttatnnnnnnnnnnnnnnnnnnnnnnnnnnnnnnnnnnnnnnnnnnnnnnnnnnnnnaagtttattgtggcatcaaaatattgacagagctgttatcagtcaagagcagtcttcttgttgctaaaacgaagaggcagcctgagcctggctccatccaaccacctcttctaatgctctttaactggcagtgcttcctataaatgacaccaagcaatagagatgattattgtttccactgaatagagtaagttccttgattggtttaacatatatagactgcctgagagaataaaaacatcaccatacaataggttaacggtaaatcaaggtcttcgtagttgtgatgggagaaaagggttggctgctggaaacagtatggtgccctggaggctgcgtacgtacacaccctaagaattcacatcaccattagcagaagattagaagtcaatggatatggatgcttgtgcagaatcttctcgccccctgacataaatttcacagggaatctcctccattactcggtcttccagggcctgctcagggcactcatgtccctgtttgaaagtgtaactacttttcttgaaggtgctattaaatgttttcattggctgtggttgtgcaaagtcatttcggaaaggaagttccatggaactgaggttggtcctgctttgtttgacgctggaggcctgcgacccacagtggtggtcgtggatgcagcgggaggcggtggaggagcgccgcatcttctggtagttgtccaattcttccgacaagtctgccaggtctgcagaaatctctttgtcccttagtgaaaacagttcataatgaggaggatcaaacacttcttggaacccggttttattaaaagcggttttgcaagccatgaccttttttcgaggctgtttcacttgtactaaaatagaaataatgagaaggaccaanacaatccctgaacctcgtgcca

SEQ ID NO: 441423 - DNA, 533 bp, Homo Sapiens
  misc_feature (445)..(445): n is a, c, g, or t
  misc_feature (480)..(480): n is a, c, g, or t
  misc_feature (487)..(487): n is a, c, g, or t
  misc_feature (522)..(522): n is a, c, g, or t
agcctcgaaaaaaggtcatggcttgcaaaaccgcttttaataaaaccgggttccaagaagtgtttgatcctcctcattatgaactgttttcactaagggacaaagagatttctgcagacctggcagacttgtcggaagaattggacaactaccagaagatgcggcgctcctccaccgcctcccgctgcatccacgaccaccactgtgggtcgcaggcctccagcgtcaaacaaagcaggaccaacctcagttccatggaacttcctttccgaaatgactttgcacaaccacagccaatgaaaacatttaatagcaccttcaagaaaagtagttacactttcaaacagggacatgagtgccctgagcagggccctgggaaggaccgagttaatgggagggagatttccctgttgaaattttattgttcagggggggcgaggaaggntttttgcacaaggcttccttttcctttggattttntattttnttgttattggtgatgttgatttttttagggttttntacgtacggag

SEQ ID NO: 441424 - DNA, 1067 bp, Homo Sapiens
  misc_feature (65)..(120): n is a, c, g, or t
  misc_feature (163)..(310): n is a, c, g, or t
tcaaataagcaaatgcatttatttgatacacaaattccatgccaccagtcaaactatggtctggnnnnnnnnnnnnnnnnnnnnnnnnnnnnnnnnnnnnnnnnnnnnnnnnnnnnnnnngagatggagtctcacccttgccacccaggcagtagtagcacgnnnnnnnnnnnnnnnnnnnnnnnnnnnnnnnnnnnnnnnnnnnnnnnnnnnnnnnnnnnnnnnnnnnnnnnnnnnnnnnnnnnnnnnnnnnnnnnnnnnnnnnnnnnnnnnnnnnnnnnnnnnnnnnnnnnnnnnnnnnnnnnnnnnnagttcaagaaaagttttttaaaaataataaacctctaaagtgttaccctaactgtaccttacagtgatatatgacttctctagtcactccacattatccagtgatggcacctagataataatgcaccaaagaaaagtaaagaattgcagacttctagaagcaatgatgaaatataattctcagttgcagaaaatgatgatctgggtcattatgcaaatgcattcctgcctgtttttcttccaagttcttgcatggagcccaacacatccgatagcatggaagtggaagttaaactcccgatgaataatttttataaaattataaagaaaacaactaataacatgtatgaaattcacattaaatttagaagtggatagtaaagattaggactatatttcctttggggtgctgcttgtaggaaattactgaatgacaactgctatcacctgtgatttcatatccttttagctgatattgctaaagagcttcccaaactttttcaagtcatggcatacacaagaaatgatatctgtacatacacgggtaaaaaaatgcaagagattgctctcagctggatccccaagggctaaagagataaatatcttgctcacaatcaatgggaacctgtgaactaaagagtcaaatgtatgaaagtcctcatggaaaaatgctgacaagcactaaaatcactgttaattccttggagagttctcagaattgcagaagttcagaaaaattactttggtcttttacatcc

SEQ ID NO: 441425 - DNA, 824 bp, Homo Sapiens
  misc_feature (38)..(38): n is a, c, g, or t
  misc_feature (515)..(571): n is a, c, g, or t
  misc_feature (614)..(761): n is a, c, g, or t
gagcaccagaacttttagacaagagtagaggggaaagnggttctgatcctcacagtaaggtactcacacagtaaatccttaacgaaaactactgaactgtgagtatatgctttataatcttatgcacagaaatgtatctattagtacagaaagttggaaaacaccaagattaaaaacagtgctgtaggaaaaattcacaacagtaaacaaattttgctcactcattttcctacaaatcttcagtttattaattcaagagaaactatattaggaatattcggctgatacccctatttcaccacctcatctaagctacactgtattataccaagaatggtggcaattttttccccatctatacaggcactgccatctagtggcaagttttcaccagcaattttaaaagatagtggcccaactctggtaacaaatagtggacactgatggtttgtcaaataagcaaatgcatttatttgatacacaaattccatgccaccagtcaaactatggtctgnnnnnnnnnnnnnnnnnnnnnnnnnnnnnnnnnnnnnnnnnnnnnnnnnnnnnnnnngagatggagtctcacccttgccacccaggcagtagtagcacgnnnnnnnnnnnnnnnnnnnnnnnnnnnnnnnnnnnnnnnnnnnnnnnnnnnnnnnnnnnnnnnnnnnnnnnnnnnnnnnnnnnnnnnnnnnnnnnnnnnnnnnnnnnnnnnnnnnnnnnnnnnnnnnnnnnnnnnnnnnnnnnnnnnnagttcaagaaaagttttttaaaaataataaacctctaaagtgttaccctaactgtaccttaca

SEQ ID NO: 441426 - DNA, 1036 bp, Homo Sapiens
ccaattacaaaaaggctttattatattttgccaaatgttaatgcgctttcattattgtctcctaacattatttccccactcatttttataacaagtgcagtgaagatatgcttatcgaatattgtacaatactgttgtgttctgtaacactctttcgggaacagcttagatgtaggtaacaagagatgcctgcgtatgaaagtgcttcataaactgtactgtataaatgtaaactactaccattttcaggtaaaatcagagaataaatgtctcttgttggaagtgtcctctcaggactcctctagtccaatctccccagtgagtggatgagggaaaagactgacgccagaggcaggaggctctggattggagagttagaggccaacgcaagtatagaatctgcagtcctagcacagggatctttctcctcccttgtgtaatttatctttaaaaacactgatagttttctggtgctgggagcaccatgccctttaaaacttatgaattaatggacgattacaacaaaaagaactttttacctagccctcaataaatagttgttggtgaaattagaaatttgaggttgaattgttaaagatcgtcttggtcactcctctctcgtgaagaaacccatcgactcagaatcacctcctgaactttaatccttttcatacattctggtgactccatttccttgtcagtcatagtagagggtttaatcaaatagcacagcataatgttccttagagacattaacggaagactctgctcaaggcagccagggacttccaactgagaggcctgcggagagagccttcaaacatggtcatccaactaggctcgatctatgacagaataacttgcatggtaacatggagggcctttccgatatagcagtaaatctgtcccgtacttgagtcccactttgggcacccagcccttgcttcgaaagtaatggtaggccatgtaggtgattctgaacgtgggctgaactacagtgaaagctttccagagcttcactatcgatcccgggaat

SEQ ID NO: 441427 - DNA, 1023 bp, Homo Sapiens
  misc_feature (35)..(35): n is a, c, g, or t
  misc_feature (423)..(493): n is a, c, g, or t
  misc_feature (912)..(912): n is a, c, g, or t
  misc_feature (970)..(970): n is a, c, g, or t
  misc_feature (972)..(972): n is a, c, g, or t
  misc_feature (1001)..(1001): n is a, c, g, or t
  misc_feature (1006)..(1006): n is a, c, g, or t
  misc_feature (1012)..(1012): n is a, c, g, or t
ggccagtgtttatttatgcagataagcactgtgtncactagcatcaggaacagccacaaatctcatgcgcctgccactcagtgggtggggtaagtcctagcagagcttctgagcgtggttatttaggaaccatgagtccagctaggatggggcaggcccacctcctgggggctgcaggcagaacctcaggagaggacagagaaaggaggtgggaagcaagtcacgattcagctcacacggtgtagacaggctgggcagaggcggggtggaccacgctgcagaccagcaggatgtggctttccctggcagtgcccatgctgcctctttctgccttccgggccagcatcaccacacggcccatatggatgatggttactttggcagtcggcccctgctctgggccacactgctggggctggaggnnnnnnnnnnnnnnnnnnnnnnnnnnnnnnnnnnnnnnnnnnnnnnnnnnnnnnnnnnnnnnnnnnnnnnntccccccaaagccaagtgtcctgagctctgggctgttggcccaccctcagcagtccagggcgctcttcatggggcctccaacaccacctcccaggacagcacaggtccaatgtggtggtgtgcagggcagtgggagactcagctcacggagcagctgcgcccatagggacctgaagctgcagggcccccgggctgtcctgggccgtgtccccatgggcagcagtgcttagggtttccagccactgctgctgcagctctgcggaggaggcgctcaggtaccaggactgcttggcccactgcagcttccacacatgccccgagtccagcctctcctcagggtccggcacactcagtttgcagctggggagagggatggtgcggggcaaccggccgtcctggctgcctccctgcaggtgcanacctggggatctgacatggggatggcggccacacctcgctcaggtctcaccgcctctnanagcgcagggggcgcaaacaggctgggctnggggnttccantgggtgtttct

SEQ ID NO: 441428 - DNA, 707 bp, Homo Sapiens
  misc_feature (514)..(514): n is a, c, g, or t
  misc_feature (537)..(537): n is a, c, g, or t
  misc_feature (563)..(563): n is a, c, g, or t
  misc_feature (668)..(668): n is a, c, g, or t
  misc_feature (696)..(696): n is a, c, g, or t
  misc_feature (698)..(698): n is a, c, g, or t
tcaattgagacacactcacacattttattaaggctcttaaattgaaactcatcattttggatgtacattcaaattctaaacacaacagtcaaaatgcagtgactgtaatgaaatgtaataacctcctataaagaaacgattggggactatcatttttgtgatttaacaacagagaaaatccaggaagaatgaattgagttccttctaggagttgtttatccctgctcatgcttaagattgatgatttcgtgaaataaagaacattatttgagagaaaaaaactgattttttttaaagaaatcatcactctcatttgaaaggtttgctttcttatttcctgtaagtacatttcgtttttctaattcaactgtaacctcaggaccactgtacagcacttagtaaacctgtctttgtacatgcaatctagttcttaccaactgccttctcaaatggaatagaactataacacacaaataaaaggaagatgtacaagcacagggacaaaacaggaggnaaataaagactagaatgtgaatntcattttcaacaagtatcagcaaggnaaatgagaccctggtttcataattaattaaatctgcagaatgccaattccatttggtgttaaacagtaacccaatataaaccactgattctggaataagattaanaaaaaaatacctgagtgaatataacaananggatagacc

SEQ ID NO: 441429 - DNA, 919 bp, Homo Sapiens
  misc_feature (8)..(8): n is a, c, g, or t
  misc_feature (13)..(13): n is a, c, g, or t
  misc_feature (19)..(19): n is a, c, g, or t
  misc_feature (45)..(45): n is a, c, g, or t
  misc_feature (55)..(55): n is a, c, g, or t
  misc_feature (59)..(59): n is a, c, g, or t
  misc_feature (71)..(71): n is a, c, g, or t
  misc_feature (85)..(85): n is a, c, g, or t
  misc_feature (92)..(92): n is a, c, g, or t
  misc_feature (189)..(189): n is a, c, g, or t
  misc_feature (191)..(191): n is a, c, g, or t
  misc_feature (193)..(193): n is a, c, g, or t
  misc_feature (289)..(290): n is a, c, g, or t
  misc_feature (293)..(293): n is a, c, g, or t
  misc_feature (313)..(313): n is a, c, g, or t
  misc_feature (605)..(605): n is a, c, g, or t
  misc_feature (607)..(607): n is a, c, g, or t
  misc_feature (619)..(621): n is a, c, g, or t
  misc_feature (634)..(634): n is a, c, g, or t
  misc_feature (649)..(649): n is a, c, g, or t
  misc_feature (668)..(668): n is a, c, g, or t
  misc_feature (675)..(675): n is a, c, g, or t
  misc_feature (679)..(679): n is a, c, g, or t
  misc_feature (688)..(688): n is a, c, g, or t
  misc_feature (699)..(699): n is a, c, g, or t
  misc_feature (701)..(704): n is a, c, g, or t
  misc_feature (707)..(707): n is a, c, g, or t
  misc_feature (709)..(709): n is a, c, g, or t
  misc_feature (720)..(720): n is a, c, g, or t
  misc_feature (724)..(724): n is a, c, g, or t
  misc_feature (741)..(741): n is a, c, g, or t
  misc_feature (745)..(745): n is a, c, g, or t
  misc_feature (765)..(765): n is a, c, g, or t
  misc_feature (767)..(767): n is a, c, g, or t
  misc_feature (797)..(797): n is a, c, g, or t
  misc_feature (799)..(809): n is a, c, g, or t
  misc_feature (814)..(814): n is a, c, g, or t
  misc_feature (819)..(819): n is a, c, g, or t
  misc_feature (821)..(821): n is a, c, g, or t
  misc_feature (824)..(828): n is a, c, g, or t
  misc_feature (833)..(837): n is a, c, g, or t
  misc_feature (898)..(898): n is a, c, g, or t
  misc_feature (905)..(905): n is a, c, g, or t
  misc_feature (916)..(916): n is a, c, g, or t
agtcaccncccangtgggnagcgggtacccctcaccagcctggcntcagcctgcntganacagccaccttngaaaatctcaaggnagagctnctggtgttactcaatgcagctgaggttggctggtgtgagtctgtgcaggctgcccgccacccttgagcctctttctgccacagcaggcaggcatgangntntgtcaagggatccccccgaggccctcacctgagagggtgtcaggccctgggcccccatcctcaagacatcgaagttccagcacgaaggtctcaatnnctngccccacttccatcctagcnatcagaccccgattcctgagagtcagctatgctaatagaacatttcctgctcccgggcagcctctgcgctagggaggtgtggtcagcagaggctgcgaggtgaaggccacggcgtgcagccggctccttccggaggcgcctccatccagaaagagccaggaggcgcagggccaccccgggggctttctgggcactccggagggtccacgccctctgggctgccgaggtcgccctgggccaagggaaggggctgagaggagcggccgagcagaagttggtggagactctccancnggagctggagcnnnaagcagggccccnaatcccgcgcgggtntcagggccggccccccganaccaacncgancaacgaaanccaaaccaacncnnnngtncncaccaagggtncccncctggggtcggcagcgnccangcgacgcgggtcctcggggncnacaggtgcccggagcctgcgggcggcctgngnnnnnnnnnnnggggnccggncnccnnnnncaccnnnnnccgcggcaaggccgggtccccctgggctcgcccgcccgcccgggagtgcgtccgtgcggcngctggcngggccgggggngga

SEQ ID NO: 441430 - DNA, 1206 bp, Homo Sapiens
  misc_feature (570)..(572): n is a, c, g, or t
  misc_feature (574)..(574): n is a, c, g, or t
  misc_feature (603)..(603): n is a, c, g, or t
  misc_feature (612)..(612): n is a, c, g, or t
  misc_feature (616)..(616): n is a, c, g, or t
  misc_feature (624)..(624): n is a, c, g, or t
  misc_feature (633)..(633): n is a, c, g, or t
  misc_feature (641)..(641): n is a, c, g, or t
  misc_feature (648)..(648): n is a, c, g, or t
  misc_feature (659)..(659): n is a, c, g, or t
  misc_feature (661)..(661): n is a, c, g, or t
  misc_feature (664)..(664): n is a, c, g, or t
  misc_feature (667)..(667): n is a, c, g, or t
  misc_feature (689)..(689): n is a, c, g, or t
  misc_feature (706)..(706): n is a, c, g, or t
  misc_feature (716)..(716): n is a, c, g, or t
  misc_feature (733)..(733): n is a, c, g, or t
  misc_feature (738)..(738): n is a, c, g, or t
  misc_feature (791)..(815): n is a, c, g, or t
  misc_feature (1102)..(1102): n is a, c, g, or t
  misc_feature (1125)..(1125): n is a, c, g, or t
  misc_feature (1144)..(1144): n is a, c, g, or t
ttaccccaataaaggcaattcttaagtggtcaataaattagggcacttcttcaaattaagctctgtcaattaggcacttaataaaaacaaaagacatttatacaagcatctaaataacaaagaaagataaagaacaagagaaagacaagatttatgttaactaccagcatgttatacttcagccagaagtttttgaaagaaacgttatttgagaaggaaaataagtagtatttttctgtttcttaaaaatcaatattctttctagttcattaactaaaattagtttttcagtgttttcaacatagaaagaatgctcagattttggttgaacaaggaaaaattaaggcagtgtctttaagaccagtaaaggaaagcattaactatctcataagcttatctgagagggacatattaagctcatatttggatataatattaggaaattatggctttaaacataaaatattaatgtttcaaaattccacattttctcagttattctttctttttagctatatgtacttcaaatagcccacttaaagaattaaagaaatacgtttcacataattnnngnacaatatgtgcatgggactggggccaganctattagcntggntggcaaancattatgtncctatgtnccactgncccagtataananggnagngggcccataactgtcaaaatgnggttgggaatgactaangtcctttggnatttgctacaaaatagnagatntaaagttttgaggtattgctgccttaccatggtttaggggaaaaaaataagannnnnnnnnnnnnnnnnnnnnnnnnaaaagcaatgcttcttaagttatgaagcttatttaaaattttctcctcttagtcattgtcatatgggttatccctgagcttcatctcatctgcacgtcacataaaccagctacctatggttttgatcatttcatttagtgttatgtcttgttataccaattcatggagcgtttcactgctttggcccagttttccagactcatttcatattcttgacatttcttctgtggcttgaaaaccacttcactttgtctcagtttctttagttcctccttgtcagtccaaanccaacagcaaggccagctagagnagctgcacccaggcatganatgtcaatgtcggcaggtctgtctatattctcattaatcaggtctgaagtcacctgcatgac

SEQ ID NO: 441431 - DNA, 1065 bp, Homo Sapiens
  misc_feature (197)..(206): n is a, c, g, or t
  misc_feature (1012)..(1025): n is a, c, g, or t
tgagccagaaccaaacgtctccttttattgcaaggtcaaacccttttcattttgtctatttatacagaattttcactaaggactgctcgacgcaacagctgtgagtacattggtccaaccattaataaatagtcttaaataagaaaacaaacaggttgaaggaaagcaagctcatcgtcctgaacgagggattaaannnnnnnnnntgttcaaaagagctttggatggaaataaataatctctttgctttgtaacaactatttacaggtttaaatgtacaaatgatgctaaccagaggctggttgggtcagaaaactcacaccaagagggatcacacaaaaagccccagctctgccagcaaatgaaaccaaacataacaaaaaatactcctccccagtgactagagagtggaggctgcagcccaagctactaaagaagaaaaacatcaaagaaaataaaaacagagccccggtgtttcccaggaactgtctgagtcaagatggagacacagtcccccacaagaccgggttccacatggccacagttttcgatcaccttgttttctttacagatgcagaaaacctttgcagacagtctagccctccccgaggccttgtgtttgtgccggaggctgagtgcatactatttatgggactcaccagccaaggcaaggcaggcttacaccaagagccatgtcagaaatgccacctccaaatcgggacacttggttaggatgtcaccctcaacaaggcttctatttgcaatgtaagtccagcacatcctgcacccatcagacctcctattatgccatctcccccttaattcaaggagcaaatttgtttgcagagacttctgatcagggtctgcaaatgaagagacagccacgggtgcccttgccagggcccagccttggaatgccactgcagacaaagaccagagggtccactggggcgatgtgcagtgctcctgctcgacgccactcccgtggagaactaggcttcattggtgctgnnnnnnnnnnnnnngagatggagtcttgttttgtcaccaagctggagtgcagtg

SEQ ID NO: 441432 - DNA, 865 bp, Homo Sapiens
  misc_feature (155)..(186): n is a, c, g, or t
  misc_feature (775)..(784): n is a, c, g, or t
ggctggtacggcccggcagtcgggatatcgtcgacccacgcgtcgcccatatgttgggggtctgcttgaggattcataaatcagccactctggattgttgaggaatggccatggcagccacagaaaaaagaatttttctctctgagccaaggttnnnnnnnnnnnnnnnnnnnnnnnnnnnnnnnncatttcattggaagatctccaatggactgaacagctccagtcagcagcagttaccacaaactgtgaatctgggccccaccactcttccctgttaaccagttctgtcagcatccccctctccagcagcacttccatgaagttggttctgagactctggccgtgaacacccgtttcttcagtgatttgttttgggcttttggctcaaaaccccaggctcttgtttttgtctagactcttattctgtttcctgagcagcaggaggtagggaccactttgatgtcagacttctggtagctggacatgttctcgagatgggtggctgttcgcgacttttgtaccagagtgaaattgttagaaggagggtttctggctgtggttctaaatggagccccaggaagctgccctctccccagggtttgtgctcagtagagccctgtggatcacagtcttgaggtcctctagcaggggtgagggagagcagcgacttcagctgagtccctgccagtggttaagcaaacaatggtttcaaaattcaaggtccccaaatggcagcattttatgttctgacctgtttgtgttatatagtggnnnnnnnnnncctctttggaactcttgtgttgttaataaaatgaaatgattactttttaattaaaatgaaaaaagtacaaaaataacccac

SEQ ID NO: 441433 - DNA, 866 bp, Homo Sapiens
  misc_feature (422)..(435): n is a, c, g, or t
  misc_feature (682)..(682): n is a, c, g, or t
  misc_feature (723)..(723): n is a, c, g, or t
  misc_feature (752)..(752): n is a, c, g, or t
  misc_feature (755)..(755): n is a, c, g, or t
  misc_feature (757)..(757): n is a, c, g, or t
  misc_feature (793)..(793): n is a, c, g, or t
  misc_feature (803)..(803): n is a, c, g, or t
  misc_feature (809)..(809): n is a, c, g, or t
  misc_feature (821)..(821): n is a, c, g, or t
  misc_feature (830)..(830): n is a, c, g, or t
  misc_feature (832)..(832): n is a, c, g, or t
  misc_feature (847)..(847): n is a, c, g, or t
  misc_feature (851)..(851): n is a, c, g, or t
  misc_feature (855)..(855): n is a, c, g, or t
  misc_feature (858)..(858): n is a, c, g, or t
gaagtctctcaacatttcatttttaatttttctaatagtacattctttaaaagaagttaacgacttcaattccaaatataaggattaaataatgcaatgaaaagctgtcattttcagtgaagctattgcctaattaccctggaaaaaagtattcttatgactgaactgatgcaaaaatcccttagaaaagcttcatttgttgcctgtaaagagtcttcttaaggtcacttttacttctagactgcccccttgtttccagtgaaagagttttgcttggtaatggcttgtggttccacagtgttttgtgtatgaaaagcgtagactaagagatactactgaagtcgctcaaattgtagattctgccatgaaaggaagtcccaacactgtaacatttccccttaatcttcagcaagacacatggnnnnnnnnnnnnnnctcaagtcccaactgaatctttactttgatcatcacttccagcggcattcagaggctgctgtgcggtcagacacagagctccctcgaggcccctgtgtgcttatgaagtacctgcaggttctgagcgtcggcgccagcccgggccaggggtctgcagacagaggcacctggtggctgctggggctcctggggtgagccatggcacgggagcccctaaacgccaagctcgccacggtcttcgtctctnagaaggcaggggaagaagcagcgctcccagacaggacaganaaaagcctatgaaacaatgctctccagtnacnancagttgcctgatcagagctggatttactgctggganagagtgcacncgattnctttcatttttncagacgctnantaagtggcgttgctnactnagcnctntgtttatc

SEQ ID NO: 441434 - DNA, 1093 bp, Homo Sapiens
  misc_feature (465)..(465): n is a, c, g, or t
  misc_feature (507)..(507): n is a, c, g, or t
  misc_feature (533)..(533): n is a, c, g, or t
  misc_feature (659)..(659): n is a, c, g, or t
  misc_feature (682)..(682): n is a, c, g, or t
  misc_feature (684)..(684): n is a, c, g, or t
  misc_feature (687)..(687): n is a, c, g, or t
  misc_feature (689)..(689): n is a, c, g, or t
gtgtgctgattttttaatgaacaacttataatcttacaaaataactggctgtagctgttttacattacaatacagtagatcagctcctttcactacattcccaatcaagccatccccttgggtgttaactaatgcactcaatagtgatcacaaagaatacaggaagtgccaagttcaatgccttgtaatagaaaaaagagaagatgagaatcaggaagagctctttactttcacaatccctttactttaatttctgtcagtatctgcccattctcctcaccctgtccccttacctgcctttctgattggaggctgtcatgctagttgttagagccagctaagccctggggccacctggggcacaatcaaacacacagaagagtctctgaagaaaggctctcaatgaccacatgggtggataagagtagcagaatgtggaccaccacatgcgattgagtgtgagtngatgcttgctgcgcgatctgctgcaccacagctgtcttagtncttccactttatcagtgacctgagtngctcaaaacatcaggctcccaggcaacaaagactgcgaagaacctgctgctctctgaatagctatagctgcactatgcgctgcgcgcaagccttatagcctaagcagcgctcttcacacacaacangaactttcctttttctttcccanancantngtgaattgcagataataaaatattttaaaattaaatttaaaacagaaatgttcttactgttgctcttgtggagagactgcgtgaagacacacactggcatgaaccacaggctccatgttcctgagctgagtaatgcccaggataacaattcctctgcctcaatctcagacaaagtaggattctccaaggcagaacttagaatgtgtctagcaatttggacattttccccaataaaacaagtttataaaattttgaaaatagagtgtctaaacttttccattgtcctttgcatattgaagcctatcagaatcccaagaataaatatgtttgtcttcttgggggcactaagcatgacccaagacaatgaatggtatctgaactacattttctttacactagagatt

SEQ ID NO: 441435 - DNA, 1648 bp, Homo Sapiens
  misc_feature (787)..(787): n is a, c, g, or t
  misc_feature (847)..(847): n is a, c, g, or t
  misc_feature (1604)..(1604): n is a, c, g, or t
attttttcagttctgggtctatagaaacccaggtttattcccatttgctacaacagattcccttctaataaaatgcactggcaaggtgaccagtgagtgacccaatgtctggttgggaaatctctctctgaacttcttgctgttggacctaaaatgtggatgtaaattggatcacagctggtttggcattgaaaaaaatacatacacaacaaacaattacaacttctttatatggcagtttttactgggtgtctaatactctctttactgtctcaagtggaagtccaaacaaatttcatttttgtagtaaaaaatctttatttccaaaatgatttgttagccaaaagaactataaaccacctaacaagactttggtaagaaagagacttgatgcttcttataaattccccattgcaaacaaaaaataacaatccaacaagagtcatgttacccattcttagccattaacctggttttaagtctccaaaatcaggattttaaaatgtacccaactgggaccaaatacaaacatgagacactagggtggcttgtccttgattaggaatcaccagcttaaggaactttatcatgggctgagagatagatagatagcttagaacaacattgcaaaagtgggtgcttctacatgaggactttttttccccccaagtagaaaaataattaaatcttgtgtttctttatattgtgctttttttgggagaaagcaattcatttaaggatttaaaacatgttggatacaaaggtagttcagagatgtaataatggnccctccaagaacaagggagcaaaagccctatcttttattgaaaatgatggaggtggtggnacaatataaaaaaagaactttctgaacacttacttagcttaaagacatgaaagacccagtgagtttttattgaatagtctctcttgtgttaaaagtacatattcaggactatactatgttgtatttggaaatattctgatgtgtttaatacaaattcgtagtgtattcagagcattgtatgtgtctcaccaatggtacacatttggattaagcagtaataaggcctataaaagaagaaatgaaacaatagttttcaacaataaatgcaggaagaaaaactgctgatggacccaactgagaaaatgtccttttacactatcccttggtggtcagtctccctgaatctggtgtgcttataattgctgggaaggcagtgtaaacctgtggccattcctatgcatgtctgggaggaccacagccctggtgtggagcactgacaggtttgactttccaccagaattgcttgctcagcttaatcccataatattcctttcccttagatttgttttctgtctcggtaactttttctctctgcatataaaatttcatgactaaaataactttaaagtacagagattgtattttgttgaaggaatgcattgggggggctttgggcagacttagcaaaatgtttgtatagcaaaaatgttttcttgctaaaaactgatttgcaaacttgaaagtctagatgtgtgtaggaagattttaaaattcaggcaaattggtctctaaagagaccaattttgcttcctttgtncttggttccaataaggatttagtaccaaaaatcccgggaattcc

SEQ ID NO: 441436 - DNA, 600 bp, Homo Sapiens
  misc_feature (500)..(500): n is a, c, g, or t
  misc_feature (549)..(549): n is a, c, g, or t
  misc_feature (564)..(564): n is a, c, g, or t
tttatttaaatataaggtagctagtttttacacctgagataaataataagcttagagtgtatttttcccttgcttttgggggttcagaggagtatgtacaattcttctgggaagccagccttctgaactttttggtactaaatccttattggaaccaagacaaaggaagcaaaattggtctctttagagaccaatttgcctgaattttaaaatcttcctacacacatctagactttcaagtttgcaaatcagtttttagcaagaaaacatttttgctatacaaacattttgctaagtctgcccaaagcccccccaatgcattccttcaacaaaatacaatctctgtactttaaagttattttagtcatgaaattttatatggcaggggagaaaaagttaccgagacaggaaaacaaatctaaggggaaagggaattttatgggggtttaaggctgaggcaaggcaattttgggtgggaaagtccaaacctgttcagtggntccacaccgggggctgtgggtcctccccagacatggcttggggatgggnccacaggttttacantgccttccccggcattttttagggcacaccagtttc

SEQ ID NO: 441437 - DNA, 1029 bp, Homo Sapiens
  misc_feature (859)..(950): n is a, c, g, or t
gcgaaagtgtgcagggtcagttccaagggctaacccgattaacttttacaaacagcaaatgggttgatattcatgaagacgcagggccagaaagtcaggaaaactaggtataggcagttctggtgatttctttattctttataaacacctttttctacagtacaattcagagaataaatagaggcacacggctataacttccaccacaatctgctgttgaagagacattcaatgtgaggctagggagctagaggtgggggacgtatttgggtaccagggtaacgggaggcctacgtaataaactgcagagatcccatcagtaaggtctgattgcggcctgacggtcaaggctcatgatagaagagctacagtgagccaaatgctcctttagttccccacagtcctagagtaggtccaattctaccaaaaccccaggggttcgggtgagtctgatttattggtccactgggaagaaactgtgtcagcccaagccatccgtatgaattcagttcactccatggtagtgcctgaagtggcctaaatattctacccttttccctggagttagtcacaaatacaagtaataagattactgtttacatgagtttttttcttgattgtcccaaaaagggatcctgttccccatctaaggaaggagagaggcacacatggggattatctgctctaagttgatgaaagaagacagcctgtcttctaaagggaggaggaaatagcactcttaccgaatccttcacggggacataggcaggaatgaataccagtctgatcagaccaagtggaagcctgcagccatgattccaaccagcatgaggagtaacatatggaaaagctctgccannnnnnnnnnnnnnnnnnnnnnnnnnnnnnnnnnnnnnnnnnnnnnnnnnnnnnnnnnnnnnnnnnnnnnnnnnnnnnnnnnnnnnnnnnnnaagcacattagcaagaccctggtcaatttttataatactaaattaaaagtgaacgtgtggtcacgcttgtatcccagat

SEQ ID NO: 441438 - DNA, 1274 bp, Homo Sapiens
  misc_feature (50)..(200): n is a, c, g, or t
  misc_feature (1180)..(1180): n is a, c, g, or t
  misc_feature (1198)..(1198): n is a, c, g, or t
  misc_feature (1229)..(1229): n is a, c, g, or t
  misc_feature (1232)..(1232): n is a, c, g, or t
  misc_feature (1234)..(1234): n is a, c, g, or t
  misc_feature (1241)..(1241): n is a, c, g, or t
  misc_feature (1256)..(1256): n is a, c, g, or t
  misc_feature (1259)..(1259): n is a, c, g, or t
  misc_feature (1262)..(1262): n is a, c, g, or t
aaaaaaggttttaaaaaatttttttggggggggagggggggcccccaaannnnnnnnnnnnnnnnnnnnnnnnnnnnnnnnnnnnnnnnnnnnnnnnnnnnnnnnnnnnnnnnnnnnnnnnnnnnnnnnnnnnnnnnnnnnnnnnnnnnnnnnnnnnnnnnnnnnnnnnnnnnnnnnnnnnnnnnnnnnnnnnnnnnnnncatggaaccaccggggatcttttaatccatttaaatacaaacatagaagatcagactctgatctgacattatttctatatttttagaaacacttttcactcataaatccaaggtgacaatggcattaaatggcattaaaaatatctacaggaaaggactaccacgaaatacaatattatgataacagttattgcattaaagtggttacttttctgtattcttcacatgtcccattgtatcactatacatttttataataaaaaatcgtaaattaagaaagaattcaagcaaagtattgttgactttataaaataattcttaaaacaaatgttcagaaagaaggcattcaactaagatagagaagatgctggatggagaggcttgcaaggtcccgggaggagctccagggtgaagctcatcactagcctttccagcagcactgtccctggagaccagaagcagtgggagccccttccctgtggcaccacggactcccaccaaggcacgtatcatgaacactgtacttgtacacgtttattacccttgggtgtatggggaatctaagagcacctctgaaatccatacttgattcctttttacattgaggaaagtgagattcacacacaaataccaagatgaccaattgatggtggcctcgcttgcaaaagcagcctttgcaggtaaccaaattgcctccctagcattctgtaacccatgggcttagggaaagattaagtaacatttctttttcaaattcacttcaaatactcaactgtgttcatttaaaaaacagcaactatatgcacgagactaaacagatctcattcacactgccagcccacagaggggactctccgtaccctttcaggagggttttgggcaataaagccaaaatctgtacttaaataggtgtgtctcataagaaaaatttttaactcatttattaaaggtctgatgggcattccaactagtaacttatncctagagagagaaatacnaatgcttctgtatagttatataaaaaagaanccncnagagtcnatccccagaaacccncanttntaccaagggtgt

SEQ ID NO: 441439 - DNA, 1054 bp, Homo Sapiens
  misc_feature (54)..(54): n is a, c, g, or t
  misc_feature (987)..(987): n is a, c, g, or t
  misc_feature (990)..(990): n is a, c, g, or t
  misc_feature (1000)..(1000): n is a, c, g, or t
  misc_feature (1005)..(1005): n is a, c, g, or t
  misc_feature (1025)..(1025): n is a, c, g, or t
  misc_feature (1027)..(1027): n is a, c, g, or t
  misc_feature (1030)..(1030): n is a, c, g, or t
  misc_feature (1034)..(1034): n is a, c, g, or t
  misc_feature (1036)..(1036): n is a, c, g, or t
  misc_feature (1046)..(1046): n is a, c, g, or t
caatccatgaaataaatatttatttatgtaatacaatttgctaaacaccaccanttattaaggagagtactaggaaaaactaccaaacacagcatgtgaaacagttgggcacggtggtaaagggcacagactctcggagccacagctcggctaatacactgcaatattttatgtttagcaaattatagctggtctgtgtataaccagaagagcggtatctgggggatcaggatatctaaattctagacttacagcctggccctgaatctaactatcaatgttgccttggaaaaactgctcaaacttttgatgtctaaagtttcagacttgtaaacttgagagggttgaggtccaaggtcccttaaatgtaaactttaaaatgcttttttgggaatctttcaaatcttcaagctcttcaaagtgcaaccagactttctccttactatacagtctgaacaactttgagaatcactgtattatcttagtttatatagtaatcctgacctaaattttattattctcattttggagacaaggaaatagaggcctaggctagcatggctaaataagtgataaagctgggaatagattttaactctgcccattttaaagctgtgcattttctatttttctgtaagttattctgacattagacttaattttcacatagtaggctaggattccaagcactcaatatctatatatttatccagatagctcttactttgatatttctaagtctatactttgagctaacatttgctctgttctctcctatttcagcactcccttttcttgttatttatggtgttgtcagcccatatggtctaactctcatttcatactcctgttgaatgtctcctacatgtctgttttttagcagtaactcctgacttttatctgaaatcaaatttttaggtacttgctcatttcatccactttatgatgaaaaaaattagctaggtgtgaagttggtgcttaaattcntanaaacagaggnggtanaaagacagagaaataaaacncngtntttncntttttttatnttaggttt

SEQ ID NO: 441440 - DNA, 1049 bp, Homo Sapiens
  misc_feature (925)..(925): n is a, c, g, or t
  misc_feature (955)..(955): n is a, c, g, or t
  misc_feature (977)..(977): n is a, c, g, or t
  misc_feature (994)..(994): n is a, c, g, or t
  misc_feature (999)..(999): n is a, c, g, or t
  misc_feature (1003)..(1003): n is a, c, g, or t
  misc_feature (1005)..(1005): n is a, c, g, or t
  misc_feature (1011)..(1011): n is a, c, g, or t
  misc_feature (1014)..(1014): n is a, c, g, or t
  misc_feature (1023)..(1023): n is a, c, g, or t
  misc_feature (1029)..(1029): n is a, c, g, or t
  misc_feature (1033)..(1033): n is a, c, g, or t
tggaccggtccggaattcccgggatcgaacggccggttccggctgaatgtcagtgctgggctgtgggccggggaggaaggcggctcgcggttcctccaccgcctccgccgccgcatcctccgcttgtgctaccgccgcgggcgctgggccgctctgctggtccggcatgagaccgtgagacgagagacgggtcggggccgccgacatgtttggccgctcgcggagctgggtgggcgggggccatggcaagacttcccgcaacatccactccttggaccacctcaagtatctgtaccacgttttgaccaaaaacaccacagtcacagaacagaaccggaacctgctagtggagaccatccgttccatcactgagatcctgatctggggagatcaaaatgacagctctgtatttgacttcttcctggagaagaatatgtttgttttcttcttgaacatcttgcggcaaaagtcgggccgttacgtgtgcgttcagctgctgcagaccttgaacatcctctttgagaacatcagtcacgagacctcactttattatttgctctcaaataactacgtaaattctatcatcgttcataaatttgacttttctgatgaggagattatggcctattatatatcgttcctgaaaacactttcgttaaaactcaacaaccacactgtccatttcttttataatgagcacaccaatgactttgccctgtacacagaagccatcaagtttttcaaccaccctgaaagcatggttagaattgctgtaagaaccataacttttgaatgtctatacaagtgtcattggataaccaggccatgctgcactacatccgagataacacttgctgttccttacttctccaatttggtctggttcattgggagccatgtgatcgaactcgatgactgcgtgcanactgatgaggagcatcggaatcggggtaantgaatgatcttgtggcaaacanctagacacctgcatatntcaangacncnggtcancantgtgattcnccacgngtgncctgaccactgttcaa

SEQ ID NO: 441441 - DNA, 1147 bp, Homo Sapiens
  misc_feature (986)..(986): n is a, c, g, or t
  misc_feature (1003)..(1003): n is a, c, g, or t
  misc_feature (1055)..(1055): n is a, c, g, or t
  misc_feature (1067)..(1068): n is a, c, g, or t
  misc_feature (1108)..(1108): n is a, c, g, or t
  misc_feature (1131)..(1131): n is a, c, g, or t
  misc_feature (1140)..(1140): n is a, c, g, or t
cagtacttctttaacaaaatttttatttaataaatggttaaaatcgcagtgccaaaaatacattgacatttagcaatttcactgaaaggaagaaactacagaatgcacggtttcagaaagctattttaagttatttacaaataaagtatctaaaactcaaaaacaggctctgtatgctatatctagtttatcccttcccgaacaaaatttctgttatttgggcaaattcttaaaccatggtttaaaccgtaatggttacaaaccacaaacacatccatccagagactgaaaccgtttctatccggtcagtggcaaaactgttgaaagggcaatagttgaagctgttgggttttatatagtgtgaactctgataaatattcctaccaggactaaaacacagcacgctttgcgggcatggctgactcacaaaggttgtaacaaacaagaactactcttcactcgacaccatggctcagaggccaccgagaagcacgagtgactgacagctcctctgcttacaaacgaatgaaacccaaagtggatgtcgttctcacagcactgaaagtgcttcaggactcacactgatccaatactaactttcttccctattttacacatatttttctactgtccagtggaaatcattttctgttttggctaaacaacaaatactagtttataacaggaatggtaaaatctgtgagaattctgctcaatttaatacaagatcactactttctttagaatggtttctgcgtgtttctacgtcaccctctgtatttttagcttccagtttcctggtaaggaataagttctccttcccagtcacactcggggtcatttacacgtttctgggatgcccttgctcgtccatggaggccaggtgcgtgcagtgactcactctgcctcttccctcttctcaggaccagtccccgaaccttctgccttgcagatcctcctgtttccgccacactctcgcgctcggnagcgagctcctggatanacagctgcaaggctggccggtccttgtttgccagtcgctcttttctgggtgngggactgtcgtnnactctgcgctcttccagtctctcatggctccccggggccngtgtctggttcccttttcctctntttggcagnctttccc

SEQ ID NO: 441442 - DNA, 949 bp, Homo Sapiens
  misc_feature (548)..(548): n is a, c, g, or t
  misc_feature (551)..(551): n is a, c, g, or t
  misc_feature (578)..(578): n is a, c, g, or t
  misc_feature (595)..(595): n is a, c, g, or t
  misc_feature (605)..(605): n is a, c, g, or t
  misc_feature (615)..(615): n is a, c, g, or t
  misc_feature (617)..(617): n is a, c, g, or t
  misc_feature (619)..(619): n is a, c, g, or t
  misc_feature (626)..(626): n is a, c, g, or t
  misc_feature (644)..(645): n is a, c, g, or t
  misc_feature (651)..(651): n is a, c, g, or t
  misc_feature (661)..(661): n is a, c, g, or t
  misc_feature (670)..(670): n is a, c, g, or t
  misc_feature (696)..(696): n is a, c, g, or t
  misc_feature (710)..(710): n is a, c, g, or t
  misc_feature (721)..(721): n is a, c, g, or t
  misc_feature (725)..(725): n is a, c, g, or t
  misc_feature (733)..(733): n is a, c, g, or t
  misc_feature (735)..(736): n is a, c, g, or t
  misc_feature (738)..(738): n is a, c, g, or t
  misc_feature (744)..(744): n is a, c, g, or t
  misc_feature (752)..(752): n is a, c, g, or t
  misc_feature (759)..(759): n is a, c, g, or t
  misc_feature (762)..(762): n is a, c, g, or t
  misc_feature (777)..(777): n is a, c, g, or t
  misc_feature (791)..(791): n is a, c, g, or t
  misc_feature (810)..(810): n is a, c, g, or t
  misc_feature (813)..(814): n is a, c, g, or t
  misc_feature (823)..(823): n is a, c, g, or t
  misc_feature (829)..(829): n is a, c, g, or t
  misc_feature (833)..(833): n is a, c, g, or t
  misc_feature (840)..(840): n is a, c, g, or t
  misc_feature (845)..(845): n is a, c, g, or t
  misc_feature (853)..(853): n is a, c, g, or t
  misc_feature (855)..(855): n is a, c, g, or t
  misc_feature (862)..(862): n is a, c, g, or t
  misc_feature (865)..(865): n is a, c, g, or t
  misc_feature (867)..(867): n is a, c, g, or t
  misc_feature (869)..(869): n is a, c, g, or t
  misc_feature (872)..(872): n is a, c, g, or t
  misc_feature (875)..(877): n is a, c, g, or t
  misc_feature (880)..(880): n is a, c, g, or t
  misc_feature (883)..(884): n is a, c, g, or t
  misc_feature (887)..(887): n is a, c, g, or t
  misc_feature (891)..(891): n is a, c, g, or t
  misc_feature (893)..(894): n is a, c, g, or t
  misc_feature (899)..(899): n is a, c, g, or t
  misc_feature (903)..(904): n is a, c, g, or t
  misc_feature (906)..(906): n is a, c, g, or t
  misc_feature (909)..(909): n is a, c, g, or t
  misc_feature (911)..(912): n is a, c, g, or t
  misc_feature (917)..(917): n is a, c, g, or t
  misc_feature (921)..(921): n is a, c, g, or t
  misc_feature (923)..(923): n is a, c, g, or t
  misc_feature (925)..(925): n is a, c, g, or t
  misc_feature (928)..(928): n is a, c, g, or t
  misc_feature (931)..(931): n is a, c, g, or t
  misc_feature (935)..(935): n is a, c, g, or t
gtgggagagaaaaaagtgacagcgctctttagaccaaggacttagaagagaaacctccacccttccggagcacgttagtcccttccctctctcactgctcaacctccctgggcttccagagcaagaaaaggctacgtcccctgtcgaaggagagtggacggtgaaggtgcctggaaacggccagagaaaagacctaggcggtcgatgttgcggtggaggacactgtgcagcacagccagatggggtccaccctcacctccaccctccctggagaagtcccgaatgaagcgaccccgctctgattggaagatgaacttctgaggcaagggcccatgctcccggagaaaaccccagacactgagcagcagcagacgcacctcgaaaggtgccagttggctaaatacttcatgcatattacccagggccggaggcaggaggcttccctcagccatgacagccactaaggtgcaggatgcctccaggtgccagggggagtgggtcgtgtcagggtggcgagaggcttcccaatggcccaagagggcggccancancccccgaagcagcacggaacagtagcncagggctgggggtgcanctgctaccanctttaacaancncnaaaaacnaggggctgttcgcggaanncccggnccaatgcggngatcccgcnccacggtggcccgggcgtgttcctcnggggggcaagccanctctgcaccanctgnatcggganannantctccnccaaggtnactgccnctncttttggtgcctctngactcaagatgggngcccccaccattccccccnttnngtgcccccngggggnatgnagcagtnaacangagggtgngngggtctnggngntntanatnnnttnctnntgntttntnnctggnaaanntnggngnntttancccngncngtnccncacnttggaaaatgccaa

SEQ ID NO: 441443 - DNA, 1053 bp, Homo Sapiens
  misc_feature (124)..(153): n is a, c, g, or t
  misc_feature (184)..(245): n is a, c, g, or t
cataagttctcaagtagagacacatatagtttctctctttcagcaccacctcttgcccctatgctgggtaccaagggagttctcctagctgtggcttctctaggttctaggggtgcaagcctcnnnnnnnnnnnnnnnnnnnnnnnnnnnnnncgtatccacactaggggggcaagcctctggnnnnnnnnnnnnnnnnnnnnnnnnnnnnnnnnnnnnnnnnnnnnnnnnnnnnnnnnnnnnnnccacactggccagcctccctacttaccaaggttctccactgcttaccttttccagtgggacagtacagtgtgagcccccgggaagtactgcctgacctatcctaagcttttacacttggattttagccatcatatgttggccaggtctcactgcagcctgcccgaggctaactggctagagcctccaggccctatgatgctccctgcccaggccatatcctttattcctgctgagcttcctggctgaatagatgaaatggggtcaagcccaggcagctcattcactacctgtgatccacctcagggcacgggcaaacacataggcttgcgtcttaaagcccagctcctctgacagacccccttgtaatgtgccacaacaccctcaatagtcagggcaactggtggagcatggaagtcgaatttccttttctgttaggagctactcctgggaacccctctcagggctgcagcttacaggtgggcagctgtgattgcacaacttgaagggcccatcattcacatctattcagtgggagtggggtccctgggattgggcagtgtggtggccctgtgtctcctcaactctgctcctgtcttcaatcaccttcttctctggaaggggaaagaggaagtggcaagggtctctggttattccttttccttttgtattgttttgggcccgagagggtttcttccgcgcattttggagcttcggggctctacaccccctggaagctcagttataggggcccctgttcactgacgaggatgccgtgtggattttgttgtgcattcgccaaggcgctta

SEQ ID NO: 441444 - DNA, 1470 bp, Homo Sapiens
  misc_feature (953)..(953): n is a, c, g, or t
  misc_feature (957)..(957): n is a, c, g, or t
  misc_feature (997)..(997): n is a, c, g, or t
  misc_feature (1004)..(1004): n is a, c, g, or t
  misc_feature (1056)..(1057): n is a, c, g, or t
  misc_feature (1061)..(1061): n is a, c, g, or t
  misc_feature (1091)..(1091): n is a, c, g, or t
  misc_feature (1094)..(1095): n is a, c, g, or t
  misc_feature (1105)..(1105): n is a, c, g, or t
  misc_feature (1201)..(1212): n is a, c, g, or t
gctgcaagttgctgtgttccatgtgatgctatccacacttaacaaagcccacggtcagtctctgcgttcccacccttcactctgttctctaaccagttgctccagctgcacagttctttggtcgccttgctgatctgcagatattctttggcttactcctgtggctccttggagattcttggcatgatgagatccccagtccaggagaggctggcagccccctggcggggtggaacatgacaggttggggtatgcccaggatctgattgagtgctttcacctaggaaactggaggcgaccagtgcccagaatatcgagttcctacaggtgattagccaagagggaggaggcaatccaccagtcccagctgcggctggagcgagaaaacacgggaatgtgggaccctggcaaggcagttggagagtgccattgaagatgcgaggaggcaggtggaacaaaccaaggagcacgcactctccaaggagcgagcagcccagaacaaaatcctggaccttgagacccagctgagcagaaccaaaacggaattgagccagctgcggcggagccgtgatgatgcggaccgccgctaccagagccggctgcaagacctgaaagatcgcctggagcagtccgagagcaccaaccgcagcatgcagaactacgtccagttcctcaaatcatcatacgccaacgtgtttggggatggtccctattccaccttcctgactagctctcccatccgctgcccgatctcctcctgcctgaggccacttatcagggcctggagccctgatggaagccttaggaactccagagttgccaagccatagctgagaagcctggtggttttcctctcccagtgaaaaaatgggttcagggtcttgtccttagctactagctctagaaaagtcccaaaagcagcagaaggtgaagcaggaagcacttggttttcncctncctgatatagtcacctgttggaagtgttaaaatttcctcnacaggcnttaaatttactactacattagggtaccacattttaacttaccatgactttgnncctncctttcctgagaaaatatttccactggatnttnnccaccagtcnccttacagccctcattgttttaggaatctctctcaggtttttttctgacctaaaccagcaggaagtcgtcctgggctgtaagcaccatcacttgcnnnnnnnnnnnnctgatttcacaagtgtggtgttttcccaagggctcccttcccaagctcagtgcaaacctctcactcccaagtttctttgaggccacttgcccccaagcacttcacaatagaccctcgagggcttgtgtccatttggccttttacaagtgtaatgctaatttcattgatttttgtttcttttggccctgatttgtatctctggaatgcatttattcttgaaatatttgtgtgattttacaaaaagcttttgtaatcagt

SEQ ID NO: 441445 - DNA, 1078 bp, Homo Sapiens
  misc_feature (404)..(404): n is a, c, g, or t
  misc_feature (449)..(449): n is a, c, g, or t
  misc_feature (518)..(518): n is a, c, g, or t
  misc_feature (523)..(525): n is a, c, g, or t
  misc_feature (536)..(536): n is a, c, g, or t
  misc_feature (542)..(542): n is a, c, g, or t
  misc_feature (549)..(549): n is a, c, g, or t
  misc_feature (564)..(564): n is a, c, g, or t
  misc_feature (574)..(574): n is a, c, g, or t
  misc_feature (576)..(576): n is a, c, g, or t
  misc_feature (581)..(581): n is a, c, g, or t
  misc_feature (583)..(583): n is a, c, g, or t
  misc_feature (588)..(588): n is a, c, g, or t
  misc_feature (595)..(595): n is a, c, g, or t
  misc_feature (605)..(607): n is a, c, g, or t
  misc_feature (609)..(609): n is a, c, g, or t
  misc_feature (613)..(615): n is a, c, g, or t
  misc_feature (619)..(619): n is a, c, g, or t
  misc_feature (621)..(623): n is a, c, g, or t
  misc_feature (625)..(625): n is a, c, g, or t
  misc_feature (628)..(628): n is a, c, g, or t
  misc_feature (630)..(630): n is a, c, g, or t
  misc_feature (632)..(632): n is a, c, g, or t
  misc_feature (635)..(635): n is a, c, g, or t
  misc_feature (639)..(639): n is a, c, g, or t
  misc_feature (641)..(641): n is a, c, g, or t
  misc_feature (647)..(648): n is a, c, g, or t
  misc_feature (650)..(651): n is a, c, g, or t
  misc_feature (654)..(654): n is a, c, g, or t
  misc_feature (657)..(658): n is a, c, g, or t
  misc_feature (662)..(662): n is a, c, g, or t
  misc_feature (665)..(665): n is a, c, g, or t
  misc_feature (667)..(667): n is a, c, g, or t
  misc_feature (671)..(672): n is a, c, g, or t
  misc_feature (674)..(674): n is a, c, g, or t
  misc_feature (677)..(677): n is a, c, g, or t
  misc_feature (683)..(683): n is a, c, g, or t
  misc_feature (685)..(685): n is a, c, g, or t
  misc_feature (687)..(688): n is a, c, g, or t
  misc_feature (695)..(695): n is a, c, g, or t
  misc_feature (698)..(698): n is a, c, g, or t
  misc_feature (700)..(700): n is a, c, g, or t
  misc_feature (716)..(716): n is a, c, g, or t
  misc_feature (729)..(729): n is a, c, g, or t
  misc_feature (735)..(735): n is a, c, g, or t
  misc_feature (777)..(777): n is a, c, g, or t
  misc_feature (780)..(780): n is a, c, g, or t
  misc_feature (785)..(785): n is a, c, g, or t
  misc_feature (788)..(788): n is a, c, g, or t
  misc_feature (793)..(793): n is a, c, g, or t
  misc_feature (813)..(813): n is a, c, g, or t
  misc_feature (839)..(839): n is a, c, g, or t
  misc_feature (842)..(842): n is a, c, g, or t
  misc_feature (846)..(846): n is a, c, g, or t
  misc_feature (856)..(857): n is a, c, g, or t
  misc_feature (861)..(861): n is a, c, g, or t
  misc_feature (871)..(871): n is a, c, g, or t
  misc_feature (887)..(887): n is a, c, g, or t
  misc_feature (891)..(891): n is a, c, g, or t
  misc_feature (904)..(904): n is a, c, g, or t
  misc_feature (910)..(910): n is a, c, g, or t
  misc_feature (913)..(913): n is a, c, g, or t
  misc_feature (916)..(916): n is a, c, g, or t
  misc_feature (928)..(928): n is a, c, g, or t
  misc_feature (934)..(934): n is a, c, g, or t
  misc_feature (939)..(939): n is a, c, g, or t
  misc_feature (941)..(941): n is a, c, g, or t
  misc_feature (944)..(944): n is a, c, g, or t
  misc_feature (946)..(946): n is a, c, g, or t
  misc_feature (948)..(948): n is a, c, g, or t
  misc_feature (954)..(955): n is a, c, g, or t
  misc_feature (957)..(957): n is a, c, g, or t
  misc_feature (976)..(976): n is a, c, g, or t
  misc_feature (984)..(984): n is a, c, g, or t
  misc_feature (990)..(991): n is a, c, g, or t
  misc_feature (995)..(995): n is a, c, g, or t
  misc_feature (999)..(999): n is a, c, g, or t
  misc_feature (1007)..(1007): n is a, c, g, or t
  misc_feature (1011)..(1011): n is a, c, g, or t
  misc_feature (1016)..(1016): n is a, c, g, or t
  misc_feature (1020)..(1020): n is a, c, g, or t
  misc_feature (1028)..(1028): n is a, c, g, or t
  misc_feature (1039)..(1039): n is a, c, g, or t
  misc_feature (1045)..(1045): n is a, c, g, or t
  misc_feature (1049)..(1049): n is a, c, g, or t
  misc_feature (1055)..(1055): n is a, c, g, or t
ttaaggatttaatccaacaaacatttattgagcaactgctgtgtgctatgcaccacgcctagtgctgtgatggatacagatgaataaaacacagtccctgcccttggcaagcttacagtctaagaacagtcaaaggacaagtgcacaaataactatattacatggctgaatatggtaagtgccatgagaaaggtacaaataaagtgctacggtggttcagcagagggagagatcccagtggttggtacatcagggagggcttcatgaaggacgtggtttccgcatgggctttgaagggaagaaaagggtggctttccaggggctggggatagcaagaccaaaggcacagagacagtaaaacgcaggcaccctttccaggaaaaacaactctcctaggctgaccnggggagggtgtaaaggaagaatggggccttatccggtggtctgtnatgtcagaatagagaattgtacatttgttcacgggccggggaacttttaaaggtttgtgtgcaacgggngaggnnnatcgctgtgcntgttcnggttggntcgggtcctcgtgtntgtgtgcacngnggttntntgggnggtgtgnctgttgatgnnntngtannngtgnannngngtngngnttngtgntngtgggnngnnttngcnnggcnggncngggnngnttngtcgangntnncgtcggnatntnagaatgggtggatgangggataaagggtnttttantagaaaaaggagggattgtgggggaaggggacacagatgatncanttggnttntgacntgttgagttgatggtgctgnagtgggagcagatggggtgagtgtanatnaagngggtgtaatnnagcntagagctcangagagggctgggttgnaganaagagataggggnaggggnagnttnggaagttgcagnagggtntgagngnagntntnaggttnntnatggagagtgaggcaggantcaggagngggcannaatnttanggcatatnaatntggtngggnagggaganagaggggaatntggtcncatntacatnatttcattgtcaacaagtggggg

SEQ ID NO: 441446 - DNA, 420 bp, Homo Sapiens
  misc_feature (410)..(410): n is a, c, g, or t
ccccatgttctcacaataaactctttattgtttagctagccccagtgactttatgcatcttataaccaagaagccttcagtagagcaagtctgagccagaggttttatcacactttgtcctcagggtccaccaggaaccaggtcttggctcacagccaggctggaaacagtcttcacagttctgagcctggagtttgagatctgcctcccctttcaaggaagatccagaggtcacctgcgcttgtagagacatggctgaagctgcaggcctgaaagctgagccttgggccctaccagagggggcccagtcttttggaaatcaaacaagaagaaatggctgttggtcaggtccttggagacaatcttgaagcctagcttggtcacagcccgcagaaaggtttcgaaacatnctcaaaagcg

SEQ ID NO: 441447 - DNA, 908 bp, Homo Sapiens
  misc_feature (364)..(365): n is a, c, g, or t
  misc_feature (369)..(369): n is a, c, g, or t
  misc_feature (375)..(377): n is a, c, g, or t
  misc_feature (395)..(397): n is a, c, g, or t
  misc_feature (400)..(400): n is a, c, g, or t
agatgagaatttaagcttttattaataaatcatgattttctattgaatacataataaagtacaattaacaataacataacattacaacattaaaaattaaaactttcagaatcaccttgatcaatatataaagctttagttccttatttcaacagtgttcttctcatatgcaaaacagcttcccaaaataagagattcgtgaatgaaattttataaagcttcctgtgtaccaaagagattgactccacatcaactgtcccctactgaaaatccaaaccatacaggcttgaaggaccagaactgagccacattctattaaagttatcaaagataaaatcttaaagatctacaaatgggacatggnncttncttctnnnaccaattaaatacactgnnnaantgtggtaaatcttggcctcaagacaaccataagatagaatgattcttaaatatgtagcaacagatatatcaatattatccctattacagagacacatgtataccaatttataactgttctttgcagtaagaaactcagaaatcatctaggaaatatctattttcctatgttacaactgaaatgaaaatgacaacatattttgtaaaatgatgcaatgtggtattgtcttttgatgagacatgaaaacacaactcactggctagaaatagttgtaaaacaagcctactctcactgatatatacttactttaaaagttacacttacttcttagttttctgaagaaagaaggataatggtcctctattcaaagtagtaataaaaataattgcacctcaaattactcccagtgtaacataagatatttaatattaacataaatatcatttgcatagatgatagaaaaattctaatttcttaaaagtgctatgccttactggaatttgaagac

SEQ ID NO: 441448 - DNA, 1668 bp, Homo Sapiens
  misc_feature (736)..(736): n is a, c, g, or t
  misc_feature (758)..(758): n is a, c, g, or t
  misc_feature (760)..(760): n is a, c, g, or t
  misc_feature (763)..(763): n is a, c, g, or t
  misc_feature (766)..(766): n is a, c, g, or t
  misc_feature (788)..(788): n is a, c, g, or t
  misc_feature (802)..(802): n is a, c, g, or t
  misc_feature (808)..(808): n is a, c, g, or t
  misc_feature (810)..(810): n is a, c, g, or t
  misc_feature (815)..(815): n is a, c, g, or t
  misc_feature (818)..(818): n is a, c, g, or t
  misc_feature (820)..(820): n is a, c, g, or t
  misc_feature (823)..(823): n is a, c, g, or t
caagttgaagattttgcctcaggcaactaaatttattagcaagaaaaaatttttgtcagcccagtgctgaccaacaaagtacgttaataaaggataacaaatctgtcacttaattcataaaacatacctcaagcagttacaactaaaaataaagttggatttttgtttaatttaaaagcctcaaaaataacaagcaatgtgtttttaaacatgtagtagacacaattgtctattatacaatatacactgtacacaagtagagcttgggccgggcaggggtgaggtgaagggagagggaggaggtgcaggatgtgcaggtgctgttatctgaatccagatttgagtttaaatgctgtgtcatttagaaaagggaattgctagagtgagaaaaaattcatatgctcatcattgcccccaaccctcaactgaaagcaggcatcagggaggtgaataacaaggaaaggaagaagggagcaattaaataaaacttctttaaagcacacacagtacacagtgttcatcatctgaagtagagagtataaggcaacgttctccatagataatgagggggatccggtgtcggtgggtgtctttactttttaaatagagctggaatgtgctggaggagaggttgtggcggggctgggcacatggagtggaggtggccccgagtttctccagaggtgggtgccaagccccagggcgtccacagtggccggcagggccagggaggtgnaggagagggggcatggcatgangngantcnggcagtgttgggagcggggatnggggtggggggtangggctnantttgntcntnganggagtgaaatgcatgtttttcctttggaaataagggttcccacgcgtcctggtttagaacgtctcattgggcacggccagtgtccacagtctgggcaggccgggagctcgtggtgaggggaagggccaaggcagagccaaggggcttcagaaggaggacaatactgggaacagagccccttcctgtggggacagttgcagaacaggagtggggctgagggcaggcccaaggcagccacagggctcctttccaccaggggcccagggaggacacaggtgggggactgcatcttcagggcctcccgccgcagttggccttacaagttcttcgtgaccaggtgggtcttgtaatgcttggtgaggtggtcactcctcatgaagcgcttctgaacactgggcgcaactcgaaagcgtttgtcccctgtgtgggtgcgaagcatgccgttggagctcgttactccgtgtgaacctcttcccacagaagaaccagttgcagacaaagggccgctcgccagtgtgcaggcgcacatgggcacgcagcaaggacgtcttacggaacgtcttgccacagtcggggatgtggcacacgtgcttcttcttgccctgctctccagacctcttctccccatccttgcagttgggacacgtgcaggccatgcggcgccgcttctccccgggctgggtctctccggccagggcttgttccatttgcagctggatctgggtggggctcagcccactgatggtcaggttgttcccagacaacattctgcactgtcagctgctgctgcccgcctgtgttggtgatggtgacatccccgggaattcccggaccggtacccagcc

SEQ ID NO: 441449 - DNA, 619 bp, Homo Sapiens
  misc_feature (483)..(483): n is a, c, g, or t
  misc_feature (536)..(536): n is a, c, g, or t
  misc_feature (538)..(538): n is a, c, g, or t
  misc_feature (547)..(547): n is a, c, g, or t
  misc_feature (551)..(551): n is a, c, g, or t
  misc_feature (554)..(555): n is a, c, g, or t
ggaagctttacattccaaaactttaatgtcaattaagcagccttttcacttgatataaactcacatacccaggaacactgtgggctcagaacattatttcacaagcaggtattgctggcacgttgtttgtgtcacatttagattccgattaaatgacatcattttgttcctcagatcctgacatacacaatgaaagtatttgaaagttacataaccagttgcacttaatgagtcatcctttgtcaatattagaatgagggaaccaggatatgactaggaagagactcaaggggtaaaatctgaagattctgtcccatacctctgcagaatcatgggacccccacagaggacttaggggaggggctcagaagcaaagggctgttttgaaaatagtttgattttgacacaatgatttgcagacaagcccagccaccgtggagaaaagatagagaatggaagaagttccaaatgggctaagatgancatgaacttctaaacagaatgaaagctctaggattatgtccactttaagaggncngcggggganatcnggnnttagaggcaggtaatgtcttttgacaccctttcttcaaagaaaggggtaagggaaaacaagacc

SEQ ID NO: 441450 - DNA, 728 bp, Homo Sapiens
  misc_feature (141)..(141): n is a, c, g, or t
ccccacaatcgctcttcacacttttattgttaattctcttcacatggcagatacagagctgtcgtcttgaagaccaccactgaccaggaaatgccacttttacaaaatcatccccccttttcatgattggaacagttttcnctgaccgtctgggagcgttgaagggtgaccagcacatttgcacatgcaaaaaaggagtgaccccaaggcctcaaccacatttcccagagctcaccatgggctgcaggtgacttgccaggtttggggttcgtgagctttccttgctgctgcggtggggaggccctcaagaactgagaggccggggtatgcttcatgagttttaacatttacggggacaaaagcggcatcattaggataaggaacagccacagcacttcatgcttgtgagggttagctgtaggagcgggtgaaaggattccagtttatgaaaatttaaagcaaacaacggtttttagctgggtgggaaacaggaaaactgtgatgtcggccaatgaccaccatttttctgcccatgtgagggtccgcatgagacccttctcctagatccttatcagatcccgtactgcagccgattgactgactcattaaataacacaagttataaaactttaaaaatggagcatttacagtcagggacataaatacgtgcttttaaaagtgtctacatacatatttacagagttgcaagatcaaccgtagtagccctg

SEQ ID NO: 441451 - DNA, 1036 bp, Homo Sapiens
  misc_feature (372)..(372): n is a, c, g, or t
  misc_feature (733)..(733): n is a, c, g, or t
  misc_feature (763)..(763): n is a, c, g, or t
  misc_feature (803)..(803): n is a, c, g, or t
  misc_feature (838)..(838): n is a, c, g, or t
  misc_feature (921)..(921): n is a, c, g, or t
  misc_feature (988)..(988): n is a, c, g, or t
  misc_feature (990)..(990): n is a, c, g, or t
  misc_feature (1004)..(1004): n is a, c, g, or t
  misc_feature (1012)..(1012): n is a, c, g, or t
  misc_feature (1024)..(1024): n is a, c, g, or t
  misc_feature (1028)..(1028): n is a, c, g, or t
gctgcttataacaaggttttaataaaataaaaagttcaagtgcttccaatcccccaacatacccctttctggtgtgggggaggggagggagctccccaccccaatagcaccaggatagcaccatgagaaagatgaggtcacacccggcctccctgagacccacggggggtggtgaggggaacatgcctccagacaccccccaaccttccccccaccgcagacagctgcagagctgagagcgaacccagtcccctcgtgagggcagtttctggggagtgccaccccctacattagttccacctcctcctgaggcctgtactttttgggagatgccgtggggtggcccctgctccttatggttttttttcctgnggaggaaggggtttaggggggtggatggttcctttagtttttatgtttgggcaggggtggggagggcagcaaatggccggggctccctgtgggagtgggggtggctcaggggttagcagttacaaagggttagggcttagatttttgggggtgttcaaaccaaccccattttagggttagagctatgttggagttaagggttatttccctcccagaggtctaagggctctttctggaggtcttgggtagcagctaggagagagaccctctctccctgctgggcctccccgtccggcctgtcacagctcttcaccgccgacatccaggtcgatggagccgtggctgaccaccagccgtaggngttgggtggggagaagggggcgaaggcganggcctgcttcgggatcaggatggggcctggggtccagcangggctggggtagctggtggggctggggcaggcgangaggtccacacgcacacgtaaggcagccatagcgccggcccagtgccagtctgctgaggggccagcggcgtgggggggctggnccagggcaccagggctctcctcgcaggcggagtgggggcacagctcccatcgtgcaggagacccggnanctggtggtggaacntggggccnccgggccggggntcgngcttcggg

SEQ ID NO: 441452 - DNA, 1031 bp, Homo Sapiens
  misc_feature (16)..(16): n is a, c, g, or t
  misc_feature (31)..(31): n is a, c, g, or t
  misc_feature (40)..(40): n is a, c, g, or t
  misc_feature (44)..(45): n is a, c, g, or t
  misc_feature (58)..(58): n is a, c, g, or t
  misc_feature (62)..(62): n is a, c, g, or t
  misc_feature (68)..(68): n is a, c, g, or t
  misc_feature (73)..(73): n is a, c, g, or t
  misc_feature (76)..(76): n is a, c, g, or t
  misc_feature (87)..(87): n is a, c, g, or t
  misc_feature (89)..(89): n is a, c, g, or t
  misc_feature (95)..(95): n is a, c, g, or t
  misc_feature (97)..(97): n is a, c, g, or t
  misc_feature (107)..(107): n is a, c, g, or t
  misc_feature (119)..(119): n is a, c, g, or t
  misc_feature (122)..(122): n is a, c, g, or t
  misc_feature (128)..(128): n is a, c, g, or t
  misc_feature (130)..(130): n is a, c, g, or t
  misc_feature (141)..(141): n is a, c, g, or t
  misc_feature (151)..(151): n is a, c, g, or t
  misc_feature (153)..(154): n is a, c, g, or t
  misc_feature (176)..(227): n is a, c, g, or t
  misc_feature (249)..(271): n is a, c, g, or t
  misc_feature (294)..(306): n is a, c, g, or t
  misc_feature (865)..(865): n is a, c, g, or t
  misc_feature (871)..(871): n is a, c, g, or t
  misc_feature (907)..(908): n is a, c, g, or t
  misc_feature (912)..(912): n is a, c, g, or t
  misc_feature (997)..(997): n is a, c, g, or t
atccccacactttggnagctgaggtgggcanatctcctgngtcnngaattcaagaccncctngccaanttgtnaanccccgtctctncnaaaaananaaaaattcantggtgtggtggntgngcctgnantcccagctacncgggaggctnannccacagaattgcttgaacccannnnnnnnnnnnnnnnnnnnnnnnnnnnnnnnnnnnnnnnnnnnnnnnnnnnggaagaggtgagctccgtctcnnnnnnnnnnnnnnnnnnnnnnnttatcccttatataagtgaaagnnnnnnnnnnnnngcattccagccactcagtgtagagagattggagggattaggagcagatgatagggtattattttagggagctactacagaagcttgggccagagatgatggtggcttccacaggatggcagtgagtgccctcactctgctttcttctttgaatccttgcaggtggacaggtagacagcagcccagcccagtgccttgaagagcccaagcagaagaaaggcagacaggaaaaggcctacgctgtcctcaagggagggccctgaaagacctgctacctccagggtgacctcagcgctgcgccccgaggcaggcaggctgggatggtgaattcgacaggcatagcgtgccccatgctgctcagtggtgactgggggcggctgcaagtgcccagagaggctgacagagccatcggaatggtggcgcagggccgagagccacctctgcccctcggccttctgagagcggccccctgggccaccccggagttcccactccacctccaggcccccagaagggtagaagtgggacacaaggcagagcaattccgggggtgcctcccnctgggncgggccgtgcaagggttgctggcatcagggacactnntggnggcgtgcacagcaagctccaggtgacctgtccttgcagtatggcagtgtatgtggccaatagtgcctcctggaagggtgactgangcagccagaggtccattccgtcatgggcccatgg

SEQ ID NO: 441453 - DNA, 591 bp, Homo Sapiens
tcctgattcaaaattacttttattattattagtggcagagactagctagtggcccttaaacagctttgcccttcctgggtgtacagctaaactaagtttcctggcctttcatgtgactggggtcatgtgactgtttccagccagtgaggtgtgagaagaagagaggaagcccatttccaggccagatccctcaaatggcccattgagggtcattgctgccctttttcttcccttgctgactgggcagtttgtagaacaggggatccatctaagtaccctaagagaaggtagagctacagactggaagagtctgaccctctgactcatcccatggatggctgcccatttgagctgagttaggagagagaaatcatttaatgtggtaagccagtaagatttaagagctgtttaacatactattttgttatgttatgagtagcattcagattgcagatccagcttctgaataagctcaagaactttaacttctatccctatggcctatgcccaggggaagatgggacttaaagggtgtttgtagaaatcatggtagaaaaacttacatacatatgtgtatatatatatagatac

SEQ ID NO: 441454 - DNA, 1148 bp, Homo Sapiens
  misc_feature (683)..(683): n is a, c, g, or t
  misc_feature (687)..(688): n is a, c, g, or t
  misc_feature (690)..(690): n is a, c, g, or t
  misc_feature (709)..(709): n is a, c, g, or t
  misc_feature (735)..(735): n is a, c, g, or t
  misc_feature (773)..(773): n is a, c, g, or t
  misc_feature (779)..(779): n is a, c, g, or t
  misc_feature (825)..(825): n is a, c, g, or t
  misc_feature (959)..(959): n is a, c, g, or t
  misc_feature (977)..(977): n is a, c, g, or t
  misc_feature (1001)..(1001): n is a, c, g, or t
  misc_feature (1003)..(1003): n is a, c, g, or t
  misc_feature (1009)..(1009): n is a, c, g, or t
  misc_feature (1019)..(1019): n is a, c, g, or t
  misc_feature (1022)..(1022): n is a, c, g, or t
  misc_feature (1026)..(1026): n is a, c, g, or t
  misc_feature (1052)..(1052): n is a, c, g, or t
  misc_feature (1058)..(1058): n is a, c, g, or t
  misc_feature (1061)..(1061): n is a, c, g, or t
  misc_feature (1063)..(1063): n is a, c, g, or t
  misc_feature (1070)..(1070): n is a, c, g, or t
  misc_feature (1079)..(1079): n is a, c, g, or t
  misc_feature (1087)..(1088): n is a, c, g, or t
  misc_feature (1106)..(1106): n is a, c, g, or t
  misc_feature (1115)..(1115): n is a, c, g, or t
  misc_feature (1130)..(1131): n is a, c, g, or t
  misc_feature (1138)..(1139): n is a, c, g, or t
ttttctgataaaattatgttttaattgcctatggcatatattacataatggctcaaaattaatagtctggctgaaattaagaaaaacagctgatgatgacttagtaaatccttaattttaagtaagcttttggccaaaagtcaggggtagaattgactcaaaattaacagccttcaccatcttttattcattctgctgtgatacaactaaaatggccagttaaattctcccctgggtctcaggtaacagttttccaaaagtgaagtatcactttctctgcacagtggtgaaagccggcatttggatgggctggatcgggtggacaggctgaggggctgggttctttgtcacttcagagtgtgttttcactgcagggggcagctgattccttttgatgatctgtaagggcagctgagtattaccattctgcagttcaaggtagactgccagcaagatggcctcagggggcacctctttaggatgggtcattgaagccgcctggtggagacactttcgggctttgtcatattcgctcctcaggcagtaagcgctgccaaggttgaacagcatcacagtcctggcagagttgacggaactggggtagcactgaggggcccgcttaccagctggggaaaaagagtgtagacactggtgaagaggccgtgccaacagcaaggttgcancccnncnatcgccttgaggagccacntggcacagcagtattcctcaggcacnaaaacgaacacagaagatttagaatctaaattttaggnatgcangcaggctacttaagtatcacaaaacttcttacttacaggattccantgcttcattttcacctttctctgatcctacaaaaacacgaaaataaatctgagggggagaacaacagagcatattttctttcttttctcctcgggctcagaaggtagagggcatattttcttttcttttccccnaaaaatttttgagatggngctcgctctgttgccaggctgggngngggggntggtttcggntcntggnacctccgctcctggattcagcgttcncctgcncancncctgggngctgggatncaggctgnncacatcctggctgttttnttttttgtnagacggggttaccanntggcagnnggttttttt

SEQ ID NO: 441455 - DNA, 1112 bp, Homo Sapiens
  misc_feature (376)..(376): n is a, c, g, or t
  misc_feature (380)..(380): n is a, c, g, or t
  misc_feature (385)..(386): n is a, c, g, or t
  misc_feature (397)..(397): n is a, c, g, or t
  misc_feature (430)..(608): n is a, c, g, or t
  misc_feature (1019)..(1019): n is a, c, g, or t
  misc_feature (1028)..(1028): n is a, c, g, or t
  misc_feature (1033)..(1034): n is a, c, g, or t
  misc_feature (1045)..(1045): n is a, c, g, or t
  misc_feature (1048)..(1048): n is a, c, g, or t
  misc_feature (1052)..(1052): n is a, c, g, or t
  misc_feature (1056)..(1056): n is a, c, g, or t
  misc_feature (1061)..(1062): n is a, c, g, or t
  misc_feature (1064)..(1064): n is a, c, g, or t
  misc_feature (1068)..(1068): n is a, c, g, or t
  misc_feature (1093)..(1093): n is a, c, g, or t
  misc_feature (1099)..(1099): n is a, c, g, or t
  misc_feature (1101)..(1102): n is a, c, g, or t
  misc_feature (1104)..(1104): n is a, c, g, or t
  misc_feature (1107)..(1107): n is a, c, g, or t
tttttttccttgtatgaaaagatttaatgaattatgagccattgatcattacaaactttaagccttaatatttcttctttcctatgtaaaaccaggtaattaaaacagcctgtctcagtatgacagaagaccatagtagggataatagtaacgtctgcttccacatctgcatgcttcgttaaccaaccaaagaaagtgctccaggtttcccaagtcaacaaagtatactcagttacactttccctgatcatactatgaattgaaacagaacactcctttgacttttaatagcacttttcatccacggcacaagcactttcccattattttctcctttaccctcaatatccttgtgaggtagtgaagggagggagcnaggnttttnnttttctatttngcagatgagaaaactcaaggtgaattttacaannnnnnnnnnnnnnnnnnnnnnnnnnnnnnnnnnnnnnnnnnnnnnnnnnnnnnnnnnnnnnnnnnnnnnnnnnnnnnnnnnnnnnnnnnnnnnnnnnnnnnnnnnnnnnnnnnnnnnnnnnnnnnnnnnnnnnnnnnnnnnnnnnnnnnnnnnnnnnnnnnnnnnnnnnnnnnnnnnngtttgaatgatttacactcaatcttcaggcgcaactgtcttctaccgaaatgctctcctcagcaccaatgacaaagatattccatctccttgagcactgcagcagtttaagattttgtagagctactactgggttttagtgacaaatttacgtaaatgaaggccctcatgacccagatgctcatgctgctcacttcaattgcatatgatttgcgaatgggacattcgggaatttaaatctttgagataagaatggcttgttgttaaatattgaggcaattatttcattctaggtccaatacgcaataaccatgtgtttcggttttccactcagcaccttcaaaactgttgcaaatgaatgtttactaacaagacaaaagagacaattataaaccaaactctcaacaaattnggaatggcncatcnnacctgaaaaanaanaagncttnaaggnntnattncttcctacaagtcctcttcaacctnaacccntnncnttntttaa

SEQ ID NO: 441456 - DNA, 1041 bp, Homo Sapiens
  misc_feature (513)..(513): n is a, c, g, or t
  misc_feature (599)..(599): n is a, c, g, or t
  misc_feature (965)..(965): n is a, c, g, or t
  misc_feature (986)..(986): n is a, c, g, or t
  misc_feature (993)..(993): n is a, c, g, or t
  misc_feature (1029)..(1029): n is a, c, g, or t
  misc_feature (1035)..(1035): n is a, c, g, or t
tctttctaagagcagtttttatttagaaatgtgcttccacaacttggtggccacctgggggcaggtagccccggcttgcttgttctctctttcctagcccaggaatcgggtccttgggtctaaagcacagggccaagttctcaaggatcaacatcccagacagctcccatggtctggggcttggagctggtatgaagggtgaaccaggttccatcctggactgtttatggttggagggcctgggcccctggcaccaggacctcagctccctctcctagtaagagctgggatcacccacaggccagctgtggccaggtcctggtggatatgacattgggaagaacaaggggctaagagaggctaattttctggtgctggatccagtttatcttcctgaggggtggaagccggggcaggagcctcatccccaccattgagggacttctgctgctcattgctgttgggcgagggggtcctgttgccctgggatccccagcgggtcaggcgctttanggaggagtcacggtgggcaagcagagggggctggaagcctgagaaggagctgctggtgaccggacgcttatctccaggctcaattngatgcatcagccggttcatctggacattccagtgtttcacgttggtgctggcctggcgcagttttctctgggcagcctccacatcctcgtcagccctctgccggttctgccgcacctcctccagctgctgctgggcctgctgcagggagcggctctgctgtgccatctcctgctgcagctcttccttctcctgctgcgcccgttcgatgtagcgctcctgctcctccttcagctgcatcaactgcttcagcttctcttcctcctcttccagcagtctggtctgagcgattcgcacagattcttcatctcgccgagctttcacctctagttgcagggcctctgcaaccgctgctgcatctcctccanctccttgatgcgctgcgctgncggggancctcctcctccttcagctccatctcagctgcatggnggcgcngggctg

SEQ ID NO: 441457 - DNA, 927 bp, Homo Sapiens
  misc_feature (577)..(577): n is a, c, g, or t
  misc_feature (594)..(594): n is a, c, g, or t
  misc_feature (624)..(624): n is a, c, g, or t
  misc_feature (628)..(628): n is a, c, g, or t
  misc_feature (645)..(645): n is a, c, g, or t
  misc_feature (647)..(647): n is a, c, g, or t
  misc_feature (651)..(651): n is a, c, g, or t
  misc_feature (705)..(705): n is a, c, g, or t
  misc_feature (728)..(728): n is a, c, g, or t
  misc_feature (733)..(733): n is a, c, g, or t
  misc_feature (735)..(735): n is a, c, g, or t
  misc_feature (753)..(753): n is a, c, g, or t
  misc_feature (758)..(758): n is a, c, g, or t
  misc_feature (767)..(767): n is a, c, g, or t
  misc_feature (796)..(796): n is a, c, g, or t
  misc_feature (798)..(798): n is a, c, g, or t
  misc_feature (800)..(800): n is a, c, g, or t
  misc_feature (803)..(803): n is a, c, g, or t
  misc_feature (835)..(835): n is a, c, g, or t
  misc_feature (848)..(849): n is a, c, g, or t
  misc_feature (871)..(871): n is a, c, g, or t
  misc_feature (873)..(873): n is a, c, g, or t
  misc_feature (878)..(878): n is a, c, g, or t
  misc_feature (882)..(882): n is a, c, g, or t
  misc_feature (884)..(884): n is a, c, g, or t
  misc_feature (892)..(892): n is a, c, g, or t
  misc_feature (895)..(896): n is a, c, g, or t
  misc_feature (898)..(899): n is a, c, g, or t
  misc_feature (902)..(903): n is a, c, g, or t
  misc_feature (910)..(910): n is a, c, g, or t
  misc_feature (912)..(912): n is a, c, g, or t
tttttttaagaggttaaaacaaacgtttatttaacaaattatattaagaatacagacaatcacacagtggacttcccttgccaagtacaagagtcaccttgaataaatatgcagcggggacgtcatccctaagggtcttccttgtccaggcctgacacagtcacacagcagctccacggccttagctgggagaacaaagccgtctctggtggcaacccccggacatgtgctcagagtggcaggaggaggccgggccaccctgagggtgccaggcagcccaagcaggggctgtgggctcaggggtgagcgcctggcgtggcctccaggggcaaggcaggctgcgaaccaagttcatgagctcagccgctgcgtggctgccaggcctgggggctgcttcctcaaggccctcctttgctttcatccttaggttcacctgcttctccaagaacctgcaggctgggattccccacagatgcctgcaggctctggagggccctcatctgggtggaggagtacgggcaggccactcctgaccatgctctgcgcccactgcacagtggcctggtgaccggcaggncccagtggcggccgggnagtccgtaactggactggaaaaagaaaggncagncccagcacgggattgcnanacgntggctggccatgcctctgccgcttagcagtgggccaagtctcagcctcttcaantctgtcaaggagcaaagaacatntactnanaggtcactctgttttccnggggnatgaaaggngaaatgtgcttagagaccctagcctagancntngcnaggaattgtggttagaaatgggagtccctctngtcctctcaccgnnctgcaattcctttaccgtgaancnaatgngttntnatctcttnaanncnncgnngacgtcncnccatttcttcttcga

SEQ ID NO: 441458 - DNA, 837 bp, Homo Sapiens
tagatactttatcatctgaaagacaggttgctgtactaaacagagataggttcctatattgaagtatgtcaaatatttactacctttctgttctattctctatccatagaactctgcctgattaagatattttaaggtgtactttttacgtgatactgttaatagcattgatgatcctggattttaaagatggctgctttagtctactttgattttgggaaagccattttaaacaaacaaatatgtggtatcatttagagttttataaagaattaagagtaactgaatgacagctgaatttctcatgtatttattgactgcctcctaggttcaaagttctgtgctgcatgcagacatatcaaaatttcttatatctttggatcatgaatgtcagggtctttcagctcctggtcagaaaaaatactgtcatgtcagagtgaggaattcttagtatgaggtggtgctggggagtaccagtagcttcagttcaaaaattcattgctctgggtcccaacagctttgttccaagtctacatcttaacagtatgtggaaggattggttcaggcttcctttatattctacatagatcttgatttgggatttttaggaaccaatagcttaagctatgttagaacaatccaaaagctttaaaaattgtcagagcaaaccctatagcaaaccctatctagaccttaaaccttggcgttgataactgagaatttaaagactctggaggcagtgttttgttcctgtgggggagaggccaggtcaacttgcagagtatctcccagagtctggtatcaagtgtcttcactccctgtcacatcacctcgtgc

SEQ ID NO: 441459 - DNA, 756 bp, Homo Sapiens
tggtcaatattttctgggtaaaggaagcccttcctacaagatctcgcgcccattcctgggaaaatgggttgagtccctctgataatgtttggcagctcctggaaatgtttcctcctgctggaacaggcaagaaagcacaccaatataagattaccttggtggtcatgcctcaatctggagttgtcaagtggagtcccaggtcagtgtaagtagtagacggaacaattgtcaaacgtgttgtcccgggcaagcattttgcatgtaatgggttcccttcgttgtgtccttctgttctgactttcgcgtgcctcattgtgcttcatgataagggtaattctgtatgtcaaatccaaggggagaagggtccctgaataactccgttcttgaggcagagatggcattattgcctgtgctgattagcaagcagtgtgtgctgctgtaccaagctctcaggaaatctggaaattccacattagtctaagtaggatatggccccaaatcactgaaagttcttatcatattatcttggtggaatcctcagatttcaggataccaaagttatgggataacaaggtacccgggtgaggaaagcccagcccgggtcctcgcgtccccgctgcaagcggtcccccaggtgctcccgcgcctcgcagcttccccgtgggcggccgccccgactcggcagcctgcactggtggtccggtgctctcctccgcccgcccaccgcccgtggcagccacggctcgcgactccgct

SEQ ID NO: 441460 - DNA, 666 bp, Homo Sapiens
aaccagagagctgtggtcacgtatactgcagaaagtaaaggagtcgtgaagggctggatcaagggtgtaagtacgttgtatgttaaacatttggggtgtgatgtcattagattgtcatggattgtgggtcaagttggaataggtctatcagtccttgtaataatgatggccactgttgtgataagtatcataggattgtctagtttagcaatagcaattaatggatttgtaagaggaggaggagtatattatttaatatgtagaagtttagggccagaatttggtggtgcaattggtgtaatgttcgcctttgccaatgctgttgcagttgctatgtatgtggttggatttgtagaaactgtggtggagttgcttaaggagcattccatatttatgatagatgaaatcaatgatatttgaattattggagccattacagtggtgattcttttaggtatctcagtagctggaatggagtgggaagtaaaagtttagattgttcttttggtgatcgtagttcttgttattggtgatttcgtcataggaacatttatcccattggagagtaagaagccaaaagggttttttggttataaatttgaaatatttaatgagaactttgggtccgatttttgagaggaagagactttcttttctgtatttgcc

SEQ ID NO: 441461 - DNA, 677 bp, Homo Sapiens
tttttttacaaacaacaacagcaataacagctacaatttattgagcacttactaggtcttaaatatttgctaaatacatacacagtactcacaatagccccaggaaattatagatgtatttaagttttggatcaatgagtaatcgttagctgagtagaaagctcttttctaccctacaataagctcgacattaaagactgacattccaattaatataattaaccctggacttatagaactgttttctcataataatgcacatctactgctaaatgactactctcaaagttgttttctttttcatgttcaaagaaaattacatttctttcctttcacttttccaatagaatactcttcagttctactctagaatctcttaggaaattatttgaaatagaaatcaatttaagccctataactagagctttttctcttgttgagctgctttgcagggagaaaatggtatatatatataaaataatagtttggtgaaatatataacattgacttccaagaatattgtttatttattctttgtcaaataatgttacatgttaccaatattagatgtatcaggactcccttttcagtaagtatggttattggagtttaggataacttaaaaaaatagagacctgtttggctaaagaaatttaaaagttctataactctcaacc

SEQ ID NO: 441462 - DNA, 1440 bp, Homo Sapiens
ctttatttcatagtctcgcccgggttttcccctctggagaaaaccggtttttggagccaaatggtttcacgttttcccgaatgggggctccgcgggcgcacaaaagggaatggggttcacaaagaaggcttttttctaaggggccgggaggcgcgacagacaaagggatgctttttcttatactcatttcgcgtgcgggggccaaaaagcgaacttttttaatttaccaggtaataaaggttaacaaagggtaagagagggtatttataatataaaataccccttaagttgcaacatttttcattggtaaggtacaatgctgtatgttgatgtgctactcaaggggaagtgttgtttatgcatctatatttatagagtatacataaagctttttaaaattaggaacacaaatactgccctgttttacgcgttgggtttttgatttggtatccagaagatctgagacttaaatttcaaacaagacttaaaaagaaggcttgtttaaatacagggttctaaaaagaaggaaaaaacccagaacatcacatacttttaattatttgtaaaagcattattctagttttctaagtctttatacttaaaaatgaaagcagtgtggaaaagaatccacataagcaggtatcatcagagtttgcacagattagccaaaacaggccttcaataggtagtggttttctacattatcttccaaaagacctcaggtttggtaccaaaaaggacagatttttctgggcaccaaggtcttataatgctgcactcatccaatggattgtaaacataatactggagtcgtatagtggagggaaaattctgaaacttgttcttacgataagggcagatttgcgacaaagtgagaatatcatcgagaatgatgatcatgccaaacctgaaacttaattgacatcatcatttcctctcccctcaattctattaattcacaaatcgaggtgaaaagacacaactgacacccgctttaacaggacccagatagaaggaaagacatttcttccaacctaggaggaacacacatttacaatacttatgtgctggttttaatagtatacaatcattagcacctgattgtcaaagggtaggtttaacgcacgagacatctgaagtgcatgacctaatttttgtgcacaactccaagatacttgaaaaccaaggggagggcacccatgtgattcggtttcctgtgaccattccaatcactgatagctcaggtactttctgggcaatgaccaaggatgttgcctgaaaagctaaccctagagataaatggaaggcaagctggatagaaagggactgttattgtgtgaaaattatggaaaacattcagtcagccttattttctttaggtgcccttttcattgagtccaaatgccagcgtgtcctggaataagtgaaattttgttaatt

SEQ ID NO: 441463 - DNA, 857 bp, Homo Sapiens
gtgctttaggcatgagtcataagatgccattgtacttgtaggcattttattttcctttagaaatggacatcagctcttctcttctgactggtaacacatagccccaaagcatgagattatttttcattgggtttttattgttgtttagttttggtttgttacgccagcccagtctgtctgcggaacactgactctgctctctaatgagaacaaagttagaaatctgccgataacctaaaataatttagaaatgaattaaaaatgtgaaatcgggttaaagtgatgatgataaaatagcatgcaagaaacaagctccttccatcagacttggctactgttttcttctggtacgatttggtttggaagagcctcttgtttccttctctttggggtatgtcttcgtttcttaatatgtttgtaacattattgagatataattcacataccttacaattcacttattttaagggtacaatttagtggtttttagtgtattcacaaagttgtgtaaccgtgaccacagtcaattttagaacatttcgttaccccaaaaagaaaccctgtacccttgagcagtcacctctcattttctcccagtgcccaccccatccccgagcccctggcaaccactaatctatttctctctctgtagatttgcttattctggtcatttcatataaatggaattctacaatattcggtcttttgggactggcttcccaaatatgattttctatatggagtgagaaaattcttctcatcttgagaactcttattgctgtggggagtggttggttcaatagatttcaggcatgagggccagatacctaacaggtttttctccgtgtcttatgctg

SEQ ID NO: 441464 - DNA, 698 bp, Homo Sapiens
agaaagctgtctccttacatattttaagtgtggcctaaaggtttttctgtacatagtgaactgtaacctaactggatatgtaaacagactgtaacctacatttgtgccaatcattgagtttcagccaatcacaggcagccaactgttgaaatcagctttaaataaggcaataagctgtaaccaatctggttgtttctgtacctcacttccattttctgtatgtcacttggctttttctgttcatgaatcttctgctaccacttggttgcaccggaagcctctctgaatctattctagttcgcaggctgcctgactcatgaatagttctttgcttggttaaactctgttaaatttagtttgtctaaggtttttcctgtaacaggtttaggtcaaataattctttattatgaggatctgtttagcagcacccaggggctctaccactagatgccagaatcacaccctctccccgattgtgagcaccaaaaaatgttcgtagacatagtgatcacttttattttaaatctataatagatatataatagttgtacatatttggggctacatgtgctattatgatacctgtacatgtgtgatgatcatataagggtaactgggctatccatcatctcgaacgattatcttggtgttgcattactttctctattggctactttaatacacggttacttgggctg

SEQ ID NO: 441465 - DNA, 699 bp, Homo Sapiens
catcgatttcccggatgaaactctgtcattcatcaaatctcatcccctgatggactctgccgttccacccattgctgatgagccctggttcacaaagactcgggtcaggtacagactgacggccatctcagtggaccattcagccggaccctaccagaactacacagtcatctttgttggctctgaagctggcatggtacttaaagttctggcaaagaccagtcctttctctttgaacgacagcgtattactggaagagattgaagcctacaaccatgcaaagtaggtatatgttacgagaacgcccttcagcactgctcaaaaattttcggcatgtatttcatctagtcatgtccttttggtcctctaaattagcagtggtttggcataatagtgttttgtgttttttttctcattgaaataaatcttgggtttgattttttcccgagcctgctagggcgaggggggtgaatggttgatgagtttaaaaataatgcagcccttgtttttcacctgtagaatatgagaacattttaacagcacctctcttatcttgcagatatattccacgatgctacatgcagcagacagctgtgagcttgcatacacacacacaccaatatacatgcacatcatacacagaatgtagtctagttaagtattccttcctatcttaatacgtaggagtattagaccttt

SEQ ID NO: 441466 - DNA, 710 bp, Homo Sapiens
  misc_feature (493)..(493): n is a, c, g, or t
attagaaacatttttatttaaattcagacaatagaaaggtatacagaaaaaaattacagaaacttgcaacaacagtatgcaacttggaaaatttattagtaaagaaggaggggaaaagttattcctaattttgccaagtactgggttagtccttaatagaataatttatcagttcagcaaagtatacccccttgctggtgtcttttgagcagacagattaacaacgtcattaatctactaaactgatatctagtaaaaccttccaaagtaaaatagtcaaggcagcatttccccaacatttgagatacaacttcggggaactgaaataattacagtagaaagttaaaaaggatctgatggaaaacaaacaatcttaaacctggacaactcccgcctgcccccgtccctggccccaaccagcaacacacatacaaagatgccctgcctagactgtggaggacaaaagccctagactaataacaaaatgacctgngccctggagccctggatctatgccaaaccctttctgaattctgggtggatggggcagtgggtttagggtaaggaatgtaaaaaacttttaaactttggcaagtatacaaatgagtcttttttgattgtcacttttataaggaaatatcattctacccttgaaaagatatttctctatcatatgggacttccttttaaacatttgaaggctttctggg

SEQ ID NO: 441467 - DNA, 300 bp, Homo Sapiens
tagtggatccctcgggctgcaggaattcggttcgaggaagagggctccagaaggagctgagtctccccagaagaggaagtttgatagattcccagaagtggaattgcttggtcaaacgtctcactcccaggagcctgagtccaaccccatccagcccaggcagtccttgtagtcctctcttggcctttcacttttggagggaatgatctgcactgaattctccctgtgtgtccaaatgctgggagaacatcaccccttggatgaattgccaccacattaaataaaacatatccaaagctc

SEQ ID NO: 441468 - DNA, 1043 bp, Homo Sapiens
aaaatatcaaaaggagtttattaaaatacatattttgttatacataaaacttagaaatatttcaagatttacatacatcaacttttgcaatcttcctgctggtaaaaatacaaaacagcagcataagaaccagttactcatatactcaactatattcatgcatacttaacaaaatgaaaagttctcctaaaaactggccagatacaaaatgtcaaatctaaaatggtatatatacttacgtttttagcattcttacagattacaaacccttaccaacattaatcttggcctactttaaagttgagtgatagcatgaactctgaaaagagaatgcatgggttttctcacagctatatggccttggacaagtcacttgtcagttccctcatctacaaaaagggggttaaaaatattcacatcacagaaatgagattaagtagtttaacacataatggctaacatttcattgcttacgtgtttttgaaactacagggcacttttatggtgtgactagtattttaagtaatcagtgcaacttagtatttttatctctagctgagtatgtgtctctccttacctctactatgccctttaaatgttctttgcccacacaatagttaattgtgctaggtataagtctgattctaataataaattgatataatacagtcatcttagtgttaagacttattctcagtaggtaagagttttagaactagttccctgaaaaagctgtatttatgatagtttatgtgcaatctgtagggccaggagcatagtctaatctgacccagaatgtctttttgatttgatataggtaaggctcttcggtgatccaagagcagcccctttgggatttctggaaagcaaatcaacctgcacttagagttgcatggacagtgggccaaaagtcgtaacacatgcatcataactccagtccctgttaaagggaactcaagggctttgctttaattggccctggctgagccaagctaataaaagattaagttgattggtccgggactgtggcggctcacgccaat

SEQ ID NO: 441469 - DNA, 1130 bp, Homo Sapiens
gtaggtgttttcaatgagcccttcttcatcaagctccacaatgatcttctgcccacagactgcacagatattgtccgataagctccttgtaggcaaccggctgacactgtagaaccctatagtggaagccatgtagtctgagcagatctcggcaaagtctctccccattactccatagtagaggccgtagaacaaagacacaatgccaaaatccatggaatctctagctttgattttgaaaaacagattgaatccacacattgtaaacatgatcgccaagtaacccacaacaccaaatgcatagctgagtttgtagatcaaaagaaaccatttgtagaccaatcgtggtgtccttcctgagaggggttttcgggtagctctgaagaggatgtaactggtaataacggagaacatcccccacatagacagaaaccgccaccagtataattttatcgtgaaatataaggggacaacccacatctgcaacaaggtcaccagattgtaggatcggccatgcctctgtctccactgaaccagcactatctgggcaatgaccagaacgcagaggaagatcaagatcatttccacgtgcatggaatcgtggccccggtgcatcttgtacatcctctcctgctgcaggttccatgtgtcttctgcagaaagctttgtatgagagagctgctcctgctgcgggggggcctccagcaccggcgctgccttccgcgccgccgtccccgcaggccatgcctgagccacctgtgccttctccagggcacagcgcctgccggggagggtcccgcagagtccgcagaaggaggcgccgcaggggccatcgggagccgagggtgagagccggatctgcgcgcggcggcggagcggcggccctgcccagggttgtgcaggggcgggagatgggagcctcccggcacagccccgcctccgccccctgcacgctggccagcgtcctccccagcagcggcctcgaggtcccggtcgccagcacccccggttccttcaggacctcaggcctcccattcagccagccattgtcgccgataaagcgtcctgagccctaccgggtgcgtgtggcgggaaccccggttttgttaccgggcggcaggactggagag

SEQ ID NO: 441470 - DNA, 1154 bp, Homo Sapiens
aaagatgaaaaaacatgctttatttgtttattccattgttcagcttctctttaaattctttccacatggacaaattgcttgacaacaaagtttacttagttttctaaacacttgggatcatctctaaaattaaaaaaattaatattaaatgttggaccaaggatttcaaccatgcagtatgttgcttctggggtctgctgtcctattccagccctagtgaatagttaatgccttgaactattcctatcaccacaggttgccaggccaccaaataacgaagccaatccaggatttgtccatacagaaaatgtgtgcgctcccagggattactgatcatcctcttcaaatcaactttctctttgcagtaagggcaagtctgctttttcccaacgatacacccacctcggatgcagaattcatgaaagacatgattacaggaaagctggtaggtgttttcaatgagcccttcttcatcaagctccacaatgatcttctgcccacagactgcacagatattgtccgataagctccttgtaggcaaccggctgacactgtagaaccctatagtggaagccatgtagtctgagcagatctcggcaaagtctctccccattactccatagtagaggccgtagaacaaagacacaatgccaaaatccatggaatctctagctttgattttgaaaaacagattgaatccacacattgtaaacacgatcgccaagtaacccacaacaccaaatgcatagctgagtttgtagatcaaaagaaaccatttgtagaccaatcgtggtgtccttcctgagaggggttttcgggtagctctgaagaggatgtaactggtaataacggagaacatcccccacatagacagaaaccgccaccagtataattttatcgtgaaatataaggggacaacccacatctgcaacaaggtcaccagttccatgtgtcttctgcagaaagctttgtatgagagagctgctcctgctgcgggggggcctccagcaccggcgctgccttccgcgccgccgtccccgcggccatgcctgagccactgtgccttctccagggcacagcgcctgccggggagggtcccgcagagtccgcagaaggaggcgccgcgggcctcgggagccgagggtgagagccgg

SEQ ID NO: 441471 - DNA, 442 bp, Homo Sapiens
  misc_feature (18)..(18): n is a, c, g, or t
  misc_feature (31)..(31): n is a, c, g, or t
  misc_feature (36)..(36): n is a, c, g, or t
  misc_feature (42)..(42): n is a, c, g, or t
acctaacagccccttaanggtgggaaaaatnatagnaacatnaaagagtgggaaatgttttcctgggccatttaaaaacatggattaacagggaaagctgggtaggtgttttccaatgagccccttccttcatccaagctcccacaatgatcttctgccccacagactgcacagatattgtcccgataagctcccttgtaggcaaccggctgacactgtagaaccctatagtggaagcccatgtagtctgagcagatctcggcaaagtctctccccattactccatagtagaggccgtagaacaaagacacaatgccaaaatccatggaatctctagctttgattttgaaaaacagattgaatccacacattgtaaacacgatcgccaagtaacccacaacaccaaatgcatagctgagtttgtagatcaaaagaaaccatt

SEQ ID NO: 441472 - DNA, 581 bp, Homo Sapiens
cctataatgcccatgctgctggtacattaagtccctgtttatgtaataaaaagttgtggaacggtaactcaggtaactcttaggatgagcataagcaacagcccaagaactcatctaggtatccctggggtcatcctgatgctcctgctccaggctactgctgcacagtgtagttacctcttgaactatgtggcttggagaaagttatcactcaagaggagaggacagttctccatcagcctctcccaggaagaaaataatgttcaggagccatttcaggactgtcactcaccaaacaactatgccctccctctgcagaagaaaagcttgcatctcccagaaggaaatagggataacatttttttccagagtaggataggcctagctttacaggaactgtgtgcctgaggccaaggctaccctgggaaggctacaagcactgggagagaggcaagggatttatctcataccacatttgcttgacatgagcctggtgcggggtcctttaacgctgtatagcccatgtgttcactaccctgatggcatctgacagcctgagtagattaggtgtgctttccctg

SEQ ID NO: 441473 - DNA, 1468 bp, Homo Sapiens
  misc_feature (1336)..(1344): n is a, c, g, or t
  misc_feature (1383)..(1419): n is a, c, g, or t
aaaatagaaagcgtgcattaagtggtctttattgatgtttcacattcagttattatcaattcttcagttaattgtacaagtatgataaattattttctatttgctgtgggaatttaaatgtaaaataaatacaaaatacatgtgtggtttaatgaacactcaatgaagcatctcttctgaggtattcctttcagtctggttttatcccagatctttttacttcccctaggaatagtctattaaaccacacaatggatctgtgaacttgtagatcaagttcactgtaaatctgtgaacttgtgttttaattacattagacatattttttgatctcatcatacaacaccaatacaaaagcaccgcccatgcctctcagcacattggaccaggcacctttgaagaaggccttggctccttcgtcttttgcaatcttcctccagcagtcaactgtccccgtgtacataatatcggcccctttccggccggactgcatcatcattctacgacgaacagtgtcaaaggggtaggacaccagccctgcgactgccgtcacactctgggcaatcatccagctcacaaaaatgtgcacgttcttggggtcaggcagcatccccttggcagtatcatagactccgaagtaggcagctctatagataatgatgccttggacagagacgttgaaaccctggtagagccccctcaggccatcagacttgaagatcttgatgatacagtcgcccagaccatggaactcacgctgggcggcgcccttgcccacatcagcagccaacctggtcctagcaaagtccagcgggtagacaaagcaaagggaggtggccccagcggccccaccggacgccaggttaccagcaaagtagcgccagaactgcttatgccgatccacaccccctaagaagagctgcttgtacttgtccttgaaggcgaagttgagagcttgggtggggaagtaacggatcacgttggccaggttacccctccagaaggagaggaagccctgctccttagggattctcaccacacaatcaatgatccctttgtactgcttctcagcactgatctgtttgctggcatgctggacctgcagcagcagtttgaccctctcgatgggggcgaccgcggtcttggagacggcagcggcgacgcccccggccaggaagtcctttaggaagctccaagcgtgatcacccatggtgacagctcgacgctctcagcccgcaggcagcccgttcgtgctctcgcccacgcccggcctggcaccgccgcgcagtccccgaccctgcgcgacgctagggggccgccgcctggcccgcagctnnnnnnnnngctctcgacgaattcgagctcggccgatttggcctgatnnnnnnnnnnnnnnnnnnnnnnnnnnnnnnnnnnnnncgccgccaccgcgtagagctccattcgccctatagtgagtctatacaga

SEQ ID NO: 441474 - DNA, 288 bp, Homo Sapiens
  misc_feature (26)..(26): n is a, c, g, or t
tagtatgaggaaagtaaggatgggcnaagaagccgatcaaaatagcctattgcctacaacattttccgaaaacaaagttggggctgtatttcctttaaaaagataagcctctaaaaatgcttggcaaaaaaaatatagtgttaaaataggccagtgatattaatgagaaaatgaaagtatgtatcaggaataaagtgatattgcataggagtattgtatttttatgaattttatgccagttgtttacatgtactatatatgttaaattaaaaaaaatcatgagtaatg

SEQ ID NO: 441475 - DNA, 1605 bp, Homo Sapiens
  misc_feature (180)..(224): n is a, c, g, or t
  misc_feature (678)..(717): n is a, c, g, or t
  misc_feature (1475)..(1508): n is a, c, g, or t
tcattactcatgattttttttaatttaacatatatagtacatgtaaacaactggcataaaattcataaaaatacaatactcctatgcaatatcactttattcctgatacatactttcattttctcattaatatcactggcctattttaacactatattttttttgccaagcatttttagnnnnnnnnnnnnnnnnnnnnnnnnnnnnnnnnnnnnnnnnnnnnnaatgttgtagcaatagctattttgatcgcttctttgcccatccttactttcctcatactaaagcaaaaatatttgtaaatgctaacaatatgcaaaacactgagctttaatactgttttgtacgcctatggaacctgctaccaatctgcattgccatcaaaggtgtggatgctccacagtgcttgggctgcgagctgtggccacggctgcatagcagggaccttcaggcctctgctccaaactggctcccctaatatatagccatattttgctgggggttacattcataaacactgctacaaaaggatccttctggaaaaagctaatttatattacttttaatggttcccagcaaatgaagcagttataatagtatttttaatgcttttttcctatacagaatttctacttattacatgtgaacttctttggaaggaaattactgggggtgagnnnnnnnnnnnnnnnnnnnnnnnnnnnnnnnnnnnnnnnntgtaactgctggatgtacacaatcagccacactcaggtgagcatcaatcacagataagcagcgcgcacctccctctccctgctcatgtcaactcccatcctcagcctcaagtgtccaccgcccattttcctggactgttgtgcatcatcgctcaaatgttgcttttaatccacaaatcaagggctgcttccctattttctaaaactagcaaaagcctaagaaataaaaacagtcaaccagcaaatgagaaacagtggccacaaatctgaagaacgctgccagagtccctctcctgggctgcctccagggaaggagcatccctgggagctgcggctctaggcgctggcacaagactggggggcggtgcttctctgagggcacactcctcagcctttgcagctgacttatgtcagcaagctgctgcttccccgggaccaggcctgcccttgggctctggtaagaaggtagaaagggaacagcggcttccaggagtgggcaccagaaaccatgcctgaggactaaggtctgaaggacaatccacaatgaggttaatctgcctgtggttaagaaagagaagctgtataattaaatgtgtagtctgtcagccatagtcacgctttgcttagaatttaaaaccctaaaaccttttctcagagctatgaggtttcatcgttttgaagaatctcatttcacacaaattaacttctaagaaacaaaaattcatacaaggaattcaaagaaggtgtagaaatttttcnnnnnnnnnnnnnnnnnnnnnnnnnnnnnnnnnnaggaggacgaaatatacttattccttatactgaaatgatggtttttagaaccaaaattataacataaggcttaaggctttgtcttattaaagacagg

SEQ ID NO: 441476 - DNA, 872 bp, Homo Sapiens
  misc_feature (726)..(726): n is a, c, g, or t
  misc_feature (800)..(800): n is a, c, g, or t
  misc_feature (815)..(815): n is a, c, g, or t
  misc_feature (825)..(826): n is a, c, g, or t
gtatgggagatgcatagcgctgtggactgcaatggtgtggtctcctggtcgggggcccttctaccctcacatctgctgggcagctcctaccagagggcacaactactgaaacagaaataagaaagagacggtccagttcttatcatgtttccatggatttattggaagatcctacatcaaggcaaagagcaatgagtatagccagtattttgaccaacaccatggaagaacttgaagaatccagacagaaatgcccaccatgctggtataaatttgctaatatgtgtttgatttgggactgttgtaaaccatggttaaaggtgaaacaccttgtcaacctggttgtaatggacccatttgttgacctggccatcaccatctgcattgtcttaaatacactcttcatggctatggagcactatcccatgacggagcagttcagcagtgtactgtctgttggaaacctggtcttcacagggatcttcacagcagaaatgtttctcaagataattgccatggatccatattattactttcaagaaggctggaatatttttgatggttttattgtgagccttagtttaatggaacttggtttggcaaatgtggaaggattgtcagttctccgatcattccggctgctccgagttttcaagttggcaaaatcttggccaactctaaatatgctaattaagatcattggcaattctgtgggggctctagganacctcaccttggtattggccatcatcgtcttcatttttgctgtggtcggcatgcagctctttggtaagagctancaagaatgtgtctgncagatttccnnatgatgtgaactcccacgctggcacatgcatgacttttccactcct

SEQ ID NO: 441477 - DNA, 1099 bp, Homo Sapiens
gaggcaattggaatgtcaattttatttagtactatgttgtaaaaactaaacagcatatccagctgattgacaaaatccatccaactgttaaaggcaaaacaaaactatctcaagaggtacagatatgcagagcttgcttttacctacaggcagatatttaaagagagagagacacatagagagataatattgaagcagaatgctacatatggaattgtccaactaataaaattcagagagcgtgaggaactcaaaagcaaagatatcatgtcatattttctctcttcttcttcaaagaacctttgagcttcttccacaggctgtcttttctcttcagtttcttttccatcaaggatggcatggactccttcttgcgaatttccctcactaagccatgaaaagcatcatcaatacagaatctgagggctgcagaggtctcaaaaaaaccacaattatattcttgggcaagactcaagccttcttctgtagaaacctggcggaactgttccagatcaattttgttacccaccagcaccaggggaatttcataggtgtggcggacctgaaaaatgagctctttaaacttggcagcctcctgaaatgattgacggtcagtgacggagtagcagatgatgaagccttccccacctcgcatgtactgctcccgcatggctgtgaattctgcctggccagcagtgtccaagatgtccaagtaagctggctcattgtcaatcctgacctgggtcttataagcatcttctatagtagggtcatgataatcagggaactgatgactaataaactgcattgtcattgcgcttttaccaactccccctgctcccagcattaccaccttgtactctctggacccgcctgatgcgctgcccggggagcagctggcttcattttctacctccatcttacccgagggaccggaggaaaaaaagaaggagaaagtcacccgtgtcaggtgcttgctcgaatattaagcaactctaaaactgtgtcaaagcaaaggttttagtacgaggtaagaaccatcagcgtcgggctggctgctggtcctctgctcgagcgggtctcatcctagtgccgaatt

SEQ ID NO: 441478 - DNA, 818 bp, Homo Sapiens
gagctcgagacccctttctgcggctggctttagcaagtcgttctcccatttgttggagctgtattttgttctcttgagcaatagcaatttcctcttgataatccttcttgagcttctctatcatttcttcaatgagaatgtctccattctgagaaactttgctttccatttgagtcaaccactcacagagttccttgttcttttcactgaagactgcccattcattcaatctttcacctatttgctgccgccttaaggagagctggtggcatagttcttcccactgcctttgcagaagctctacgcgttcattaagaatggagatatcatcagcactgatataggcagagagggtgtccttcagcaggctcaactgggtcaagtcatctgtccagctcccaactgcattttctaattccttgcaacgcatttgttctgcatggagctcttcatggtgatccgggagagactgcgaaagcttctttttgaaagttcgtagtttctccagggaatctgctattcctttctcacatttttcccagtctttcaacaagaaggctagttttttcttctgttcttccagccgcatgctggctgatttccatttctcttggatttcagcgagttcggcctgcaaggcggcctcagcgccactgtccgccgagagaaggagttgcttgccagcctccacagtcaggatgtagctgccttgttgccgcagaaacactttttctttgaactgcacttcatcaaagagggtccttgcttgttgcagtggcataggaacacttccgagaccactcatggggaggtaggac

SEQ ID NO: 441479 - DNA, 878 bp, Homo Sapiens
  misc_feature (654)..(808): n is a, c, g, or t
gggtattcttaacattttgtattttgtaggattgatcttattttgagacaagggttgtaaaatgtatttgctctcagaattcatccccttcttagtattaggtcattcttcatctgtgtaatttttattaactttgagattcttatacagaaaatagttgcaagggtaaggtaattaactttagatcccttcatttctaaagcaattattgagtgcttaaaatttaaggttgttttagagtggagtttgtgagtaaaagaggagcccagggagacagattgcaagtagtaggttgcaatcttttagattcagcttgtaataatctttgagccacaccaaaaggaatgccaagggctctctaaatttagccagtaggaagctactgctctcctggcaaggattaattggcacattctgttaagatatccctcatgacagttgccccctttcaaagcaggaggaagaaaaggaagaaagaaaaactgtttcatcatttctgttagggtaggaaatgaatcatagggtaaaatggatgagtagatagaagtctctcattttaaaagtgtcttttgcaatcttgatgtaatgcactttttataaggacttgagatctccaataaaatttctgtaaagaatttccaaacataaaatacnnnnnnnnnnnnnnnnnnnnnnnnnnnnnnnnnnnnnnnnnnnnnnnnnnnnnnnnnnnnnnnnnnnnnnnnnnnnnnnnnnnnnnnnnnnnnnnnnnnnnnnnnnnnnnnnnnnnnnnnnnnnnnnnnnnnnnnnnnnnnnnnnnnnnnnnnnngcgtaatattctgtaaattcgcgttaaatttgtaaatcagtcattttttaccattagccctcggctcctt

SEQ ID NO: 441480 - DNA, 842 bp, Homo Sapiens
tttctcttctggccttcgtaaataagtacatctttttcaggatcgtatgaacctttctcacaataaattgcctctccagcattgctaagaattgttatcccgttcatacgaattcggcatgctaaaagaatcacagagtgattgctacagagatgttccaggtgtttgaagaagatctgtgaatgtttcttctaaatatatgatatcagcaccaagtatcaggtcaattctccaggagaaaaactccccaattttgtccccaagtcagctccttaacaacagttttagtttggatatgaggaggtaagttggcttgaatgtttgatttaagaaattgtaatgctacttttcgatccgtgatagtcacatgagcacccagcagggcagccactatgcccaccagccccgtgccagcacccagctccacggcagagcggcccttgagctccacagctcccatctccaggtatgtggaaagaacgatggccgcatcccaaaccaccgctgcgactcccaggtgtctccagtcctgccggatctggatcgtgtggtttgcaaaggaaaaagttgcaagaggcttgtggaatttctgcaacccaaattccgtggtctcctcatagggcacgagggccattccgcctgcaccccgccctctgctcagacctcccctcctccatcggctgcttcgatagtgataacaatgggacagaacctgcccttagactgggtgttagcggtttgataaaccagaaatacatggtcgccgcagttccgtctccccgacactggaagtgcgacgcgtgggtcgacgatatcccgagaacctccggaccgtaccagcc

SEQ ID NO: 441481 - DNA, 856 bp, Homo Sapiens
  misc_feature (678)..(703): n is a, c, g, or t
caacaaaatcatggcaaaggcatttttgacaaagtttagacaaacgactcacaaaatatggctaatagtagatgagtttggacatctgatactgcagaccagccttggctagatcctaggcgtcagagtgaaatcatgaatttccttttgtagattagaattgatggtccaactctcaacccaccaaagagaaacttaccttttccaatttaattgtaaaagccagatatatcactgaatgaaggtatctaaggaagtgatatttatcaacttcccaaatgatacagagaaggaaagcataattattaaaatgaacctaaagtctagatacagtgggccaggctggtgaagccttagattactatggaaatgatattgtttataagatgttgcacaaattatggtaatgtgtgtaaatatttaaatgtgtggtggattattagtgatatattaataattttaatgtccaaaaatctttttattttaatagccagggtatggtagggttaaagcaccacttgggatgataaatgggataagtatagtccatggactttaaagcctttgtatagaaaattagtttccttaagatcctccccctctttttgtttaaataaaaagtagaataaaagtagctagggttgaaggaattttaaacctcaggtagttttaaaattnnnnnnnnnnnnnnnnnnnnnnnnnngactaggcccagggactgatgacaaattgacttgttaaaaggtgcacagtctttatagccttcttttgtgttgatggtggggtttttctccccctttcattatacttgagaagtatgagaaaggaagccacaaatttgaagggccttataaat

SEQ ID NO: 441482 - DNA, 1394 bp, Homo Sapiens
  misc_feature (226)..(295): n is a, c, g, or t
  misc_feature (341)..(498): n is a, c, g, or t
  misc_feature (518)..(539): n is a, c, g, or t
  misc_feature (550)..(768): n is a, c, g, or t
gggaaaccaggcaaggcttccctttttcaaacagggtttttattacagggggttttccacttgtgtttccctgggttaaggtttttaagcaaatttgagggacggggggttccccactctagtccagtggctttttgaaaaccagccataatatgagtcaccagtgtaacaccagccacttaattaaagattttttaacaggccccatttaaaatgtaaagaaaannnnnnnnnnnnnnnnnnnnnnnnnnnnnnnnnnnnnnnnnnnnnnnnnnnnnnnnnnnnnnnnnnnnnngacgtcggaagatcgagaccatccttgttaacacggtgaaactccnnnnnnnnnnnnnnnnnnnnnnnnnnnnnnnnnnnnnnnnnnnnnnnnnnnnnnnnnnnnnnnnnnnnnnnnnnnnnnnnnnnnnnnnnnnnnnnnnnnnnnnnnnnnnnnnnnnnnnnnnnnnnnnnnnnnnnnnnnnnnnnnnnnnnnnnnnnnnngagacagactctgtctcagnnnnnnnnnnnnnnnnnnnnnntaagtcatagnnnnnnnnnnnnnnnnnnnnnnnnnnnnnnnnnnnnnnnnnnnnnnnnnnnnnnnnnnnnnnnnnnnnnnnnnnnnnnnnnnnnnnnnnnnnnnnnnnnnnnnnnnnnnnnnnnnnnnnnnnnnnnnnnnnnnnnnnnnnnnnnnnnnnnnnnnnnnnnnnnnnnnnnnnnnnnnnnnnnnnnnnnnnnnnnnnnnnnnnnnnnnnnnnnnnnnnnnnncacagctctatattttgtcagcccctgccaaagtacacttaagaaatgagtaaatgaatgaatgagtaaaaaagtgaatgaaagtaaatcctatgcctggtccttccttcttcacagtagaaagatgagtattatcttcaaaatcaactgggggaaattgatacagagctatctcatttctagaataattctgactcctcatgaagttgctcagggcctaagggagatgaaaatcatggcttctgacatatatggctgagagttctcctaagtgacccatactatgaaagaacatggaagtaggaagatttatttaagaactttctaattcaattctctaggtcagaacctagaaaagctaaatgattttgaaccttgtatgagaaatcttagaagaatatcagatagaactataactaaattacttgagtcatattctggcttgctttctaggatgaggtctgatggaattgatctgcttctcttcaagccgggttcaaaatgatcctttagttgcaaggtgccctgccaatgttctcttaccgtaaggacatcatctattatattctatctgaaggatctgaacaagaaataactgagctcaaaacagtctgtctcatcttaac

SEQ ID NO: 441483 - DNA, 1181 bp, Homo Sapiens
tctcattgtcttttgagaaacaatagacttacagtagtccttgaatagcacagtcctctggctttgtaccttaacatgttacaaagttcagtcttgtgaaaggagtgtagataccatattggagctattctgagtctggtgcaatggtttctggaatttgccttgaatccacactcggtgcattttcacttgttttttcctattaacttgtaagcggcgatcaaccagattttgcttttcatctaaactggctttgcagaacatactgtggacttccccttttgtaaagaaatatgctctggtaccatctcctcgaacataaaaattttcagataaacaatgtccctttttaaaacgaagctgagtcttatcatatcttccatagtctcgaaataacagcattcccccaggtttcagtaacttggacagtcggtttacaacaccttgcatcctgtcaggatgaatagaagagagcacaaagacaaggagaatgacatccaggatcccatctggaaaagggtaaggtaagccatcatcacatacatcatgaacaaaggcaaaacactgggttgctctgtaggccgagtgtgactttacgagctccacagctccagaagcaaaatcacatcaatacagaaaggactccggagagttcctctagtatcctgaaagtggcattgctaccaggaaacaatccagtctccataggtccttgtgtttttcagagtctaggttggaaaaatcagattctgttttgctttgaccttctgaagaaccagaacttttctcataatgatttttttcatcaggcacagtaggacagtgcattcttgagaaacgatttgtagcactagtttttacatgatcccatgatgattctctcgccttctcttcaggtttttgatcaactggaagaatttcaggaaattccctcatcagccaattacgatccttgaaaaacttattcttatgaatcttgtaaaatgtgtcccagtatttactagcttctctctcatacttaacacatgttgtgttcaaaaactttggctgggtcagttaaaatccttgatcccagaggggccactgggtggtaaccactttggtatctgtgtggcacctttcctagccttagacaagaaatggaatttctccaaatcatattcatcctaagcagtacctaa

SEQ ID NO: 441484 - DNA, 967 bp, Homo Sapiens
  misc_feature (72)..(90): n is a, c, g, or t
ctagcgaacagcttcttttattcttgtttgaaagtatttttctgcttacaaaagtaacttatacttgatctnnnnnnnnnnnnnnnnnnngaaaagaaatcacacaatgttaaaagcaaagattcacccatttggccccaaaagccctgcggacagaaaaaagcctatggctgggttggtggcctgggaggatgcgcctgttgtcaaggttacagggacttgccgggcgccacagagcagggggcaaagttctccccagcagcctcaggaggccccgctgttaatccactgtcttctgttctgtctgtgcctgggtcctgcctgctccgtttctgctcaggctcctgaggggctgcctcaatggcccgctgggcctcggggtgggtctggaggagggccttggcaagggtggcggggccgggcacccccagggacatgacacagtgcacacccttgcgcttggcccccgccaccttggtgctgtctttggaggctgtgagcaggaccagtttggagaactttctgggcttcctgggggctgccgggatgacttctgtgcctggcttgggggatggctcctggctggccttcacactctcaccctcctgctcgctgggctcgggcaggggcatcccgggacccagggcctgtccctcaggccacactcagcccccagcaggtggatttctcctactcccaggcaaggaacctggagtccagcggttccgtccttgcgtctgagctagtgctggcgctgcctggctgggtggggacagcgatgtggagatgttgtggatcccaccgtcactgaggactccttggcttctggccgacgacagcggtgccctccctctccggcgacagcgccgcggcgggtccctcagcctccgcgccaagggccccagcctcagctcgcggtgttacctcaagccggggtcacagcgcgagcatgcgcagcaaggccgcg

SEQ ID NO: 441485 - DNA, 1258 bp, Homo Sapiens
  misc_feature (13)..(13): n is a, c, g, or t
  misc_feature (99)..(99): n is a, c, g, or t
  misc_feature (114)..(114): n is a, c, g, or t
  misc_feature (152)..(152): n is a, c, g, or t
  misc_feature (364)..(364): n is a, c, g, or t
  misc_feature (571)..(571): n is a, c, g, or t
  misc_feature (631)..(631): n is a, c, g, or t
  misc_feature (634)..(634): n is a, c, g, or t
ttatgagagtcantgaagacaacagtatgctatcagctgcaccatgtcgtatcgcggtgcaaaactccttaacagcggattacgcgtatatatgtcganaggagcgggagcgcncagccggcaccgacaagcagtagcacatggggatgtangattccctcaacccgcgtcaaggcaccgagcctcgcaagtgtacaattgaggtcaaagcaccagcccactttgtcaatctcttccaaggtccctcctttcacggaacacgggcttcagccagaaatattcccccatcaatcccggcgcctttagaagcaattttctcaaaagttccaatttacaatgtttcttctctttccttaagagacangaaatccatcaggtgaattttaccggcccccagcaagccgaagtacatccaggtgagcggggcccttaccaaatacacccttttgcccccgaagccttttcgcggattgttacagcaaagaattcccggcccccaggagggcggcccccgaaatgggtttcctcaagaactcccaggggaatgagggggggtgatgcgatccaactntgctgcacgtcagctcaaggcagctaaaggggcggcggggaccaccctccccgggtcccncancggcaaggattggcagggtgctggcgagggtggcggggccagccatctccagggacaggacgcagtgcacttcctggggcttggatcccacccccatcctcatcttggtcggaggctgtgagcagcaccagtttggagaactccctgggcttcctgggggctgccgggatgacgtccgtgcctggcttgggggatggctcctggccggccttcacactctcgccctcctgctcgctgggctcgggcaggggcatcccgggacccagggcctgtccctcaggccacgctcagcacccagcaaggaacctggagtgcagtggttccgtccttcacatgtgagtgagaagcgtcaccatcatcccccacacctgggtcacggcgctggcttgctgggcaggagccccgggggcaaatcccgtaacttctctgggctggtttcaccgacggcagcggggccctccctctccggcgacagcgccgcggcggatcctttaacctctgccgctgcagcagcgagcgtcgacctcgcggcccaggccgccgccgccaccccgaccccggcaccagctcccagccccgacctgcccctcgggagcgagccccgatcccgggaattccggaccc

SEQ ID NO: 441486 - DNA, 696 bp, Homo Sapiens
cggcaccagacctcttcatagaccaatttatcttatagtagagggatatgcctggcacaattccacactgaaatttggaatggaaactctgaggaattctacaaagacagataacatgccaatggaccactgactcatcagttctttaatgtctggtttagtttataaccatgtcacatatagtggcaacactgtcattagttgtattataaactccagaaatttgaatcagtatggttgaaacttttctcccataaaatatattactttaccctttctttgcacttgcaaagggaaatgcttagagctttcgtaatagattaataaactccctttctcaaattgacctataataaatggatgttattgccgatttcaagctatttccttctccttgagactatatcacaaataaaggaatgtgtccaccaccttttaaatcagaaatcaacaaaggaatcaaaatacaacatggcatatctctataaaaggagtaccatgcatccatcaaaatgatggcatgatgaaagattttcatgatacattattaagagaaaagcttggaatgtaaaataaagtatggatagtatagacatgcatttggaaggttgaatattttaaatatgtatacatagaacatatctggaatactatctaccaaacggttaacacgacactgtgttgagtgggattacg

SEQ ID NO: 441487 - DNA, 1155 bp, Homo Sapiens
gggatgaggcagtaaggacttggactcctctgtccagcttttaacaatctaagttacgccctcttctgggtcacgctagaatcagatctgctctccagcatcttctgtttcctggcaagtgtttcctgctactttggattggccacgatgggctggagctgccttgtgacaggagcaggagggcttctgggtcagaggatcgtccgcctgttggtggaagagaaggaactgaaggagatcagggccttggacaaggccttcagaccagaattgagagaggaattttctaagctccagaacaggaccaagctgactgtacttgaaggagacattctggatgagccattcctgaaaagagcctgccaggacgtctcggtcgtcatccacaccgcctgtatcattgatgtctttggtgtcactcacagagagtccatcatgaatgtcaatgtgaaaggtacccagctactgttggaggcctgtgtccaagccagtgtgccagtcttcatctacaccagtagcatagaggtagccgggcccaactcctacaaggaaatcatccagaacggccacgaagaagagcctctggaaaacacatggcccactccatacccgtacagcaaaaagcttgctgagaaggctgtgctggcggctaatgggtggaatctaaaaaatggtgataccttgtacacttgtgcgttaagacccacatatatctatggggaaggaggcccattcctttctgccagtataaatgaggccctgaacaacaatgggatcctgtcaagtgttggaaagttctctacagtcaacccagtctatgttggcaacgtggcctgggcccacattctggccttgagggctctgcgggaccccaagaaggccccaagtgtccgaggtcaattctattacatctcagatgacacgcctcaccaaagctatgataaccttaattacatcctgagcaaagagtttggcctccgccttgattccagatggagccttcctttatccctgatgtactggattggcttcctgctggaagtagtgagcttcctactcagcccaatttactcctatcaaccccccttcaaccgccacacaatcacattatcaaatagtgtgttcaccttctcttacaagaaggctcagcgagat

SEQ ID NO: 441488 - DNA, 269 bp, Homo Sapiens
gagccaccatgcccggcttgtcctaccttttacagatgaggtgggctcagaattctagactgcacttctctcagtaatttgaagccatgctctatcttcggacttttgttgttccagttgtgaaaccagttctctgtccaattgctctttggagagacattttaatctcttagtgttgctgttaggatcttccctgagtctgatatgttctgtggttcgactatgattattttagttacgaatttaggtttgtgtatcatgctttggac

SEQ ID NO: 441489 - DNA, 1503 bp, Homo Sapiens
aaggagcaaaaggctttattgataaatatgcagatatgtctgtccacagggacctgctgtggaggccatgaccaggctgcagacctcccactgcctgggttacagccaggacatggccctgtgcagaccctgccacgacagcccagccgtccaccacccgcctcatctctgccaattgtgctgggggcagggagaggcagaggcccgcctcaggcttcccaagccctggggctcacgggtggttccctcccttccaagggagtggcactgtgcccaggggagagccaggggatgggggcagaggagggagacagcagctgcttcagaccctgagcagaaaacccagagtgagcacagctggcagcaccagatgacagatctgggctccaggggcctccatggttggcccttgtggctcgaacctgcttcgggagacaggcagggtgagggccctgttcgccttttctctgacaaggttgcaaggcccgtgtgtggctgcctgctccctgggtaccgggaactggtggcgcgtagtgccctgaaaggcagggtcccttcacggctcacccaccagccacaccgaggggagggcccctgaagaaaatgacagcactggaaggcagcagcagggtgggggcctagtgctccaggcggggcctcttcccaggggttccgtgggcccatcagtcctggggtgttgggggttggttgatgatgccctggatgacaaaatctttctggattttggtctcctggagccgtgtgcggtctgtgagcagcttcccggagaagacccaccgctgccacgatggctcgatgccctcctgggcgtgcagctgcctcttgagctgccccactgtgtcgggcaggctggcgctgagcctcacgtccttgcccgtggacaggcgcaccttcagcgggaactcacggcgcacgctgggtggaggctcggggggctccaggctctcctcctccgtgtgctccagcagcaggttcaccggcggtgacaggcagtagatggggtagtcgctcttccacttaagccgctctttcttcaggggctcattgggtcctggctcgcttgcgggggtgtcccggggctgccggcctctcccggcgctgtctccccacgcagttgcccatgctggctcctcagccagtccccatgcaccggaggcggcggggtggtcggctgctcagcggacggcggcgtcccgggtcaatggctccggccgcccggcatcgggcgctccccgatctccccccgggggcgcgctcagccccagcgatggctccgccaaaactttgcgggccaggggagggagggaagtggcagactccccagcacggtcccaggtggccgggccaggggggcccgcgacggtgcccggccggagaccagctccgctggaggggcggagagagggggcgggcaccgccgcagctactcccggctcgctcggggcaccaggcaggggcatcccgagaattccggaccggtcc

SEQ ID NO: 441490 - DNA, 1242 bp, Homo Sapiens
tctctccgtcccctccagcggagctggtctccggccgggcaccgtcgcgggcccccctggcccggccacctgggaccgtgctggggagtctgccacttccctctctcccctggcccgcaaagttttggcggagccatcgctggggctgagcgcgcccccggggggagatcggggagcgcccgatgccgggcggccggagccattgacccgggacgccgccgtccgctgagcagccgaccaccccgccgcctccggtgcatggggactggctgaggagccagcatgggcaactgcgtggggagacagcgccgggagaggccggcagccccgggacacccccgcaagcgagcaggacgcaatgagcccctgaagaaagagcggcttaagtggaagagcgactaccccatgactgacgggcagctgcggagcaaacgggatgagttctgggacacagcgcctgccttcgagggccgcaaggagatctgggatgccctcaaggctgccgcctatgctgctgaagccaacgaccacgagctggcccaggccatcctggatggagccagcatcaccctgcctcatggcaccctctgtgaatgctacgatgagctgggcaatcgctaccagctgcccatctactgcctgtcaccgccggtgaacctgctgctggagcacacggaggaggagagcctggagccccccgagcctccacccagcgtgcgccgtgagttcccgctgaaggtgcgcctgtccacgggcaaggacgtgaggctcagcgccagcctgcccgacacagtggggcagctcaagaggcagctgcacgcccaggagggcatcgagccatcgtggcagcggtggttcttctccgggaagctgctcacagaccgcacacggctccaggagaccaagatccagaaagattttgtcatccaggtcatcatcagccaggcccgaccaccccaggactgattggcgcccaggaacccctggaaaaagggcccgctgggaggcactaataggcccacagccgtggcagtgtgcgcctatccaagttgatgataatatcactcaaggggggccttccccaatagggattagcatagaggtggtgaacccgagaaggggaccctgcacttcaagggggcatacagggcccacgcagtaccgggatagcagcggagggcgagcggcacaacagagggctgtagacacttgcccgaaaaaggagaaaaagagagcgctcag

SEQ ID NO: 441491 - DNA, 1113 bp, Homo Sapiens
ggtcagccaccgagagcacatccacatgaatgccactcagtgggaaactctgactgattttactaagtggctgggcagagaaggcttgtgcaaagtggacgagacaccaaaaggctggtatattcagtacatagacagggacccagaaactatccgccggcaactggaactggagaaaaagaaaaagcaggaccttgatgatgaagaaaaaactgccaaatttattgaagagcaagtgagaagagggctggaagggaaggaacaggaggtcccctacttttacggaattaagcagagaaaatgatgaagagaaagtcacgttttaatttgagtaaaggagcatgtagctcatcccggagcaacatcttccaagtcaagtactctggggaccgagtgcactgaagacgataggaagttcagcatcagtgaaacgaaaagaatcttcccagagctcaactcagtctaaagaaaagaagaaaaagaaatctgcactggatgaaatcatggagattgaagaggaaaagaaaagaactgcccgaacagactactggctacagcctgaaattattgtgaaaattataaccaagaaactgggagagaaatatcataagaaaaaggctattgttaaggaagtaattgacaaatatacagctgttgtgaagatgattgattctggagacaagctgaaacttgaccagactcatttagagacagtaattccagcaccaggaaaaagaattctagttttaaatggaggctacagaggaaatgaaggtaccctagaatccatcaatgagaagactttttcagctactatcgtcattgaaactggccctttaaaaggacgcagagttgaaggaattcaatatgaagacatttctaaacttgcctgagtttgaaaatttgttaacaatacattaaaatcttaaagcatcaaattggtgttcgccaaggcattatgagactctactgtgttagggtatattcttttgtataaaacaaacaggtttttgtattactggatagttagttgttcagctaaactttgagaagaaattaattatgtctcatgaggtatcctatgtttttggtcctggtattttgggttccttg

SEQ ID NO: 441492 - DNA, 733 bp, Homo Sapiens
  misc_feature (264)..(264): n is a, c, g, or t
agcagggagggagaacatcaggatacacataatataggccgtatacaggtattacattctgtaggattgagagctctagatagatcaactgttcttccaaggctaacatattccatagtcatttgaaatcactggttttggtgcaagtaattagtaaacctctgattgacaacgggttctactttttgcacaaaaatgtaggatgaccccggatagctggttatgaagtttccagtggcagttttcagatgttctagcaacacnaatggaacactgaggagaaaaattttgcatcgaccaacgcctgtcatctgttcgaccggcagcagcagcaacgcgcggccggggcccacgggccgcaccggtgggatgaggagaggccggtggcaactcgaggcggattcgagttcgggttcggactcgggttcggaggccggggtcgggctagggatcgggctgggggtcgcggtgttgggtctccgggccgccgccgcgcgcgacacctggcgggctccctccctccagtccacgccggccgcctgggcttgcagtaaccgccgccgtaggcgccgccgaccgcaccagcgcaggctcccgagccggcggcggggccggcggctgaggatgagctggggccgggccttgcggacccgcagccaagtggaacggcaggaaccccactttagcagcagtcccgagtccgcctcgagccgaattcgtgcagcccggggga

SEQ ID NO: 441493 - DNA, 1088 bp, Homo Sapiens
ccagggccacaaactatggctaggtacgtggctggggtgttaatcggcacgatggctgaggacccagcattacggactcgggactgctgctaaagtggggttcctgccgttccacttggctgcgggtccgcaaggcccggccccagctcatcctcagccgccggccccgccgccggctcgggagcctgcgctggtgcggtcggcggcgcctacggcggcggttactgcaagcccaggcggccggcgtggactggagggagggagcccgccaggtgtcgcgcgcggcggcggcccggagacccaacaccgcgacccccagcccgatccctagcccgaccccggcctccgaacccgagtccgaacccgaactcgaatccgcctcgagttgccaccggcctcttctcatcccaccggtgcggcccgtgggccccggccgcgcgttgctgctgctgccggtcgagcagggttttacttttagtgggatctgtcgtgtgacttgcctctatggccaggtgcaggtatttggttttaccatcagccaaggccagcctgcccaagacatcttctctgtgtatacccactcttgcttgagtatccatgcacttcactactcacagcctgagaaaagcaagaaggaactgaacaggggaagcccggaatttgctcaaatctcatcttaaccttgatgacaggcgttggtcgatgcagaatttttctcctcagtgttccattgtgttgctagaacatctgaaaactgccactgtaaacttcataaccagctatccgggttcatcctacatttttgtgcaagaggtagaacccgttttcattcagagttttgctaattacttgcaccaaaacagtgatttcaaatgactatgtagtatgttgtcttggaagaacagttggtctatctagtgctctcagtcctacagaatgtaatacgtgtatacggaaactattatagaaaggtgtatcgtgaaaaatgttcatcctcccctccttagtttcatacctgagccaccattttatatcgtagttggttaagtgctttttgggtttttattaacaccatgctccagccctgc

SEQ ID NO: 441494 - DNA, 1758 bp, Homo Sapiens
  misc_feature (463)..(475): n is a, c, g, or t
tattaaaacctggggtggtgaaataccgccgagtggagtgagaatttttgcccctgtggcgagagtgttgtactaagcctgggggcgatggagaaagagggaacttttagtggggaatggtaccaatttaggggcggagccttgatctcgcgcccaaacaggggcgcaaatagtggcgttgctttacatttcaagggggaataacagggtggaagacaaagttaggttgaattaacctgtggtggggacccgccaagatatagaatgaggcaagagggtgggtttcgtgcgagaacaaatgcggcgtggaggaaaaggaaggttttgccacaggggccaaaaaaggggaagggaagaatagttgtaggaaaggggaggaaaagtggccctatccactaatgggttttttgccggcaggaatagtaatccaatgatagtcaatggccgtgggaggaaaactggnnnnnnnnnnnnnggaagcttcttttggttccaggataaccttggtcaattcgggaaattccaaaataccattttccttacaggagtagaatatactgtatatccatatccatcttgttattgaagccttgatgagattttggcttaaaaggagaatcaggatccagatgctgaatggtgcttcagcaacctcacatgaagtgacttttgggtttgccacatagtctgagtttcttcgttgtgagcagctgggccaggccattgaggaacaccaacaagatggtcatggacatgacaatcacatagtggctgatgcttgtcccaatatcaagccagctgccataatccttgaccaagaagaaaaaatgcaaagccataatgtctgatatgacgagaacaatgagaaaaaggctttttgacgataactgagtagtcaactgaactgcttcaaaaggcacacataccaagaacaaaggggattaaaatcttccacatcatcagggctcccatcataaaaggactgaacacagtcagaaagcaatagacagaggcaagatcaaagctgttaatagaagctatatttccagttccaaaaaatgctgtcactaagaagaaaacaaggaaaaaggccctacggatgtcatccagatatagctgtcgaaactgagttatatcagtattataagagaactggatactggtgagcttttgtttacagcaaacaccagattgttgtagagtttcttgttctatgtttatccagacaaacatcaaacaagacaacactagtggaaagagagcttcataccctgtgcttagaagtaggtaggttgacatcaatgaaagaagtatgctgaacaatcgctgaaagagaactggagaactcagtagtggcacaaccaaggaagaggctaatgttgcccagctaataatttgattcatgagaggcagtccttgcttcctgagtagactactctgagtgctatacacaacatacatggagagcactgtgctcagcacctgtaacagatgtaccaatagctcttcctttataaagctatcttttcttttcatgagagatgttacaacacacggggataacagaagaaccagcaagcctgcacccatcactagagagatgtctggctttcgacctacaaccggcatcagtgggaacactgccaggagcaaagagaagaaagtccaactcagtgaggtcatctttgctcgagtccacagccgagtgagaaatggccaagctgcaaaggcagtaagtccagcggtaagcatatagcg

SEQ ID NO: 441495 - DNA, 1455 bp, Homo Sapiens
  misc_feature (330)..(352): n is a, c, g, or t
agcacagtttgaaagcaaactcaggctttaatgatcagtttcctgttccttggtattttctttcaagcaaaggccatgtttttgtaatactccctttcaatggactgttctttcggccccagcaaacattcctgagtggtaggtttgaggaggtgttccattttattgtttccggtgtccaataaccttggaggagtatctgtcttcatgccctccaaggccatgttatttcagaaagttccagcatttgaaatcattctctaataaaagctagtgccactaattctaagtaaagtgagctttacaaataagaccagctatgaatgtttnnnnnnnnnnnnnnnnnnnnnnncgaacttcatcatcaggagtccataagtgcaaactgtatgcagctgaacttcaggaaagcatccatttaaaaagatatcttcggcaaattcatctaaattagctaaaaatgcttgacacgatgaacatgttgtgtctctaggccagtattcaatccaggtcaaggaatctaaagggtagatgtacctgaaactgaaattgtattttatctggagggcttctttacccataattaagtactgtattccttttaccagctcagcgttagtacaggttacctttttaatgaaggtaatctcagagtctttatcagcaacagcttccccagttttgtagatatccagaaggggttgccttgtacttgacaaaaaccattttctacagtgatggatgtgatgctaactttataagcatatgcaatctctggtttacatgctgtttgttttcttgtctctgcagagattgtcagatccaattcttcctgcatttgcccacaatcagcttctacacacttgcacgcggctccttcacagactttctgaattttgatattggaagtgctataaaacatggtacactgtttatctggtctgtggtattcgtacactgtgaaagtggcaggactgagaaacccaacttcaaagagttcaaatatccggaatcgtacacaaaggaaatcactggagggaatcgaattcagttgcagaataacatgtccatctttgatttggtaatcagtgaatagttgatccaccccttccacaagggcttttaagtcttcttcatttgcactgattccagtaggcaaggagatgtccatcaccgcatgagaggatccagatgatgattcttccctgctgggcttgtagctggcacatgctactatgcgtttgtaatcagagtttccgtagcctctgtagtgggatgcttcaatatcctgagtatcgattttcaaataaaagctgcaaacttcctcagaggtactggttttgtgaactacagttgttacatgtactgtagccaagccactgccaaatcctgtactgacaatgaggtcatcattgagaagcacctctactggcctcccaaggaaattcttgtctg

SEQ ID NO: 441496 - DNA, 666 bp, Homo Sapiens
  misc_feature (597)..(597): n is a, c, g, or t
  misc_feature (625)..(625): n is a, c, g, or t
  misc_feature (646)..(646): n is a, c, g, or t
cccgccgccaccagcgggtgcccgcgacagtgcggttaagaggggcggctgctgtaatgcggggcgatcgacctcacgaggacgccccacggcctgtccggcttgctgggcttgtccatgcgctacaacagcctctcggagctgcgcgccggccagttcgcggggttaatgcagctcacgtggctctatctggatcacaatcacatctgctccgtgcagggggacgcctttcagaaactgcgccgagttaaggaactcacgctgagttccaaccagatcacccaactgcccaacaccaccttccggcccatgcccaacctgcgcagcgtggacctctcgtacaacaagctgcaggcgctcgcgcccgacctcttccacgggctgcggaagctcaccacgctgcatatgcgggccaacgccatccagtttgtgcccgtgcgcatcttccaggactgccgcagcctcaagtttctcgacatcggatacaatcagctcaagagtctggcgcgcaactctttcgccggcttgtttaagctcaccgagctgcacctcgagcacaacgacttggtcaaggtgaacttcgcccacttcccgcgnctcatctccctgcactcgctctgcctgnggaggaacaaggtggccattntggtcagctcgctggactgg

SEQ ID NO: 441497 - DNA, 1691 bp, Homo Sapiens
  misc_feature (1374)..(1385): n is a, c, g, or t
  misc_feature (1404)..(1404): n is a, c, g, or t
  misc_feature (1425)..(1448): n is a, c, g, or t
  misc_feature (1636)..(1646): n is a, c, g, or t
ggacggccagtaactataccggcgtaatggtagcgaggcctgggtggcgaattcggcacgaggatcagctcaagagtctggcgcgcaactctttcgccggcttgtttaagctcaccgagctgcacctcgagcacaacgacttggtcaaggtgaacttcgcccacttcccgcgcctcatctccctgcactcgctctgcctgcggaggaacaaggtggccattgtggtcagctcgctggactgggtttggaacctggagaaaatggacttgtcgggcaacgagatcgagtacatggagccccatgtgttcgagaccgtgccgcacctgcagtccctgcagctggactccaaccgcctcacctacatcgagccccggatcctcaactcttggaagtccctgacaagcatcaccctggccgggaacctgtgggattgcgggcgcaacgtgtgtgccctagcctcgtggctcaacaacttccaggggcgctacgatggcaacttgcagtgcgccagcccggagtacgcacagggcgaggacgtcctggacgccgtgtacgccttccacctgtgcgaggatggggccgagcccaccagcggccacctgctctcggccgtcaccaaccgcagtgatctggggccccctgccagctcggccaccacgctcgcggacggcggggaggggcagcacgacggcacattcgagcctgccaccgtggctcttccaggcggcgagcacgccgagaacgccgtgcagatccacaaggtggtcacgggcaccatggccctcatcttctccttcctcatcgtggtcctggtgctctacgtgtcctggaagtgtttcccaagccagcctcaggcaggtcagaacagtgctttgtcacgcaagcgcaggacagcaacagcagaaacagaccatgcatcagatggctgccatgtctgcccaggaatactacgttgattacaaaccgaaccacattgagggagccctggtgatcatcaacgagtatggctcgtgtacctgccaccagcagcccgcgagggaatgcgaggtgtgattgtcccagtggctctcaacccatgcgctaccaaatacgcctgggcagccgggacgggccggcgggcaccaggctggggtctccttgtctgcgctctgatatgctccttgactgaaactttaaggggatctctcccagagacttgacattttagctttattgtgtcttaaaaacaaaagcgaattaaaacacaacaaaaaaccccaccccacaaccttcaggacagtctatcttaaatttcatatgagaactccttcctccctttgaagatctgtccatattcaggaatctgagagtgtaaaaaaggtacaatcattggannnnnnnnnnnngtaaactaaaatgtttaanataaaatagcatttacagttnnnnnnnnnnnnnnnnnnnnnnnngggcggccgcctcctaagaatcccctcgaggggcccaaggcttacccgtacccagcttctttggtacaaagtggcccctataatggagtcgctattattagcctagcactgggccgtcgttttacaacctcgctggactgggaaacggctagcctttgggaaccctttggggaaggaacttaacttcnnnnnnnnnnncataattgggacaacctccttacggaggattaaaggtcttagggg

SEQ ID NO: 441498 - DNA, 632 bp, Homo Sapiens
  misc_feature (450)..(450): n is a, c, g, or t
  misc_feature (462)..(462): n is a, c, g, or t
  misc_feature (524)..(524): n is a, c, g, or t
  misc_feature (530)..(530): n is a, c, g, or t
atggggtatgggcagtgagatgcttttagcagactgggatgcgcctgggtgtacatttgaggaagatcaccgcaactatgggcacagaatagttgtgggagatgcgtctcccttcctcatccctcttacactcaagaaagagaagaaagtgggctggcttaggaaagttgccctggggaggggaccatgcgggcagattcaggaaccaattaggagggaatagactgagtgggagaagattaaagttggtgacgactctcaggttacagggtcagcttgggggatagggaagacggagacttcgtggttcagatgtcttgagtctcaggggctcaggggacagccagctggaggtttgtgctcattcattcacgcattgattcatcaagcgaacaatttgttaattcactttccattcattcagtaaatattaatgacctactaggtggngcttaaggcggngctggtgggcctgtgagagcaattatggtccagctctactgaggccttgaatgtcagaacanggaatntgggctttggcctcatgcgagagggcggctgccatatatgggcctgggcagggacagatctgacagggatctagcccttgccaccaggcatctagggctctt

SEQ ID NO: 441499 - DNA, 408 bp, Homo Sapiens
ttttatttgcaaaagttttatttttaaggatcaaaaataaatactgcacatatacacagagaaaatccactgatatttatgttctttgacgcacactttcaatacatggcaccttcatcttctttattgagaaaataaactgttatgggtccataactggtatgcacagtctctgtgactctggcaaataaccaggagccaagtccatataataaagttggaataccgaggttgacgaccttgagcgccgtgaagaagcggttctgccgggccaggtcctgccagggagccttggagcagtggtacttgatgaaggggaagcagccggtgcgcaggacgtggtagttggcgccctgcaccggccagttgaagtgcgagaggccgaactggtcgttgcggacggcgctg

SEQ ID NO: 441500 - DNA, 922 bp, Homo Sapiens
  misc_feature (614)..(614): n is a, c, g, or t
catgttggacaggttggtcttggtgatctgcccaccttggcctccaaagtgctgggattacacgcgtgagccaccatgcctggccctctctactactaccattctaatccaagccaccaataactcttgcctagacttctgcaatgacttcctaactagtcttcttgcttccactccgcctatctatgtaaaacaaatctttagaattccaatttcaaatatcattaaaatcagaaacaccactgtcaagcatgaattagggaagagcaggaaaatcaaagataataactgggaattaactttcactgtcattaagatttagtttaagttaaacttgtactgttttcaaaaggggagctagtggcattttggctgaagcaattcttccccctacagctcatcagtactgcaaaacttttagcttgcctggccaatagtctgttacaatccaaaaggtaattccaaacatcctgactccaccccaatctcctttgagaagcactaagttaaaattatgtcaatataagcctgtggtaaaatcagggtgaggttaaataacaagtgagaatcatcctaaccacattaggactaaataaacacacgtttattagcanaacaaagatccatctctatgatttccttccattcacccactaagctcccaggatatggcagccaagagtttggaacaatctcctctagggaatttgatcacctcaagaggaaagacctaaaaatactgatatttggggttccccagtgaaatattccaataagattaccctcagtgaggctcaatgttgataagccacagccacttgcttggctacaaatcaacattttaatctctcactcttaaaacaagaacagacagttgaaggggatgagaaaagcagatgtgtgaagggctctatgttatccc

SEQ ID NO: 441501 - DNA, 1076 bp, Homo Sapiens
  misc_feature (899)..(922): n is a, c, g, or t
agactccctgctgctgtcttccttactacatcacatatgtctctctccttctcaacctttccccttacattgaaaacttcttctcacaaatactatatgagggcacactacacagttggtcataaatgactgacacgtgaatccatacacaatttggagatgggttttcttgggtagctgtggttctgatctgaaataagttagaagagaatgttgatccatcctcccagagccatggtacctcagtctggggccgagaaaggcctatccaaaatgaattatcaggttgggaagacacttgttttactataaatccctactcaggaagctgaggtgggaggatcacttgagcctgggatgtcgcggcttcactgcactctagcttgggcaacagagtgagactcaattcatttgagctgtctatctttaggagattagagcccagttgccagcattgtcttttacttccatcccaggaatttagtgacatgctgaatagataacagctcttctcatatatatccaattaggaggtcaagggctggaaagaacccctgtggttttgacagctttggtaggagtcacactgtcttctaaagatgattgtgtgggttgactgtggttctctttatttcttgatagaaagtagccattctccaatgtgttgcttcctgaattggatctccaaatagcttcacataccaacaataataatagtgacagaaaaaatgtcattctgctgtgtttgaaaattaaaatcccaaaacccaaatgttattggaataaaagaatacattattgattaatgataaatagatgatatattgctgtggagagataaagacgattgatagaatagatgaaaagaaatacataacttttataaaggaggtatagtnnnnnnnnnnnnnnnnnnnnnnnngaaggtggagaagaagaaatagaatgagggaggcagcaagaggcaaatgtcatagagtcaattggacccatgacagatttgaaatagcaacatctttcacctttcttctgttatttaaaaatgagagatccttgagaaactgcccagtacctcc

SEQ ID NO: 441502 - DNA, 702 bp, Homo Sapiens
  misc_feature (454)..(454): n is a, c, g, or t
attaacagcaatggaatgaaagtgagagaaacttaacaagttttaccttagagcaaggtaaagctttaaagagagcatcattagagcctttagagttcctcctttgctgtgtttaattcaaatattagttgaaataaaaagcagtactgagttatattccatcaaatgattcttcatctttagaaaacactaagacaatttgcctgaactgaatgtttaccagtttttattgctactcctcctcctctctccaaataaacaaaacaaataaatatccaagactgcaagattacttcatcttccacaggtttgcatgtacaggcatacctcggagatagtgtgcacttggttccagaccattgcaataaagtgaatactgcaataaaatgagtcacaccaatttttttggtttcccagtgcaaagttatgtttacactgtattatagtgtattanggcgtgcaaaagcattatctcaaaaatgtacatacctttaatttaaaaatactttattgttcaaaagtgctaatgatcatctgagcctgcagtaagttgtaattttttgctgatggagggtcttgcctcgatgttgctggctgattagcaactggtggttgctgatggttggggtggctgtgagaatttcttaaaataagacaacaatgaagtttgttgcattgcctgactcttcctttcatgaaaga

SEQ ID NO: 441503 - DNA, 727 bp, Homo Sapiens
tcagaggctaacagtcagacagagaagatggtggggaaaaatgggtcccaggtggaagaggagggaagcagagagggtgaggtgcagagaacacgatgtctacagggagcagaaggtctgccaatgattgcagtctaggctatgacggggaagggaaggacaccaggttcatcgctccgggcttcacaggcacctacttgggatgcttgaaggccatcaggcagcgctcgtacttccccaccatgctccaggccatgaccaggccatcagtgcttcctgagaggagatgccactggtcaaagaacaggcatttcacagctccctcgtggccactgagagtctttaccaactgggccatggcaatgtgccacactttcaccagccctcgctcacagctgctcacaatgtaggtatcattgatcctggtggccaagatggggtctttgtgtctaaacgtcttcaggcacttccctgtgtctacatcccatactgaacaggagggagagagaggaagacatgggagtggggaaaaagggggaaaaggaaaggttacagtggagttctgctccccatcacagaagcaaagactcatcaagcccatcaagtcagattctagaaggacttcccgtggcctagcacctccgcagagcaggctcaccaaccgctcatgtgcccacagcacagagcgccctgaatacaggtggttgagggagcccacaatccagaa

SEQ ID NO: 441504 - DNA, 543 bp, Homo Sapiens
  misc_feature (91)..(106): n is a, c, g, or t
  misc_feature (508)..(508): n is a, c, g, or t
  misc_feature (517)..(517): n is a, c, g, or t
ttttttttggagtcaacacttttaattgttcaatattttactacaaatataagaaacaatacagaattaaataacacatgaaaatcttgcnnnnnnnnnnnnnnnnaatatccaatttaacagcgaaaacaacttacactttaattcctaggccactggatagacacagacaaagcagaagatactgaaaaagcaactaattatggttattaaagattcaacatcattccactagctggaacaatatctttagaacaaagggattgtatgctcatatttgcctcctctgctattgggaaaagttaacgcatggaaaaagaagccagcagagacaaagcatatgaattggctgactgctatacaggaaatctcctaaacatctgttttcataatgtattttcattatatgaggctgaatttagaatgacgtaaaataggggctgggtcatgttataagacaaatgggacagggagggcatgcttctcaaaaaatgtgaggctattgtcntaagactancatatttatctagctataaaaataag

SEQ ID NO: 441505 - DNA, 422 bp, Homo Sapiens
  misc_feature (12)..(12): n is a, c, g, or t
  misc_feature (21)..(21): n is a, c, g, or t
cacctcccctcnaaaaaatangtttacctccgctgtttcacttgtattttgtgtatacgaaatggcagcttccgatttctagttggatttgtcttgcattgtttgtataacttgctggtcacccagggctatttgctttttcattgagaaatttggtaggggtgtctagttcagcttttatgttgatccatcctgacttattttagacattgaatttatctcaccacaagtaaaagaacatgtgtattgactgtctttgctaagtttcctaatttttcctaattatggcaattatggatgtgaataagaatactgatgctgtacaaatatttttgtggaaatgtaccttgttaatgtgactatttaaataatatgaaaataagaatactcttgaagaaaaaattaaaatatttactctttgg

SEQ ID NO: 441506 - DNA, 787 bp, Homo Sapiens
  misc_feature (12)..(12): n is a, c, g, or t
  misc_feature (24)..(24): n is a, c, g, or t
  misc_feature (44)..(44): n is a, c, g, or t
  misc_feature (141)..(198): n is a, c, g, or t
  misc_feature (217)..(233): n is a, c, g, or t
aaaggcctatantttgaaaactgngccttaatgatggcagtgantttttaagtgtggtaacaaacgttttgggagcatgtaccctctgtcaagatggtactagtaacagattcaaagtagtacccatatcgtatcagactnnnnnnnnnnnnnnnnnnnnnnnnnnnnnnnnnnnnnnnnnnnnnnnnnnnnnnnnnnagagcgaaactccgtctcnnnnnnnnnnnnnnnnncaacacccagatagatacacatactccttcagacttacagacctaagctgcatttatggggtagtgatgaggtttagaacatatacatattttgttaaaattccccagatgattcttggtatgaacgactatattataaattttaagatgtacttagaaatccttaagacatctagccccgtctctaatagacaacacatttatattgcagatattacttttttttcagtttatgaccaggtatttatgaaggactattggcagggaaaatatgaatatgttaactttagcttatggcatcaatttactaaggaacaacaggctcaccaactgatgtcaaacataaaaacccccacatcagtctgatacgatatggtactactttgaatctgttactagtaccatcttgacagaggatacatgctcccaaaacgtttgttaccacacttaaaaatcactgccatcattaagcatcagtttcaaaattatagccattcatgatttactttttccagatgactatcattattctagtcctttgaatttgtaagggg

SEQ ID NO: 441507 - DNA, 560 bp, Homo Sapiens
  misc_feature (421)..(469): n is a, c, g, or t
accacagtttctctctgcatttttcctctttgaccactaaccatgtgaaattctcatattgacctttataatgatcatgaactcttagtatcattgggaaggccacatttgccacttatgattgtaaaccttatcctccatttttcctgttattgttggtgcaaaaagcacctattataccaggactttaaaaatcagtctgataagtctttgataagtctaataataataactgataagtccattgaatttgcttctgattactttttctttagtagctaaacatgtatgtactcctatgattacaatgaacactcctctccatttaaattaattatttacattgatgaaatagctgttaatgactaaatactgtcttggttttttcgttccaggtcagtcaatattaacttcttataannnnnnnnnnnnnnnnnnnnnnnnnnnnnnnnnnnnnnnnnnnnnnnnnaatttcaatggcttttggggtactggcttttggtcatatagatgaattctacagtagtggtctgagattttactgcaccggtcacccggtt

SEQ ID NO: 441508 - DNA, 522 bp, Homo Sapiens
gcacgaggagagacagaggtccgtgcaggatgcctcatcactgggtttgagcttttcagcaaaattggtggggaagacatctgcacagaattagaaaaataataaatgcagacatggtaccttagagtgctggaaaaggcaccccaccctcggggaagctgatctgagaggcatgcagggcgtcctggtgtggggagctgtgtggagagtgcgtctggaggcagtgagtcttacttcctgactttgtagccatgcagctcagcagcctcaggaagactcagctccctgcaatttgctttacaggtactgctctcgggcgtttagacttccacaatggggaagataaaagaaatacattttaatttctaggaaaatgaagcatgtaaaaataaaatcacttgctctatccagtgtatcatttgcttttccagactattttagcagttacagtggacaactgctaagcacacttgactcattcatttgtagatttcattataagcaccacaattaacccatctt

SEQ ID NO: 441509 - DNA, 862 bp, Homo Sapiens
cagatttagattagaataaaaatttatttttgtaaagaattatattttgtatttgcaaaagctgaaaatgctcataaaaattaccagcccagagcttggatttccaccggatccaccacgtgagacaaaagagtctgtcacttcttcttgccaggtttgagggccttttctagaccttggatgtgttttcgagggagctgatactcttcaagcaatagccagccgaggtggtggacctggtttccctggatctgcacctgaaggctgtccttggccccaggggcaggattgacggtggtgctagcctggcatcgctgctgaaggatggcagccactgagtatgggtccagaccataggcctccaagttccggaccacggtcacctttttattagacgctctttgtgctagggtgatgtcaattggacagattctccctttcttcacaatgggctcttgtccgggaagggtcacttgataggcaggctgtaatttttccaaacacctggtcagaagactgtcccatggaagcttcatgactgtatgctgttcatttttctctaagatgcagtcacataggatgggatccaatctcacaagatttttgttgtctgcatcaaccaggtcatttttcttggcgtagttaatgacgatcgttcggacctcactgccctccagaaagctccccttcctttttgtagcttgacttctttatgtccagttgtcgtccttcggggcagcaggagaacatgtggctgccaaggaaagtgctggtgagtaaagggaggtcagcctttttgactcggcacttcaaggcatgtaagaagcattgctgtaacagctcatccatttgttcttgaagc

SEQ ID NO: 441510 - DNA, 1212 bp, Homo Sapiens
  misc_feature (341)..(341): n is a, c, g, or t
  misc_feature (422)..(422): n is a, c, g, or t
ccccccccttttgggtttaaggtttccctctttcccccccgggaaaaaattttgggctccccggggcggccattttgctggccagggaaaccttaggaagaagccttttttggtagggctggaatttcctttaatgttcccagttgttcgttccctttggggggcaggcagggagaaaccatgttggcttcccaaggaaaaggtggctggtgaggtaaaagggaaggttcagccctttttggacttgggccactttcaagggccatgtaaagaaagcattggctgtaaacagcttcatcccatttggtcttgaaggcgtttttgctatctgtggagtcttngtttcagggcccctggtgctggtgtcttctggggcttctgagagagacttgtcttcacgtgcctggtgaacctccccattnctcctctttcccctcccagggtcatgtgcctcatgtctccctgcagggtggagtccatctggacagaccccttctcttcactgagatctgctgaatccagggccagtggagcaatggaaggtggagaggacttgtttccagaccgccacaagtggtcctggtaagtgtggagcacagagaagccccttcccttcaggcctgacgtgagcatctcagctgtggacatggctgcaactccaatggctacaggggctctgttccccaccaaagaaatggcacagaggtcgcccttctgtacctgaggcagaccagcagggggcatcaccagtccaggcagcatcaaatctgctccccctaccagtttctcgagcaccagaggccatgttgtaaaggttggcagaagatcaggataggaccacagcgtgtacactgttggatacagatttttctccagttcaaagaggatggggttaccaccactcacgtacacagtcactgcatcccctttgtgagcatacaacttcacaatgttgagctcctcctttccaggtactaactcagagacttgatcagttccaagggtggggaaagcagttgtcacatcagctcgaagctttctcctgtccgaccccttgatggccgtgttggacttgacccgaaaggccttggcaaacatgtctgctggggtggcctggggaagagagcacagaagccagggaatgtcaagaaagcgagggcgcagcagctgccaggccctcagccgtgatcccgggaattccggaccggtcca

SEQ ID NO: 441511 - DNA, 578 bp, Homo Sapiens
agttggagagcgggagttgggcattctctttccccaaagttggaggctgcacaggatgcctttaaaaagctgcgctagaggtttaggggggaagagtgggatagacggtgtgggagagttggtttccacgctcctgtaggagggagttcggcttggggaagaagagctcagagtcctttcaaccttcacccccgcggcaggttccagcaaggcagccagcttcggtgcgccaagggcgcctctagcctactcgaagcaaatctccagcccggggcccctgtctactaagttcctgcaaagagatcaaaggggccagccttttccacctgagtcccctccctgcgtgaaccttcgccagaagctgggcgaaagcactccgaacaagcgaaaggggtcaaggccgaggctggattccagatgcaagagggccccgcccttgggtcctgggtctgaggtcagtcgtaggggtgacaacttcaagcagagttccttgagctcatcagtgaggctacatttgagttttgccattccccgggaccttacactagaaagcgatccacgttgtcacccactcgtgc

SEQ ID NO: 441512 - DNA, 681 bp, Homo Sapiens
  misc_feature (51)..(258): n is a, c, g, or t
acgccacaagcctgcgcacttgttggaaagggcgatcagttcagagcagtnnnnnnnnnnnnnnnnnnnnnnnnnnnnnnnnnnnnnnnnnnnnnnnnnnnnnnnnnnnnnnnnnnnnnnnnnnnnnnnnnnnnnnnnnnnnnnnnnnnnnnnnnnnnnnnnnnnnnnnnnnnnnnnnnnnnnnnnnnnnnnnnnnnnnnnnnnnnnnnnnnnnnnnnnnnnnnnnnnnnnnnnnnnnnnnnnnnnnnnnnnnnnnnntatagctgggttgcagctccgttctttgccaggaggtggtaatagaggattccacgcactcagaatgcctcaggccggcgcctgtggcttctctcaatggagggaagtgtcctgcagggggcgctgttggtccttcaggcaaggtcgggttccctcgaagtctctgtcttagcagttgctggtcttcagaaacattgggcaccaattttctcatttgtgctgtgtatctttaggcaagttgcttcctgtctctgagcgtcgtctttgtttccgccttcctgggcctacggcaggcctgattcctccaggcagtgtccagagttccggacagatggaaaaggaagagagaatgggtgtcacaaaggtctgtccactcctgggcctcaggcttgggggccctgctcagggctagcctgtttgctc

SEQ ID NO: 441513 - DNA, 1115 bp, Homo Sapiens
tggcacgaggctggaatgtagggggtcaggaatccttggtggcccccagagaaggttggggcacagtgtaacctatataaggaaggatcatactcactctttacatcaattagcaaaattttgaggaaaaagaatctcacttttaaaatgtaaatagctcttcattacccctccagacttaatcctaccagtaactcacaccttagtgtgaaattaataaacagcagctttggagatagctggaggtttgacttagaggaaaaagtaatttttgtagcaggacaattctgggaagatttgtatgggaaggagaaggtgcaagaagagagatccctaactaaactctgcagtgtcccatgaagtcctggtgcagagcattaaaaataatcatttcataaacttctttcaggaaccttggtagaggtggtggatgctacctaccctgatgctgtctctaattagagaggtttgtaaagattcctttgttgcaaagtgtaacacagtgttatttcctcatgagaaatttattggctcatctacatgaagttttttctaagctttcccttaagaactaattgtattaaattattaccatgttgagttttaatctcattgttcatcctttctaaaaagaaatgctcagataagttgagagtaaggttaaatatatgagcagttaagtactcatacatgattacagcattctaagagttcaaaccttaaaaattatcagtgctagaaatcgacaaatatattcaagtatacaaacattcaacagatatataaacttagtatccctctacatgctgatatattttcaaataatgtgctttcttttcattgaactgtggtatgatgagaataacatgtcctcgggaattagagaacttagtttgagactatggatttctcaatcatgattttgggtaaaaaaattagctgctttatgtctcagttttgctatgtgtgaaaggaatggctgggatgataattgatagtattccttttagtttccaattcatatggtcctattatataaatatttagcttaatattgcgaaactagttttatctattatatcttttggaatataatctggttttttggatatatt

SEQ ID NO: 441514 - DNA, 1070 bp, Homo Sapiens
  misc_feature (61)..(69): n is a, c, g, or t
  misc_feature (73)..(73): n is a, c, g, or t
  misc_feature (124)..(133): n is a, c, g, or t
  misc_feature (156)..(169): n is a, c, g, or t
  misc_feature (183)..(334): n is a, c, g, or t
  misc_feature (403)..(417): n is a, c, g, or t
  misc_feature (424)..(526): n is a, c, g, or t
  misc_feature (597)..(621): n is a, c, g, or t
ccaccaagggggccaaaaggggttttgttccccccggggggggtatttcgggtgtttttannnnnnnnntttntggagggggttttccccattggggggggaaaaggggtttttaggaattttnnnnnnnnnnttctttctaataaaaattccccnnnnnnnnnnnnnntatttttttatttnnnnnnnnnnnnnnnnnnnnnnnnnnnnnnnnnnnnnnnnnnnnnnnnnnnnnnnnnnnnnnnnnnnnnnnnnnnnnnnnnnnnnnnnnnnnnnnnnnnnnnnnnnnnnnnnnnnnnnnnnnnnnnnnnnnnnnnnnnnnnnnnnnnnnnnnaaaactttggccccgtttcttttcctttgggggcccgcgccccaaaaaaagtttttaaaaaattttttnnnnnnnnnnnnnnncccaaannnnnnnnnnnnnnnnnnnnnnnnnnnnnnnnnnnnnnnnnnnnnnnnnnnnnnnnnnnnnnnnnnnnnnnnnnnnnnnnnnnnnnnnnnnnnnnnnnnnnnntaattttttcatttgctttaattaattcatgagttaagttaaaaagtcaagtcgaaaattttagctggtcnnnnnnnnnnnnnnnnnnnnnnnnnacaaaaatattacagcagtataagcaaaattggaaaggaagagatgggaaaaacaagtagatgctaaaatgggataggtgaacttcaggtcatcatggttattgaaggaactgtaaattcttaagcttctagattttaccgctcttcagaaaacatttaaggaggctgcctttccccatgaatgagaaatgaaacgttccctaagcatttgagtctaaagacaagaaagcattgcttttcctactggaaaatatctctttacttcccattgcactgccctctcccgtccccctcgtagctttatgggatcaaagagagagagaagccatgagtttccaccagcagcagagtgagtcctgagcacaacacagggctgtcagtgacattcagactcactggcaatgggtccaactcatcttgaataaaatacacaaagaaagaaagagaga

SEQ ID NO: 441515 - DNA, 534 bp, Homo Sapiens
taagaatattttttggattttcacagctgtcaggaaagctttagaaagaaaagatgggtgttaaaagttaagacacagcttaagacagaagcattgtaaaacaggaacaaatactggcttaaacctgatgtctctaactatattcctctattttaagaatgttttagtatctgatagtttcatcagcctttccattttccaatatgtgacctttattcccaccatgtcccaaataaacgagtcctaggatttcctagaaggtggacctcaattattgtgtcccttttatatataaggcaaacattgcttttaagttctgttggaacatgggaactttcactagaatgcttagaatgttcagaaaaaatgtcccaaagctctcttctggtccatacaagacaatcagaatgtaacacagtagcagagggtgtggaacatacactagtcatatttgattctctctgtcaggggttcttaattgtaatgggaaataataagaatcaggctagagccgaattcgtgcagcccggggaa

SEQ ID NO: 441516 - DNA, 1102 bp, Homo Sapiens
gggcaaaaccccggaatttcttctggccggaatttgtgggttacagtgctaagcgttccttcggcctggggtggtccctgcatatcccctttggaagattggtggggacagcggcgggttcccgggggccccgtaaggaagaaggagagactttcacttggatgctgggggtagtgactcggggagggggctgcatcttcagaagccttcttttctggggatcagtttctgtcagaagcagggccagagtattctgatcccacttcccgccaccccacattgcatcaggcctccatctgggtgctccagttcagatgctaggacctcagagggaaggcagagatagaccaagtggggagtagacaccctagggcctggtgtacagaaagtagtagagaagcccttccagggcaggagtttgagacagcggcctggaagttagagttggaggcaagttctctttgtccagttcctttattgggggcagggcaccaagaagaggccctccgctccccaaacccagaggcaaaaggggttggcacgctccctcccagcctagtccttgcgtcactgtccatgggcaattcctctgccctgcatcttcaggccatgtcaggtagaggtatccatctcagggacctcagtggacacttccgtgggcactgccagccgcctggggggcacataggatcccatacccgctgccctctccgcctcttcctgactgtagggctcgacgctcagctgcttcagccttttcttgtggtctttggatcggaagtgggtcttcaggttggtggaatcgatgaagtacctcgcgcaggccagacagcggtgcagaccgccccctggcaggtcggggtcgaactcggcgtttgggtcgggctggggtcgtgcggatccctgaggccgcagctcgcggtgaatctcatccaagtccggccgccgccgcttcgccttcatctgccgggctagagagtgcgctcggtgcgcgcctgtccggcgggagcgacccatggccagaaacagcccggccggccaaggggccaggagcagggcagggagcacacgtgtgagcacttccgggccgatcagctacccc

SEQ ID NO: 441517 - DNA, 2264 bp, Homo Sapiens
  misc_feature (15)..(15): n is a, c, g, or t
  misc_feature (24)..(24): n is a, c, g, or t
  misc_feature (42)..(42): n is a, c, g, or t
  misc_feature (59)..(59): n is a, c, g, or t
  misc_feature (68)..(68): n is a, c, g, or t
  misc_feature (80)..(80): n is a, c, g, or t
  misc_feature (87)..(87): n is a, c, g, or t
  misc_feature (117)..(117): n is a, c, g, or t
  misc_feature (135)..(135): n is a, c, g, or t
  misc_feature (153)..(153): n is a, c, g, or t
  misc_feature (162)..(162): n is a, c, g, or t
  misc_feature (174)..(174): n is a, c, g, or t
  misc_feature (380)..(382): n is a, c, g, or t
  misc_feature (2010)..(2135): n is a, c, g, or t
cctgggaaaacaaantccaaaggnaaaccaaaattttaaccntgttgaaacccctaaanaaacgaatnaagggggaacangaaaaantctgtgggcccgctgtgccagggtgacccnaggccccgatggcaacanctgcagtccctttggttncccaagagnagaatgtccccngggaggaggacacaacgtcaaaccgtgaggccagctgtgtccttttgggttttccgtgaggcaggggtatgaagtcagttgtttcgtttgtttttacatagcaacagtaaagaccattcactaggtccccccgtcagtgtgagcatacccagtatgctagagaattgacacgaaacctttaaatcaaggcctctttcattaccaannnacaaacaaaaaaagggaacaaaatacgatgggagagggaagagatgatgccgaagtgtcatcctgactgactgtccctgcagtgcccatggcgtcccgtgccttattcattctcctctctcatttccacgatgtctgtcacctcctctgtcggaggcatgtctgtcatggcagagtcttcccccgtccgtggccgactcattctgccatcttctttttctgcttccggtagacatagcacgcagcgatggcgaccatggtggattctcccacaaagcccgccaggagggagcccacgcccagggtcgcaccgtgcacccccaggtagggtaggaccacgaggctggcgatgaggacgatgatccgcagcacagagctgggggcaaggacgaaggttttcttcagtgtcatcagccacccggtgagatgcgccctcactgtgactggaactgggaagaaggagaagatccgcaaaggaacaacacagagttctgcaaaggcaaagtccactccgatgatgtctatcaagattttctcagacacgttgggtgtccaaaacatcacgaaacagagcgtgagtgacagagccatgcagacgaaggtgaacttcttgatgtgggctgccgtgactgtgttgctcgtgctcaccagtttgttgctggggttattcttgtcgaaagcaggatacacagcacggatttccgtcaaccagccgtatggcatgtgacccacagggtatgtggctgttaaaatcgccactgcctctgtggctgcagaactgccaccaaggtcccgggaaacaaagaggttgacaataggccgactgattctctgtgtggccagaattagagccaaaggccaccagaagctcagcatctttcttattgttgcatctcccccccagctccgggccacttctgtcagggatgatgtcgtgaatgttcttgtagtagcccaggcacagggtggtgcagcgcacaagtgcgcccatgtacaaggagaggatcgggatgagcaggggctcccggcattccaggtgactgtgaagccaaatggctactaaaacaacctgagctatgacatctgagattgaggcacatcccaccaggaaactgtatttgtgttttaagagaatgccagcatgggtccatgccattgcgtccatgaaaggaaaggcggcgaggtacaggaaggcccttctcgtcttgctccccaccgactcgtccacatggtgcagtttattgataatgtagtatcctaaatcactataagctatcagtgtgtgaaagacggcagcgatggcccctgccaccaccatacacaggacggctttggtcctgtctctcttgctgttcacaaacaccaggcccacatttttgaagtcactcatgggacccgtgaagaacttcatgagggagtacgccagcccgtagctggccagcatctcgactgcatcctccttgacagcagcaatgccccggttcaaggcctgctccccgaagtcgatggctatgttggtgatgcccaggggcaccaagaaccggatcaggggccagtagtgcgtgagcgccgggaatttcaccatagtccccgccgtgggctgaccccacacacatctgctgccgcgannnnnnnnnnnnnnnnnnnnnnnnnnnnnnnnnnnnnnnnnnnnnnnnnnnnnnnnnnnnnnnnnnnnnnnnnnnnnnnnnnnnnnnnnnnnnnnnnnnnnnnnnnnnnnnnnnnnnnnnnnnnnntctccgagcgcggctgctctagcaggggatccgcaagctcaagtccatccctgctgccctcccacacaacaaagatctgccgggaaaaaaaagaggagggacggatcccgggaattccggaccggtcca

SEQ ID NO: 441518 - DNA, 1448 bp, Homo Sapiens
  misc_feature (1280)..(1297): n is a, c, g, or t
ttttttttgtattagagacattttattgaaaatgcgaaaataggaaatgtattatagcctaaaataaattacataacatatacagcatatatttatatctttaaaatatttttttgtttaggttctttcagtctaggaattctgactaaatcaatttagtgaaccgtgtctataatttttttaaaggaaaaaacctgctttccaaaacttagaaaaatatactgcactgcatggatttcgaatgcgttatttcagggaggaccacatagtgactctggtatcgttataaaatgtcttgctttatcgtatggtgtgggagggaagtaccgtagtacattctcaattacctgtaccgcagagttatgactaaggatagcagaaccaggtaatatatctacttcaaaagttaccctacagcaacctggcattagaatgctggatgagacttaaagcttcagttcactgtaaaaactaaaatgcaaagttaggatgctccatgtgactcgctctaatgcgaccttcaggaaaggcgagggaaaagcaagccttcaggaaaagtcatgcggcagggtctggaatctggagatgcgctttgtgacaatttaaaaaagttagctcatgtatatacacggtgggggtgagaactgacagcttgctcagatctaggagaacgcagagtgaaatgctatcattcaaccatgtcagtttgctgcccccggggcatttcaaaccaaacctttctacgggagattctgtcccatctgtcagcctgctgtggtcacaggtctccgttcctcagtgtgaacggggactccgggctgcagcgtgccacccgcctcctgcatgtgtggagtagatggtttcgaactccgtggcggaagggaaatttaagaggccaccggggctccatctctttgtacggccatgtgactgggaagcaaatcaaaggaagccgagttttaacctgttgattcttaagagcgatgaagggggacaggagagtctgtggcctgctgtgcagggtgaccgaggcgcgatggcacagctgcagtcctttggttccaagaggagattgtccaggggaggaggacacaacgtcaaccgtgaggcagctgtgtcttttgggttttcgtgaggcaggggtatgaagtcagttgtttcgtttgtttttacatagcaacagtaaagaccattcactaggtccccccgtcagtgtgagcatacccagtatgctagagaattgacacgaaacctttaaatcaaggcctctttcattaccnnnnnnnnnnnnnnnnnngggaacaaaatacgatgggagagggaagagatgatgccgaagtgtcatcctggctgaccagtccctgcagtgcgccataggcgtcccgtgctttaattcattctcctctctcatttcacacgatgtactgtcacctcctcagtatatgaga

SEQ ID NO: 441519 - DNA, 706 bp, Homo Sapiens
  misc_feature (121)..(121): n is a, c, g, or t
  misc_feature (281)..(281): n is a, c, g, or t
aacccactgaactatccggtatcccaggaatgaattcagaatattcttcaaacagcgactgtacatttaagcataggattatctcttaaagtcccattccaaatatactgaaacagacacncccaaataatctgtgaagtatggttcagacaggctagaatccttagaatccatatccacccatgagaaacccataaaagacatcaatccaatgatgaaaaaatgatcttccaataactcaggagtgggtcatccctcacctggatgaacatcatggaganattgaatcctatagggggaacaccagaaagccagaaaacgtggaatactgccagcctccaaccaaattacctttctccagttttaggtaaaccttatcctctttatctaggtagagcaggacaccattcgtggcagcttcacgagtaacatctttgtcccccgcaaaggcagatattactggttttccatttaacatcaagttaacctggatagtttggctctggtagactttaatcacgtgaaaactgaaactgtaaattccttttcttggtgctacaaagacagactccaatgtgaaaaaattacccacattcaccaggatctgatcgaagtaaatgatgcgcgtcttgttgctcatctcggatggctcgtggttggtgctccgcaccgccgagaaggcgaccttggagttggccgcccggac

SEQ ID NO: 441520 - DNA, 523 bp, Homo Sapiens
ctgcccgccctcacatgaggctcctgttgtatacataaggtaatgtgaaaagctcacatgtggacactactctgtgtttcggaacatagaaatttctacgccatgcttcttggcaagtgttactgttggctggcccgacagactcatggtgaaccagactttctctttttggtgttgctgagcgacggtagtttgcaaattctccaatcaagtttgggcctcaatatgacatcctatggggcaccgccactgtcagtcctttctctaattgccattcacgagtgggacttagaagagttttgcttttttcttcatgtcgttgcgtctccaaagaggtaacctgtcaaactcctgtatggacattccaaagatttcccgaaacacttcaggggctaagtggcgctccagcctggttctgtccacctctctgaggattttgtttcgccctctgttggtcaccatgagcatttcatatggaaatatctttggttccaacatgttgggcatagacactcctcggtcc

SEQ ID NO: 441521 - DNA, 2107 bp, Homo Sapiens
  misc_feature (720)..(755): n is a, c, g, or t
  misc_feature (1274)..(1275): n is a, c, g, or t
  misc_feature (1991)..(2004): n is a, c, g, or t
  misc_feature (2035)..(2043): n is a, c, g, or t
aaagtgtcagcatttcttcataagtgttttaaaatgttctccagcattttatggctcctccctcccatgtcctcagacccagcaaaagcgtagaggcagaattagaggcctctccaggccagctcctctgcccacatgtcatacaaggtgtgaatttgagcacagtccagaaatggagacatcccacccccagttgaataatggcccattcatgccaaccttgccaacacggagagggcagagatgcactagaagaccttcatcctccccttcctctgccccaagtcactacagttggttctattgaagccagtctttaagaaacctgggttaaagacaccagcacttctgcttgctgggctggctggacctgtgaagccatgggcaggtagtgccctcttgagagtcattttatttggccaccttcaggtgagactatccatagacacatgctaggataggccccgctgggagggcagttacaggagagagtaggtggtggtgacgtgagggctgtgaaggatccagagacaagacttagatgtttcgttcattcactcactcattcagttactcctaagacttttcagtttcataaggaatagtgttgcctgaggccctagggaatattggggaatagaagggattgaggaaacattaataatggttattcaaaagacccaaatgcttatagttctctctcccttcttctctctctgnnnnnnnnnnnnnnnnnnnnnnnnnnnnnnnnnnnngtgcacattcctcccttacatgctcatttgtgccttaaatgtgccttataggtaaatccaggatgactgaggaatccctcgtcactgggagattttgtatatattcttttattattagattgagttgggtgtggggaaaaatttttttctgaaggctcaaaagtggtttcctaaaagtgagccactatcagatttgcacatcaggagaaaagaaatagggttacgtccattaggaaaatcccagtttgcaggagtgcaatcacatcaaaaaaacaaccagccaggattaaaggtattataaatcctcatagcggaacatttctcagggcaaaggaacctggctcatttgaagattaatgttccatgcctttgtggtcaaacggtcagcacttaacacaggaaaaaactaggtgttgttttgttttgttattttggacaacataaaattcaggaatgttttatttagccttggtttctagaaggaagggaaataataatttcttgagcatttactagggnntgttgcgtgctgtgctaagtaaattttaagtctttcagttttatagatacggaaaacaagggtgactctttaccacaggatgaataaagaactaagtaatatgggaatgcagcaatttctggactagctgagccgattccttcctgtgagcacactgtaagctttcaagttctctgggcaggaattacagcacctgtcccctgcaatggccctgctgtgtgatgctcatcgcttcccttcgtgctggagcagtcccccaggtgtccatctcctatctttttgttccaatcttctgtgagttccagctagcaggctttacatctggggaaaggaaaaccaggggttttagctctgttctctgctcccatccttcgctcaccagctgagtgagaacatgaactttttgcaccatgtacccatggcttacactacttagaaaatcaccttttcagataaaacagtttatgagttcatagagaacaccagcactctttgacaaaactgtgagtgaccctttttaaacaatgctgagcaggccctgagctataatcaacggtgagctttaatgtctatgctgacagttaggttttgctctcttttgtaacaggttacgtagaccagcagtgtttaaatctaaatacgttgtgagtctgttatctgtcctatcgcgttttttaaatgactttttattctttatcatagctaagtaaataccnnnnnnnnnnnnnngctttgtaggacacttgtacttagtttgggnnnnnnnnntaaattgaaattgttatgcttttgtatttccatttcttgcaaataaaattttttcttaaatagt

SEQ ID NO: 441522 - DNA, 1170 bp, Homo Sapiens
  misc_feature (569)..(597): n is a, c, g, or t
  misc_feature (1076)..(1116): n is a, c, g, or t
gggtcaccgccttaggttttaaccggggagtcctaataggtggccccttataggttcagtttatgaattgggggccctttaacggaaaaatttatgagggtaggttcccgaagagagcatttcttagaatagggttttgccttggcctttgaatcaaggtcgtttttagggtttcagttcaaatcgggatctcggatatcgctatcgggtcaatcgtgttattcataagggcttatctcgattaagacctatggtttataagggattttattgatcaagctttatgggtgaatttgtacgcagtattacagctgccaatttggcaatgcacattcaggataggcgattgcttgaaggccttatcggtcagggcctatttgctattaggagagttggccaaaaggggatttattgcaattacgtcaagttgggtaacggcaaggttttgccagtcgagtcactgtaaaacggcgacaggttattgaaacacgacgcggtatagggcaactcagggaattggcacccccttcagtatagggtgaattgggtttcggtgcttttcctcgagnnnnnnnnnnnnnnnnnnnnnnnnnnnnngagggttattttatttaaggcagaaacatgaaagcatcacgttatacgtgctacttgatggaaatatgctatccattgagtcacagaaatgttgacgaagaaagtgagttacaaagaaagaacatgaatttgcctggatccagtcttcagactttatctttcattttatgctacctccctgatggcagtgaacagcacaaggtagtacaattttaaggtgtctcagttatgcattttagcttcatcctaagtataatttatcttaggctatctatgtacttgttagcatagatagcaaaggaacaagcattactattagatttctaatcatttgcttgttatcctgtcactgacattacagctactagcacaaatacaaattaagtcatatgcatcaaatccaagactttaagccttatgtttatactaataactaatatttattatttgctatgtgctagaaactctaagcaatttannnnnnnnnnnnnnnnnnnnnnnnnnnnnnnnnnnnnnnnncctcttcacaattttaagaggaaaatgtttttcccaacttgtagatgaagaaac

SEQ ID NO: 441523 - DNA, 845 bp, Homo Sapiens
  misc_feature (296)..(304): n is a, c, g, or t
agccaagtaagcacatggcaaagccaactaaagggccaaaggttgcaggttaatttaaaccccggaaggcacacctttgaagtttgttatttaaattatgaaaatatttttaaccatatatggttaaacattactttcttagtgaattttcaattacctaaagtcctttatcttcacaaatactaactcccattatgtaaggcatggttaacaagtttgataatgaaggtattaattgaggttttgaccatatgtaagttaatgtgttgaaaacttcaatcacatgacaatcctgnnnnnnnnntctcagtgccagcccctcctccccccaggttgatacctcggcaatacaattcaacaatatgcaacatgccctcaattttattttgttttgggggaaatgtgctgaagaacctagagctttttttgtttagcaccttatatcaaagtaatgaaaatgggtatgatgattacatgtgcaaatgtacaaaatcattaactctacaaagatacatcattccaaaattacagaaaaaatttaaagcatgcatttaattctttttctttaaagggttgctgaatgcttcccctgaaaaaaggtggctgttttcaaaatcagcaactgctggtgaggatttcttggcacagttatgaccagcatgttattgctgcatcttcctgataatctcagccgactccgggggatggaaattgattgtgtggtgccgcaggccctgagctgtcttgtaactcttcccacagcgacacttgaatggtttgcggacacgaatctgtgttctgtgaccattcttagcgtgatactttatgccattcacattcttgta

SEQ ID NO: 441524 - DNA, 1030 bp, Homo Sapiens
aggataccccgtgggataagcaagagcctggtaatatctgcggcatggaagtactgtacccctgaccagggtgaaagtgtctaggtctccatgacaacctccacatgacatcagcacttcatgggtcatcagttactccagcttttgttgaatttgacacatcacttgaagggtttggatgtctttttttgcccagtttggcccctcataatgctcctacaaataataccgttacaacaggtcttattgatggggctgtggtcagtggcattggttctggtgaaagattcttccctcctccctccggcttaagttactctagctggttttgtattgaacattttagttctcctccaaataaccaccctgtcagacttcttactgttgtgcgccgagcaaattcttctgagcaacattacgtgtgccttgcaatagttctatcagcaaaagaccgatctctgattgtttccaccaaagaggaactcctccaaaattatgttgatgattttagtgaagagtcctcattttatgaaattctcccatgctgtgctcgctttcgatgtggagagcttatcattggtggacagtggcatcatttggtcctggtaatgagctaaggcatgttgaaaaacagtactgcagtccttttatacttgatggacaagcttgttaaccactgtaaaagccttcattaatgtccacaagactcgttggaattttgggtaccttttgggggtaccgtgcctttccctttcgtaagtttcaaccaaggtgaaaggttttaattaacttgaacgaaatggaatccccattggtttgcccttaaaggtaaggtttaaaacaatgtgaattaaatggtttaaaaaaaccgtaagtaattgcctttaaaaaatggtgtgttgcgaaatttggtgtaaaaattaaccttttttaaaatgggattttaaaggaacgtccaattggtattaaaaattgtgatttacccgggcgataaatattttttaacccattttggggggcacttgggctg

SEQ ID NO: 441525 - DNA, 600 bp, Homo Sapiens
agccgtatacttaccagtttgccacctcccttcccccgtctgccaagcagaccccactttcaagccactgctgcaccccagactcttgacagtgacatctttaccttctctgtgtctttagaaataaaagaagatgatggtaaaggttattttagtgcagttcccaaagataaggacagacagtgctttaaactacgccaaggaattgataagaagattgtcatctatgtgcagcaaacaactaataaagaacttgccattgaaaggtgttttggtcttctccttagtccaggaaaagatgtacgaaatagtgacatgcacttattagatttggaatctatgggcaaaagttcagatggaaagtcgtatgttattacggggagctggaatccaaaatccccacattttcaagttgtaaatgaagaaactcctaaagataaagtcctgtttatgaccacagctgtagatttggtaataacagaagtacaggagcctgttcgatttctcctggagacaaaagtccgcgtttgctcacctaatgaaagattattctggcccttcagcaaacgtagtactactgaaaatttctttttgaaacta

SEQ ID NO: 441526 - DNA, 587 bp, Homo Sapiens
  misc_feature (385)..(458): n is a, c, g, or t
tctattgagacaggtgctcagcgaactgtagctctgaatattatagtggcaagcactaagaaatgaacagctcatcatgacctgaacagaaagataataatcaacagttcctggtccataagtaggtgtctgatagatacagactcagtgaatgaatgactaaatggatacgaaatactacaaagacgcatcttgaaagtatggagctatcatgacaatagaaatatcaaccaacgatttacaatataaacacaacaacatgtgaaggtgctataataacattaacagctgaaatttatcgagggctaactctatgccaagtattgtcaagcattctcgtattcacgcctcatatgctaaggcaggtgtaattagttgccttcannnnnnnnnnnnnnnnnnnnnnnnnnnnnnnnnnnnnnnnnnnnnnnnnnnnnnnnnnnnnnnnnnnnnnnnnntattttctcttagcaaactacataaaaaaataaagagcaactctgcatcctgaatgtcatgcctgagatgagcttgctgaaagcgcagcagagacagcagccctctgctggcccaggcttctctctctc

SEQ ID NO: 441527 - DNA, 858 bp, Homo Sapiens
  misc_feature (22)..(22): n is a, c, g, or t
  misc_feature (36)..(36): n is a, c, g, or t
  misc_feature (48)..(48): n is a, c, g, or t
  misc_feature (65)..(65): n is a, c, g, or t
ggttataccttggcggacgtgntctgcaaactgggngaaagattgccnctacctaaccctggacncccggacttggtctggaaggattactattaatggagaaagccccaaaacatcggtcatggcatactttaacaccctatagcctgatgataaacttttccctatgtggtggactaagtgcagataatatccccattaagtgatggttggattcataatgtcacaacaaattgttggaaacaacttacacatttacctaaaacaagacctaggttatggcacacagcctgtttgggaaaagaaaatgaaataatggtatttggtgggagcaaagatgacttacttgccttggatacaggtcactgtaatgatttattgatctttcaaacacagccttattcactactcaggtcatgccttgactgcattggtaaaaattctatcatgttagaaagtcagatatctttattacctcctaaacttctgcaacaagtactcaaaaaaataacattttgggctgcagctaatcaccgagaagaacaaagagtccaaaaagaagaaacagaaaataaatatcagtggatcagtagcaattaaattgttatatactttacatatttagtatgttttaactttttaatcagactatacatttacactcccaaattgcaggctttatttaaaggataaaatttaaaggataaaaaaacagtcactctgttaagtgactatatgccatgggatatatggaagatattaatgcagattaatttatatttgtaaacaaatttccttacaaactgcagaacaaatattctttctgaaagtaagtacagttataacagtttttctgtg

SEQ ID NO: 441528 - DNA, 1286 bp, Homo Sapiens
  misc_feature (231)..(232): n is a, c, g, or t
  misc_feature (239)..(239): n is a, c, g, or t
  misc_feature (241)..(242): n is a, c, g, or t
  misc_feature (244)..(245): n is a, c, g, or t
  misc_feature (247)..(247): n is a, c, g, or t
  misc_feature (250)..(250): n is a, c, g, or t
ttctcgaaaaatccctctccggggctccccgcccccgggggccatatacttaatttggcgtgagggatctcccaagccccctttgttcggggccgccgggatctctcctagggaaaaccagcatttgaccccagtgttcactttccctttcgtggggccccgccgcccccaaacggaatggttttagaaagcttttttgagggcccgaaggcgggccgccaatttcttctnntcttttngnntnngntgntaccaaaagtcctaaaagtttattgccagaatagcaaacttcataaagacaccttaaagtacatcgaatatgacaagcaaaataaacagaaaactttgaccaaagaaaagattgccgctgtcatgcacagtcaaattaataccaaaccaaacaagtacatcgaagagtatatgggttatacaatccacactctgaaactaaaggagactcattccaaaatgcttggttttgggttgggggtttgagaggggggctggtgctgggagggtaattttctcctaatacagaatatggaaatatttagatgagaagcagaatgactaaaatatcagtgatccatttaatttttatctccaagaatagaaaactgtattataggcttccaaaattaaagaattgatcaaaaatcgaaacacagaagagaagaaacaaatcctaagttcgatttgtgctattgttacaactgattagcacttcagacgcactgcatccaagtgtactacttatttaagatgagctaagaagataaaaagccagaacagcctttactatttgatttcaatcatggctatattttctgtaagcatagaatgtcctatcactctactgcaagcaccgggattttcttttctattatttaataaagtggaaattcatataaatgaagtcaaggtatagcaaccactcccaactgactactagtgcccaatagaactactgctaaatgagtaggaataagagtaggaagaattccctgtggcgtcaaagcttcctctccgggacccactgcgggacccggagcgagatccggagcgagatcccgagcgggagccggagcgggagcccggagccgaagacatgttgtaagggctgggtaagccctggacgacacggaggcggcttccagaaggcgcagcccagtgatatcttctaccatggagcgatttatggcatccttataggatatttttaatttggttttggggcaggtcaggattttggcatagctgctggtgtcttgcagcctctgtgcggc

SEQ ID NO: 441529 - DNA, 879 bp, Homo Sapiens
  misc_feature (31)..(31): n is a, c, g, or t
  misc_feature (35)..(35): n is a, c, g, or t
  misc_feature (54)..(54): n is a, c, g, or t
  misc_feature (62)..(62): n is a, c, g, or t
  misc_feature (69)..(69): n is a, c, g, or t
  misc_feature (87)..(87): n is a, c, g, or t
  misc_feature (92)..(92): n is a, c, g, or t
  misc_feature (151)..(151): n is a, c, g, or t
  misc_feature (201)..(202): n is a, c, g, or t
  misc_feature (210)..(211): n is a, c, g, or t
aggctatagcaagtgtcataatagaccgagnggcnctgtattaaacagcaaatnaccattantgtaaangaccacatatgcatgtanacttnaatgttattttagaaggctgcttgcagagatatacatgtgcaaagattttttaacgtgnaagcttatggtaggtagcaaaagcaagtgaagatcagcataaagggaaannaatcatcnnacatgaatagctctggcataagtggattataatattcactctgatctaagcagtatttttaagtcagttctcaaactttggcatcagcagaagggagagtaggagaggagaattcagtatcctctggcttgatgtggtggctcagaaatgttagcgggactctttattctttgcgtctgctttcttgggttttggctcctttcttggcagatttctcctcctgtgatcccatgctgcctcttggtttctgttttatattcagtaaggaagaaggttattcacttctgaacccttaaggaaagtcctagtcttctttataaactggttgataaatgtcttatgacatcactgtggacagtcatgtatgaaccttggctcttctttggagcctggcgtctagcttcccgtcttctgcagatggagtttgattctccttcatgtccctcattatgaaggcctaactctgtttcttttccctgggaatggttctacttcagcttcccctcactgctctagttttaacatcactcttaacttttctggaattcatagatgtcaattttgagatgactgggttactttgttgttttttaatataatatttcatgaagaatttttatgtttgtataggagtgttaactttttccctgcagcccgggggatccact

SEQ ID NO: 441530 - DNA, 881 bp, Homo Sapiens
  misc_feature (79)..(123): n is a, c, g, or t
aatgcagcggactcggtaggagtgctttttaactaccagaccaggctggggtgtggcgctgggctgtctgactattgannnnnnnnnnnnnnnnnnnnnnnnnnnnnnnnnnnnnnnnnnnnntgaggtatgagacaataagagaggtggtctccttccttattcccccctgtgagaatctcacttattagtgggagttctcattctcattttcactacttaggtcttcctgcaagacagatggataatgattcatgtaatacatttgagccttatctgtacttgctagtttcacattccttgaggctcagcgagtttctgcttcacctccctcgtgcagctgcaaagttacaaggtttatacagaaacatggtttcccaaggatttggaacatgtagtatagataaatgtaaaagactgatcaactgcctttgttcttgcttctctaagtgtgcttcctgcatcacgtagctcccagccactgactgcttaaaaggtggctgctttctttgtccagggctcagactttcctgtacactaatcctactgagccaagtgatcatcttttaataaagacctttcctgaactcactttttttggtctctcccatctttgattgtcccgcaacaattataactattaaacagaaactgttttaactttttgccctactcagtgacctgatgaatacattgggaacagtcctccatgtggggaaaatcagtggaagtccttattacataagtccaaattttaaggagaataagtcccacgatgagtttcctcatgctttggctgtgcatagatgagtcagcttctgggtgtgactgcagcagggcttgtcgtccttctcagagtcactttgcaggggttgtctggg

SEQ ID NO: 441531 - DNA, 609 bp, Homo Sapiens
  misc_feature (50)..(151): n is a, c, g, or t
acgactcctctgaaaaaggagtcaacaggctggaaaaggtggctcacacnnnnnnnnnnnnnnnnnnnnnnnnnnnnnnnnnnnnnnnnnnnnnnnnnnnnnnnnnnnnnnnnnnnnnnnnnnnnnnnnnnnnnnnnnnnnnnnnnnnnnnaagtaaagaaaaaaggaattagcacacatataatgtgcatagaagagcccctgacatgcaggaggctctcagcaaaggtgactgtcaagtctcctaacagctccccacgcaaaggcatcccccatcccacccccagagacaagacggttgcttttcattgtaggtctttacttacattgaatttttttaaatgcacatataacttctatggaaactaaattataaagaggctcaggctcctagctagggtgccccatcaccagatcctagcctccagaggactgtggtctcagcgggagaaggaaatcaggccccctccctgctcagatccttgtgggagcagggtagggtgaaactgaaggtgggcacgggcagccggatgctggagttcctcctcagcccgtctcaatgcctgtattctcaggaccctagaacctccatggggctcccagcgcgcc

SEQ ID NO: 441532 - DNA, 520 bp, Homo Sapiens
ttttttttatgttttgaacaacttttactgctcgtaagtacaggagaaacagaagttaaaaaattaacaaatactgggaaagttacagagttacaataaatcataaaagcactagtaaatagttatccctggtcatcattcagttacatttggggcttaacctgctttcttttagcccctctccaaactcccttcttagatgttggttcctgggagcccctgtccagtcttatctgtgttgggtgatagactaggctactcagactctagcacgaggtagattcacgttggcaccactgctgtgtctgaatcccagattgttccctctggccctgggtggaactctacttctattctttagccaccctggatccataaccccctgagtaggaaggcactttcctatctggcctccaatatttctcctttgagctcgaggctatctggctttaacctttaattacctcctttatccctttgtgaggtttctctagttccattcctgtaacttcgtttctct

SEQ ID NO: 441533 - DNA, 440 bp, Homo Sapiens
ttttttttatgttttgaacaacttttactgctcgtaagtacaggagaaacagaagttaaaaaattaacaaatactgggaaagttacagagttacaataaatcataaaagcactagtaaatagttatccctggtcatcattcagttacatttggggcttaacctgctttcttttagcccctctccaaactcccttcttagatgttggttcctggggagcccctgttccagtcttatctgtgttgggtgatagactagggctactcagactctaggcacgagggtaggattcacgttgggcaccactgctgtgtctggaatcccaggattgttccctctgggccctgggtgggaactcttacttgcttatttcttttaggccaccctgggatcccttaacccccttgagttagggaagggcacttttcctatctgggcctcc

SEQ ID NO: 441534 - DNA, 554 bp, Homo Sapiens
tcagagcaaactttaggttttttattaggcttttgacagtactttctgagtatttgagcaattgatgggtttctctctgataccatcttgccacggtgccaaacagcacatatgcattttaaaaatgtaattcaagctctaaggagtatgagtttgtattcagaatgcaatttaaaatctacctacctatctacctctctatacgtatatacagtgactactttgaacagatccacataaaggagttggagtggagaacagtttcacaataaataatcgcttctctaaactgtacaaaatcctaccagcaaatcagccactttcatttcctcatgataggtcatcacttttatacctgtaataacttatgaaatacacacagaggatttaacatttggtcaaggccaatgctctgtcatacaccatcttaaatgtctctctacggggccctggacacccactcaaatgccgtttcctatctctctgttgactgggttggggagatggcacccctcccctggcaggcgacttttcatggtgggatacatctccac

SEQ ID NO: 441535 - DNA, 920 bp, Homo Sapiens
atgctaatttaccattttattctgtcaggtacaggtgaaacaaattctcatcttgaatgatcagatgcaaaatcatttctgaaccctagagcagaagttagaaataacaaaatggccgtttcaaccttgactggccaaaaataactaataaacttttttgttttaagtcaggcaagtgattttctacatttagcagtttgaaagtccagtgttaatgcaatatttctagtgagaaatgcttgttattaaaagcatgggagtgatagtgtgaaatggtggtgagtgcttctatcatattactgtaggtacttggactggtgcaaacttgattccttttcatccccctgtttaggagctattaaaatattactgttaaaaatccaaaccattctttgttccatgtaataagaaaatagccaaaatcactttagagcttctcaactatttatgaagagctatcctgcttttattgaaagtcactagagttgaatgtggtaagaaaccacttagcctatgtattggacgagaaaatcagtatcatgataaaattttgaattaagagaacccttgtagagtttttaaaaaaatgatttattttccaattaggtttaagaaatctatgttatgcagggaggcatatcagatgaatgttgtagcagacaaaagttttaaatcgtgttagacttgaattcatcaattgtttgaatgagggtgggtgggtagaaggataacaaaattactgttagtgtttcttttcttacggaaaaagatgtgaatcccagccttatttcagggaagcctttgaagctatgatggacataagtctaaattaaatgtatgtatgtttcattatattgctcttaagactactgaggtggcagtttaattcttaaaaacaataaaatggaagcataaatact

SEQ ID NO: 441536 - DNA, 608 bp, Homo Sapiens
aattatatataaaatcacaccataaataatacatataatatacttagctcagtttatggatcacagtaatagttcagcaattgcatattattattattgataatagtaaccgttattatgcaattgctccgtattgctcctcatcctgtgttcccattcttgataaatgttaccaccattcgaccaatttttagaccaatgtcctgaattatcattgacacatcttcactcatcttatttctatgcattgccgtattcttaagttcaagccaccatcatttcttccttgaattactgataacttcttccttgaattactgataaatgttaataaattagatataattcattttcataattccttgaattactgcaatagctaactcatctccctacatttcccttgcatactgtgcaattcatactcataatagagctggagagaattttggaatatttaagtctgatcatgttacctcttgcttaaaatgtctcagtagcctctcataacttctaatatgaagtctatccttgatatgagctataatgcccagcatgacatgtcctattgccttcccctgtgccattcatctcctctatatcccttg

SEQ ID NO: 441537 - DNA, 688 bp, Homo Sapiens
  misc_feature (61)..(328): n is a, c, g, or t
  misc_feature (372)..(577): n is a, c, g, or t
ccggcaaatagtggactctgccaatctggacaacactcaaccttattcggggcattcggannnnnnnnnnnnnnnnnnnnnnnnnnnnnnnnnnnnnnnnnnnnnnnnnnnnnnnnnnnnnnnnnnnnnnnnnnnnnnnnnnnnnnnnnnnnnnnnnnnnnnnnnnnnnnnnnnnnnnnnnnnnnnnnnnnnnnnnnnnnnnnnnnnnnnnnnnnnnnnnnnnnnnnnnnnnnnnnnnnnnnnnnnnnnnnnnnnnnnnnnnnnnnnnnnnnnnnnnnnnnnnnnnnnnnnnnnnnnnnnnnnnnnnnnnnnnnnnnnnnnnnnnnnnttggcttgttgtgagatctattatgtgtgttagccaaatataannnnnnnnnnnnnnnnnnnnnnnnnnnnnnnnnnnnnnnnnnnnnnnnnnnnnnnnnnnnnnnnnnnnnnnnnnnnnnnnnnnnnnnnnnnnnnnnnnnnnnnnnnnnnnnnnnnnnnnnnnnnnnnnnnnnnnnnnnnnnnnnnnnnnnnnnnnnnnnnnnnnnnnnnnnnnnnnnnnnnnnnnnnnnnnnnnnnnnnnnnnnnngcttgtggatgcatctcctggtctctccacccatcttcacatgcgtgccttcccctctgtatctgtcttccatacagtctcttctaatgccgaattcctgcagcccggggg

SEQ ID NO: 441538 - DNA, 819 bp, Homo Sapiens
gaggtttttctgtacttttaatgagctagaaaatgcatactataaatagaatatacaaatgatttttacacaaatgaagcattaaaaatcacaaatcttatatttggttatccacagtctataaaataatgttcccaaattatatagtttaaaatacacaatgtttcaagttgcaagacaaaaccagggtagttttggccctaaatcatagctaacataagtaggaattataattaattttataattgtgtttaaattttaaatactctagaatctgaaaatattaaatattaaatagatggagggatcaaattatcaagttttttaacaaaattgaggtaaaaatctgcattaaattacaccaagaaaaacatttctaaaacattgtttccataactcattataaatatttcatcttccgaaagtactctttgattacctctggccttctgggtctggtaattaagttgacttactatttgcacatagctactgattactcaatacaggcctatcagataaaactaaaatgctgcaacttaatcagaatgatgcaatcttgtcttatataaatatacaaatcacagtatgctgacactagataacttcagctttatttgccaaaggggatttagaatatactacaaaattgtatataaaataaccctttacaaggatttactaggatgactgcaaagaaaggcaaattaaatatacctggtcccatataagaattgttgcctaacctcatatactaatttgaatatgaagactcactttttatttcttatttttttgaaacagggtctcgctctgtca

SEQ ID NO: 441539 - DNA, 1641 bp, Homo Sapiens
catggttcagctgtttattgtctccatggggtgggtgaagaggagtggcccagctgagctgaggaaggtgaccactgagaacccattcaacctgctgagcaggctgggcagaaaggagcaggacttgggacagacgactgaagatgcagagaccccatgggccccacccctgggccttcctcccatgtggctgcaggccatcctctctgatcactgctgggttgcttcctggttaaagggccagaaggtgaaggagatgggcttttcaggcatcagaatgaggttgaattgtggtgcccacatcgctgaggtgttggatttcaactctgaagttctccagcatattgatgaggaagatggtcatctctagctcagcgatccgccgtcccagacactgccgcacaccccagccaaagcccaagttccggaagtaggtgatgttcttgtctttgctcagccatcgggttgggtcaaaattttccgggtcgaagaagaaggtgggctctcggcccagagcatagatggccacttgcaccagtgtcttggcaggaatcatgtaatctcgaagaaccaagtcatttaacaagatatctctgcaggttcacggagatggggtgaagtcttagtgtctccttgatgctggctttgaggagggggaccagctgtagcatcgtggccatgtctccctgggcctggtgccgcgcagccaagacctctgcccgcagcatatcctgcaccttcaggttgcgtgccatctcatacaagtgccactgcagggtcatggacgtcgtgtccacccctcctgccagcatctctgtgacgttggccttgatgtcctcgaaggacatcttgctgtctcccaggagtctgtagaggatgccacggtaatcgtggtgaacacttcctttctgtctcaattcccagtagaagttctgggtgtatatgtcagctttactgaaaatcacgtcccatgcagccacatggtccttccaggtcttggtcctgaacagacggaacaggtctgggggaaggttgagcatggggacgctggtgtggaacatctggtagatggcatcaatgaatcgctgggcctcggggttcactacttcctccagcatcccctggcgctccccaaaaatgacgttagtgatggactcaaaggcaaagcggaacaggtcatcactgatgtcccccgagtaatttccggagcccgccttcttgatgcgcctgtgcaggacactgacgaagtcccgagacactgcatccaacaggggcaaaaagttcttggtggcctctggagccatcacctcctggttcagggccacccggtctttcttccaggctgccgacttcttcaacaggactcctatgggtctctggtaatactggtgataggcgacccagggcgggatgaggaatcgttctgggttggggccctcggacttaaagagaagggccacatcttcagggtcgatgacataaaccgactccacgttgccgagcttctcccttagcgcgccactgtcggctccggtgggctcgggtgagctcgggtgaacgcagcgagcgagggcagaggccagcagaggcgaggagtggatgctgcagggccgcaggccgggcagagaaacgcataccggg

SEQ ID NO: 441540 - DNA, 1115 bp, Homo Sapiens
ttaattaccaggggtcccccttgcaggggttcatgggaaggtggggttccccccctctcctgtcccaagtatttttgtgacggttggccttgattgtcctggaagggaccttctttgctttctccccaggaattctgtagaaggattcccccgggtaattcgtggtggaacatttccttttcggttctccatttcccagtagaagttccggggtgtatatgtcagctttactgaaaatcacgtcccatgcagcccacatggtccttccagttcttgggtcctgaacagacggagcaggtctgggggaaggttgagcatggggacgctggtgtggaacatctggtagatggcatcaatgatcgctgggcctcggggttcactacttcctccagcatcccctggcgctccccaaaaatgacgttagtgatggactcaaaggcaaagcggaacaggtcatcactgatgtcccccgagtaatttccggagcccgccttcttgatgcgcctgtgcaggacactgacgaagtcccgagacactgcatccaacaggggcaaaaagttcttggtggcctctggagccatcacctcctggttcagggccacccggtctttcttccaggctgccgacttcttcaacaggactcctatgggtctctggtaatactggtgataggcgacccagggcgggatgaggaatcgttctgggttggggccctcggacttaaagagaagggccacatcttcagggtcgatgacataaaccgactccacgttgccgagcttctccctgtaaatcgggccatacttctggaaattctggacatggtgaaggtggactttgtgtgtgcccgtctccctccagaaatggtacaggtttagccagccattgtcaccaggagaggggatctcattgaaggggcgaggactgcgggtggagatgccagctccctcgccagtgggcaccctgagacgccccagcccctccctgggggcactcagaaaggtctggcagccatttgaccaggactgagcgtgggggaagacccttggccagcatgctgtccccacagctgtgactgtacctgctccacttcagatcccgggaattccggaccg

SEQ ID NO: 441541 - DNA, 1119 bp, Homo Sapiens
gccccctgcagggtcatggacttcgtgtcccacccctccttggcaggctttttggtgacgttgggcttgatgtccctggaaggacattttgctgttttcccaggagtctgtagaggattgccacggtaatcggtggtgaccactccctttcggtcttcaattccccagtagaagtttctgggtgtaatatgtcagctttactgaaaatcacgtcccatgcaggccacatggtccttccaggtcttggtccctgaacagacggaacaggtctgggggaaggttgagcatggggacgctggtgtggaacatctggtagatggcatcaatgaatcgctgggcctcggggttcactacttcctccagcatcccctggcgctccccaaaaatgacgttagtgatggactcaaaggcaaagcggaacaggtcatcactgatgtcccccgagtaatttccggagcccgccttcttgatgcgcctgtgcaggacactgacgaagtcccgagacactgcatccaacaggggcaaaaagttcttggtggcctctggagccatcacctcctggttcagggccacccggtctttcttccaggctgccgacttcttcaacaggactcctatgggtctctggtaatactggtgataggcgacccagggcgggatgaggaatcgttctgggttggggccctcggacttaaagagaagggccacatcttcagggtcgatgacataaaccgactccacgttgccgagcttctccctgtaaatcgggccatacttctggaaattctggacatggtgaaggtggactttgtgtgtgcccgtctccctccagaaatggtacaggtttagccagccattgtcaccaggagaggggatctcattgaaggggcgaggactgcgggtggagatgccagctccctcgccagtgggcaccctgagacgccccagcccctccctgggggcactcagaaaggtctggcagcctttgaccaggactgagcgtgggggaagacccttggccagcatgctgtccccacagctgtgactgtacctgctccacttcagcggggactgctaggatgactgtagccctgatcccgggaattccggaccggtacc

SEQ ID NO: 441542 - DNA, 407 bp, Homo Sapiens
gattggcagttggttgaagccatggatgcagaacccatggatatggagggctgactgtacttacttacatatctatctatctttgagtaacaaactctttgggggaaaagagggaagtgtattgagcaagagaaggcaaaaaacattacataatattttgattctgttacgtgtgtctatagattgtttcattctaatcaagacctaagaaggtatgattctgtgactgatttagaattctggggtggaaatatcctggaaccatgttttttaataaattctgtctcttggaaagagttaacaacagcctgggaaagagttgttattccaaaagtcagcctgttacttggtgaagctgaagtttaagagttctggggaaaaataaaatctagtaattccagcctaaa

SEQ ID NO: 441543 - DNA, 1431 bp, Homo Sapiens
  misc_feature (1210)..(1266): n is a, c, g, or t
tgacaagcgcaaattacagttctttcaaatcatataagaaaatggttttattcctaatttttagttcccatacagtttacaaatacacttttactctgataatacagctttgcaactagcaaagcagttgcgctaacacccataaatataggtggggagacaattaacatccactaatgtttctctacataaactattcttttaatgtcatttttttaagaacagttgcaaatagactacataatatacgtgggcaaaaaggcaattaagtgaatctcttgaaacactaaatgtataataaacagcatattatcaacatttacatgattcacatcaaaatgatgacatcctaaaacgtattccttttaaaggatagatttatcaataaaatattacatatcttttaatactctggtacaatacttcatatactgcaggaaaattaattgtaggtctagtcatcagcttaatcagggatccttttcccattagcttttattaataaaagaatcacaattaggtcataaataaacaggcaaattattaattacatgatttgaggcttaggatgaaaacttgtcaaaattagtttgatatacagcaaagttatacaccacactaaaaccaactgttcaatagtttttgccttgtgtgaactgcccatagtgaaaaaggaacaaatttttagtgatgaaagatacaataaactatattttggaacttttcaagaggaagaaggaaaaaagatttcaacaaaattaagggcaaatacagatcctaacaaaggcatcctgacatcagggaggccatgtgcttgctatgtgtgaaagttgatcccccaacaacatacagaaaacaaaagctgcactggctttgtagttatgtctatagtctaagtttcccttatggatactaagctacaacaaaacacttgacaattgcaaacctttccacatccccctgaattaaaaataactcaagatgttattagttcttaaaatccccaataaaataacctctaaaaataatcttgaccattttcctggctgtttccccgaagcaacttggctctttaaagaatgcacacacaccaagaaagtcctacccgtgtctcctcatccccatttagccacatttgaaaagaccttggtttcagtgggagagatgaccataagtttcagaagggccacacactggacatgaagcgccnnnnnnnnnnnnnnnnnnnnnnnnnnnnnnnnnnnnnnnnnnnnnnnnnnnnnnnnnctccaatacctaatgtgccagataattctttcaccccaaaatataaaatcctatgcttataattttaaaatcctcagtgagctatggaatattgtgcatatttaatacccaccagcaacctagaagtagatggcatccatgtgtctgatcccggaattccggacc

SEQ ID NO: 441544 - DNA, 957 bp, Homo Sapiens
  misc_feature (247)..(255): n is a, c, g, or t
gaaagttccaaagaggtggtttctgaggaagtcagagcgcccagggccagagcagtcagtaatgggtgaatgaggttgtttggaaagtcggtgtgacagacacatggatgccatctacttctaggttgctggtgggtattaaatatgcacaatattccatagctcactgaggattttaaaattataagcataggattttatattttggggtgaaagaattatctggcacattaggtattggagtttnnnnnnnnngccaaatttcacagtcttaataactttttttaaaaaaaactaaaaggcgcttcatgtccagtgtgtggcccttctgaaacttatggtcatctctcccactgaaaccaaggtcttttcaaatgtggctaaatggggatgaggagacacgggtaggactttcttggtgtgtgtgcattctttaaagagccaagttgcttcgggggaaacagccaggaaaatggtcaagattatttttagaggttattttattggggattttaagaaataataacatcttgagttatttttaattcaggggggatgtggaaaaggtttgccatttggccaggtgttttggttggtaactttagttaacccttagtgggaaaacttttgacctataagaccttaaactaaccaaagcccaggtgccagccttttttggtttatcaggaaagctggggtgggggggaatcacacctttgcaaaacattaagccaaggcaccttgggcctccccccttgataatccagggaatgccccttttgcttaaggaatcctgggaatatttgcgcccttaaatttttggtttgaaaaaccctgtgtttttcctgtccctccatcgtttgaaaaagtttccccaaaataaaaaggtttaagtggggagacctttccgcccccccctgaaatatgtctggggttccctttttatcgcccgtctga

SEQ ID NO: 441545 - DNA, 782 bp, Homo Sapiens
  misc_feature (679)..(733): n is a, c, g, or t
tttttaactttttgttcttttatttgtggttattgaggtttcaataatagtaatggaagcagacctcattagtccctttaacaacctgaatccagaggaacaacttctggaccctcatgaatttgagagccaccagctggggatagcctgtagtagtctgaggagtgtctaaggagggtggtggattctgtccacatgcctgcggctcgaagggaaggttttcattggcagccagttacttaaacttaagaaagaacaccacattgaaagcctaaggtcttccttctctttggggagaataggtacatgtaaggtgatagggaaggagaaaaatagacattctcttatccagcctcctttgaatctccctccaggttaactacttcctctaaaacatttgctgacccacatccagggcacccggaaagcccacaatgtggaggcctttttctaatcctcccccaacacttttgcccctaccagctgagcagtctgcttaccaagggtcacttctgcttgttccaaaactcttttacgccagttgttcttattgttatgattaaagtgcaaaccaagaaaacttaagtgtagaactcccaccagacaaaacatataggtcacaaaaaagcacagcttggacccacatcaaaagtttggcagccaggcacagtggctcatnnnnnnnnnnnnnnnnnnnnnnnnnnnnnnnnnnnnnnnnnnnnnnnnnnnnnnnttcaagaccattctgggcaacatagtgaaacctagtgccgaattcctgc

SEQ ID NO: 441546 - DNA, 751 bp, Homo Sapiens
  misc_feature (741)..(741): n is a, c, g, or t
gggaggaagaaaatgtatacacaaggtaatatatctaacaagagagcttgaaaatcaatctggaagggatgaatactttaaaaggaaaatgaccaagttcatgaactattcataaggcaggtgaaagggaaggggaagaagaagtaaggatatgcatatcccatgagattacttttcactcattaggcttggaaagcattaaagtgactggcaatatccagagctggtaagcaagcagggatgggcacaccctcaaaccccagtttaatgggaacataaaataatacatttttctgaatagcaatctggtaacgtgcttcaaaaccgtcaatgtgcataccatttgactctgaaattccacttatcctgaggggatcatcatacaaccttgcagagatgtatttgtaaggatgtttgtcacagccctgtttaatagacatgccttaaatatacatcactgtggctaggacggggtggggtttgcattgtagtacatacagtgcattattatgcagtttaaaaaatggtagtaaagtctattgcaatagatacaacttttatgatacgttgaccagtaaaaaaatagctatttataaaacaatatatacatacatagtaagaacttgaaagatatataactaaagactaattaaaaggttatgaccagttatcactgggtgatagaataattgacaaagctcattttcttcttcaaactcgtgccgaattcctgcagcccgntggatccacg

SEQ ID NO: 441547 - DNA, 770 bp, Homo Sapiens
  misc_feature (757)..(757): n is a, c, g, or t
gcgatctagccctagtggatcccccgggctgcaggcttgcccaattttctcaagtgcattgaattccatgctcagcaaatgggacctgcccgtcttcaccctccctttcaacatggcgttgtcaatgtacctttcagccacaggacattacaatccattctttccagccaaactggtcatacctataactacagctccaaatatctcctggtctgacctcagtgccctggagttgttgaaatctataccagtgggagttggtcagatctatggctgtgataatccatggacagggggcattttcctgggagccatcctactctcctccccactcatgtgcctgcatgctgccataggatcattgctgggcatagcagcgggactcagtctttcagccccatttgaggacatctactttggactctggggtttcaacagctctctggcctgcattgcaatgggaggaatgttcatggcgctcacctggcaaacccacctcctggctcttggctgtgccctgttcacggcctatcttggagtcggcatggcaaactttatggctgaggttggattgccagcttgtacctggcccttctgtttggccacgctattgttcctcatcatgaccacaaaaaattccaacatctacaagatgcccctcagtaaagttacttatcctgaagaaaaccgcatcttctacctgcaagccaaggaatggtgggcccttgtgagaacgccccattggaggcttgtcacnagtcttcttgccc

SEQ ID NO: 441548 - DNA, 1231 bp, Homo Sapiens
  misc_feature (95)..(95): n is a, c, g, or t
  misc_feature (641)..(649): n is a, c, g, or t
  misc_feature (1198)..(1198): n is a, c, g, or t
gggtggttcaaaatgcccattgattttctgagaggagaatattgtgagtgtgccaaaaaataaatgagcttttttaaattaagggattcaaccanctataaaaaataacacccgtaagcaatctgacctttgccttcagtctttataagacatcctcaaatgaataaaaaatatgattttaaagagccctttggaggttggtaacaattctatgcatttgtggcatttacaaaatcaatttaggggttaaagtaaaaatgcctaagctcgagtatttcataaatacagtaagtaacttttctttaatatgtaagaacaggttaagccaggaacttctcctattttatctcatttaaaacagatcatttttcataaggaaaaataatctctacctaaaaaatcctttgcaatctctgagaaaagttgcaatacagaataattttgattgacaaaattcctttctccctcttgcagtccctgtcagtctgaaaaaccccaaccattgtcccatgagagaatgtcacacacacaagggatagggtgcaggccattgtttgcaggaagtggggactgagctctgctgtcagcttgcacctctgtgatacagattctggctataatgtgtaacttgcattgatttnnnnnnnnngccaagctgcttatcacagaattctggattaacttcgattttgtgactgtgaattccataaggcttagttggtttatggggtttaatttttaatactgttaacatcatcgagccagctaaacaccaagaatatcaataaatactaatagtttgttttcacttcctccttctgttggagcactttgactttatatacattccagtcttagtgccaaggccccattggggtttcaaattccataccagagcacatcacctggatgtgactctcatatgctcaaggatattcctggagttgaaaggaaaatacaaaatgagcataagaacagattacagacgcgtcagtatgaaagttgatactcgtgaaaaacagcagtttgctgagaccctggaagttagctggagcagtcaggcagaaatgactcgtgaccatggctgcaaatggggcttgttctcacaaagggctttccaccattcttttcttggcttgcaggtagaagatgcggttttcttcaggataagtaactttactgaggggcatcttgtagnatgttggaattttttgtggtcatgatgaggaac

SEQ ID NO: 441549 - DNA, 1677 bp, Homo Sapiens
  misc_feature (153)..(153): n is a, c, g, or t
  misc_feature (198)..(198): n is a, c, g, or t
  misc_feature (201)..(201): n is a, c, g, or t
  misc_feature (352)..(362): n is a, c, g, or t
  misc_feature (391)..(416): n is a, c, g, or t
  misc_feature (470)..(483): n is a, c, g, or t
  misc_feature (497)..(506): n is a, c, g, or t
  misc_feature (581)..(597): n is a, c, g, or t
  misc_feature (609)..(609): n is a, c, g, or t
  misc_feature (618)..(633): n is a, c, g, or t
  misc_feature (646)..(646): n is a, c, g, or t
  misc_feature (649)..(649): n is a, c, g, or t
  misc_feature (651)..(829): n is a, c, g, or t
ctcttgttgttattgataacgagggggccacccccgcagtgaggcaggctcccgtctgtgctgcgcctccctcccgcttttttcggcggcgcggcggggccgaatagtttttctttgtttagcagggcgccacccagcgccttgcgggtctcnccgccgcgggcgggacccccccagacgctatcccgatcccccgcnccnctggggggcgcgccgcgcatctcccccggggcagggaggcgttctattggtggatcgagccccacccgcgtcctccttctcggagcggtcggcgcggcgggggcggcgcgcgatattattgttcatccgcgggccgcttcgggtcgccgtnnnnnnnnnnnggggtggaggggccgccaccacggagagnnnnnnnnnnnnnnnnnnnnnnnnnnttcagaggcttgttcttcggacgccccctctttggttgtgccccggtccgccgnnnnnnnnnnnnnnggtgggggagtagnnnnnnnnnngtctttgcccgcgccgggcgttttccttggggcgcccgtcgtgtgtcgcctttctttcttctccgtggggggggnnnnnnnnnnnnnnnnnggtgtttggagnattcttttnnnnnnnnnnnnnnnncggccccttctcnccncnnnnnnnnnnnnnnnnnnnnnnnnnnnnnnnnnnnnnnnnnnnnnnnnnnnnnnnnnnnnnnnnnnnnnnnnnnnnnnnnnnnnnnnnnnnnnnnnnnnnnnnnnnnnnnnnnnnnnnnnnnnnnnnnnnnnnnnnnnnnnnnnnnnnnnnnnnnnnnnnnnnnnnnnnnnnnnnnnnnttatttggcaaaaaaacttctgaatttaataaagaaatggcaacaactggtacgtacagtaattcaaaatcttttcactaagcaccaaataggatagttctcaatcttctcaagaacctctttgaaagaacgcctaaaacctaatcagtttatttaggtttttagtcaagaaatacaaagctgccaatcagagtttctaattaccatgagtgaccaggttagcaaccttgaggtcataccacatgagcttttaaaagctttgtttaacctatacgttgtaactgaggggatttgttgatgtcaggctggtaatcagagatccacgtgccagataccatatacacacaccaaaaagatacagattatatggtccttatatatttaaggagaataatgtctaattcacatgggtgtagaattagtgaggggcagagagacagatacaaagcactaacccaccagggagaacctagcgagggcatcagaagagatcaaagtcctgtgccctggggatgcaactgaatgggtgctgggaggcttcagggatcaggcacatgagtggatgtcagtccatgtgggaaggggccttcaaggctgaagacaacaaaatgagtcaaggcacaaagccacaggagtactgccaatcagaagacagtgaagcagttctgggtaaagggatgtgatctaataagatataaaactcagaaaaccttacccaatgagagccagaaatctccatttcttaacagcaactcaacagggaatctgaggctgcccacaaaactaacgagagcaaaataccctcccaaaggcagggcaccacatgctctttgtggaggctcagtagc

SEQ ID NO: 441550 - DNA, 887 bp, Homo Sapiens
agtttctcattgtgatttttatttgcatttcccagaggacagtgcttatttgccacctagagagcttctttggtggagtgtctgctcaaatctgttgcccactgccgctttttgcagctgccttatcacaacactgatcccgttgcgttgatggaagcactgtgaccctggctgacagcaccacaactgccaggtcagtcaccacagggggcgtggcacacagcaacctgggccattctggtacgtcagcgctgacgtcagtcttgggccttgcaggtgggaggtggaaactcgagtctggaggttggccatggtggtgcccatcaacagggctctgggtctgggggccgtgactgtggtgagctgggggctctgctgtggtaggcgggtgacggctgcacttgcacttgtgtggttggctgtgccccgggcagggcctgtggtggtgggggtggtgggagcagctgcagtttctgtttctggagtctaatcaagtgctccacgtggcttttattttccagtggaagcccttgcttccaagatgctggaatctttacactgcgccagtcctagaccagggacgctcgatttctctggtagtccaggtgacgtctgcctcagcctgctcggctcctccctcctggccccggcctccctgcgcgtcctgtcctgcagctgccgggccacagctctgaccatcttcttcacagaggccaccttccacctctcctgggcaaagtctgtggccatccactgcatctcctccagcagatagtcccagtgggacttgggtcgtggggcctcctgcagctttggcagacgcctctgggaccacagacctgctttcctcagctccgcaatgcgctgatgcacctggttctccagag

SEQ ID NO: 441551 - DNA, 2049 bp, Homo Sapiens
  misc_feature (766)..(766): n is a, c, g, or t
cattttactttataattttattctaaaatacaacaaaactccttagaattatgtcagcataactccttgatgtatttttgtctttaaattccaaatgtgaaagtcataaatattaggcttaaagctgctgacatttgaatcaatactaacagcacacaaagaaaacattttaaaattatcagttatgtaaaacaagcacttactaaatacaaggatttctgaattacaaagcttatgaaacaggtctacaattaccaaaacctcaaaggccaaaaaagacactaggaatttcttaaaaagaaagatgttggaagcagaacacttactaaatcaatgaaacaacttggacaagattctgatacaaaaatcactattgagatgaagttgaaagaatatttgaattcagtccagttaagccactatgccacctaaaacctatttccttttctaattgaaacaaaacttatctcaaaacttttaggcatttaaacaatctgaatttcctttatttttccacagaatataaaaagaatattctgacagcaacacacattgtgctagcaaagaaaagcaaatctgtgctggatactattagtacctcttatcacagaatacatcaaatacattaaggctctttctagaattctagaacttcgaagtgtttcattcaaactaagacactgcaaaggaggaaaaaaatagattttccacctttaatggaaatttcccaaaaatgtctgaaaatgtcctataaagtaccacagcnttttcagaccaaaacattagtgccttgatcattttaagtggtttagttattgtaagaatgtaagctcatgttttattactccagttatatggtactgtgccatccttaagaagtattttgaattttgaaaaaagttctcttttcctagagaacaattacgatggatgtaaggtagtcttctggcaaaggatgagaaacatcagaatatgcccatgtgtaatagttagagaataatgagagttttgggaattacagcgggatacagaaaaataatgtttaggtccaaaatttgctaccataattaaccttaaacaaattcaccaaaagccgtgattaataaaatctgttcactttatagaagtaactctaacatgattatggaatggttaaatctgggggcacacaccctacctaagtaccatggcaaaggctcccagctgtaaggctagtgtgcaacatctactttaacagactctgcagcatggctgttgcataggtgggccgagcctgtctgctctcaatcgcattctgaaggtactggatgcctccacagcgttcccagatttcttcaaactgtcttggcaagatctcagcaccacgcttccgagtcaggccagtctcctcaagattcagctcacacatctccatgtcgtccttaccagccacaagtaggatgggtggcttgtcaggatggagttccatttgccgggcaatccatggtccatcaaaatgggcataccaccagccttttttcttactctgagggtctttgtactggtcggcagggcggatgaatgggatgcggaagaagcgttgctgtcggttcatttcaatctcccgctgcctggcaggaatctgagctgctgggttttgctgagcataatcagtaacagactttggagcacgttgctctgtttcagtatttctcttcttgttcttagatttccaagcatgatacacttttagtctcctatgaaattcttctctgcaagctgccaggagctcaatatcacaagaagtattgatggtatcacgtagttctgcatatttccatttactaagatcatatttcttagtaccagcagctgctttggtggctagtacagcaggacctctccgcagcgccaggtcggcctgggcctcatcactgatgagctcggcttcactctgggcaatcctcagggccagctcccggtccctgcgctcctgctccagaactgcttgctgttgggattcctcctccttctgtcgggccagctgtgcctccacttcagcttgaatgc

SEQ ID NO: 441552 - DNA, 521 bp, Homo Sapiens
  misc_feature (449)..(449): n is a, c, g, or t
  misc_feature (498)..(498): n is a, c, g, or t
  misc_feature (505)..(505): n is a, c, g, or t
actttataattttattctaaaatacaacaaaactccttagaattatgtcagcataactccttgatgtatttttgtctttaaattccaaatgtgaaagtcataaatattaggcttaaagctgctgacatttgaatcaatactaacagcacacaaagaaaacattttaaaattatcagttatgtaaaacaagcacttactaaatacaaggatttctgaattacaaagcttatgaaacaggtctacaattaccaaaacctcaaaggccaaaaaagacactaggaatttcttaaaaagaaagatgttggaagcagaacacttactaaatcaatgaaacaacttggacaagattctggatacaaaaatcactattggagatgaagttggaaagaatatttggaattccagtccagttaagccactatggccacctaaaacctatttccctttcnaattggaaaccaaacttatctccaaaacttttagggcttttaaccatcnggaattncccttaatttttcccc

SEQ ID NO: 441553 - DNA, 418 bp, Homo Sapiens
gactttttgggtcgtcaggaacctggtattagaaatcgttcgttacagagattaacgagaacctacgaacgagtcgggtacggtggtgtacgttcacaacttcagtatcccaggggtcgaggtcggaggactatcagaggctaggagcctgagagtttttcggttaatacagcaaaattttgctcgcatcaaaacatataaactagttggatgcggcggcgtgcgttcgcaactttagtcatccgcggagttcgaggtacgagggctatccgaattcgggaggcggaggtccgtactgagtcgcaaccgcgtaatcgtatctcagtccgtgtgatacagcgagatatcgctcccacatacacactccgcaggggggtttggcattaacctgtcttcacagcgagcctgtccatccttt

SEQ ID NO: 441554 - DNA, 2083 bp, Homo Sapiens
  misc_feature (19)..(19): n is a, c, g, or t
  misc_feature (1227)..(1227): n is a, c, g, or t
ggcccctctggggcccccnggccttggtcctcaaaccttcgtggcggtgggaagccatccgtgtgtttgcgggcaggctgcctacggctctcacaccctcttccctgacacacagaacatttttgttaaagaaaatgcctaaggtatacatttacctcatcattcccaaatagagatgtagtctacaataaattaatttccatttaagttcataaagtaaacatatgttgggtatagagaagactctggacccactggaaaacaaagtgagccttttaccttacatttctctagctatgccaaacacaacagcacgttcaccaaacaaataaagtctaaactgtataggtctttgtttcttccttggaaactacatatataatctttataaatacaatgtacatgcatgtgcctaaattcacttttgaaagaatacccaactctaaaaccaaggaacagtatagatttgccgtcaatggaaataacatcatatcattatgaaagagatgatctaatggtcttaatttccttaatatgctctttaaaaatctgtttcagtgaaataaccaatgtttgttcctagactttgatcctacttttttgtatatcagataaactctgacaacctaaacttttaagactaaattctcccattatcattttggttcctttgtaaacttcacatattttctctgaatttaacaaataattttctatttttgcatgtaataaatgattttgcccaactaaccaaccaatcaacaattaggcaaccaaacaacccctcacaagtatatacagatcaaggtttgttagaaacaattcatacaaaatataattctatttttttcattattatgagctagaaccagcacaatctgacataagaagaaagtggtctagttaaagcttacttagaagcataatgaacaccctcattgcaatgtttgctcaaataaatcgagagcccacatatttttatatacactcctgaacatttgtgccatagttattacttttccagaatacttgtttaaaagaaataccttattagctttcctttagttgatcagtagtagtttgaaggctgaattataataatttcataactgacatatgccacacatatgggaactacaggattgcaagttttccgggggaaaggggtaagctctttcttcaacaggatctgtagcagtagataggagagtcttcattttcggtacnacgctatgcttctgaacttggctctttatcacaaaagtcccttcaagagattagttacagtgactggataattacattaactagatcatagggagtgattatttttattttaaactactaaatagactatcatttaagcaagagatgagcacttcagaaggctaagtgtctggaaaactattttctacaaggaaaatatttttgtgtacataattaatcatgaatctcaaattggttagctgttgataaagaagggtggtagctaaaccctaggaaattggattgagtaatttcctagcaatccccagaagaaaagaacatgtaaacacagaatctttttggtaaccaatattttaggtaattcaaagggcaataatttcaatcgtgaggactgccacatgacctcaacacccagtgtcagaacggccagattcaagcagcacttcagaggtgcggttgagatggctaaaaatgctgatctgggctgggagtgcaatcacagtgtttattgatttttgtgcttctgttgcaccaagcaacaagagcgttcccaggaaccgctggctttcccctgccatctctggcagggaaaaactacctggtgacaggatggccacatcctgcagagcatgtgtgcgtgcctctgaatcgacagatggcacgagcgggttctgcccctgagaagcatgcacaagtgacaagacccggccgtgccactggatggcactggggtgggcaggcccctgggaacaatctggtgtgaggaaggacagagcaacatcggcttggataatttagagaactaaaacgcagtcacggcggcaggcagcagcattagaccatgaagcgaagctcc

SEQ ID NO: 441555 - DNA, 548 bp, Homo Sapiens
agacaggaagagagataaattccatttaaattatttaacatacttctgagatcccagtatgaaaagcacttagtaagttccatgtgaaaattgcattattattattaagaagatgagaatcagtcctagactcaaatccaaaagtgaaccttgatttcttatcactgatatggatatcagggtcaaacaatttcttgtttctcagtagtctgggatgcttaggagatcttgtagtatctgccagtagcgcataaagcaaacattcctaatagccttttttgttatgcactaaataaacatttgtgtttcctcaaagtcctgtgttgaacccctaaccccccagtgtgtctgtatttggagacagggcctggaggagataataaaggttaaatgaggttaaaatgggggtcctaatccaatgggtctggtgctcttataaaaagagagacaccagaaccacctaaccccgccatcgcagggacggccaggaagacagcccatacccaccaggaaccaaatggcctggcacctgatctagggcatccagg

SEQ ID NO: 441556 - DNA, 679 bp, Homo Sapiens
  misc_feature (16)..(16): n is a, c, g, or t
  misc_feature (27)..(27): n is a, c, g, or t
  misc_feature (32)..(32): n is a, c, g, or t
gcccccaaaagtgctnggatacaggcnatganccgcaatgctgggctaaaatcactcttagacatagggggaggagaaccgggaaaaaccaggtccaacccccacttctactccctgacccgttgcttcctctagaaaccagtccccacctgaggttgcccttcatcagaccttgctgggactctggtccctctggtgcctacctgccctgaccccacctgggccttggtacaactggccctgaatgcctgccccatgaagctatatagcccaggctccccattggaattccctgttctgggaattgacagagagaagaaaacccctgctctcgtctgtctctgctcatccttctcagtggacagggcatcccagggagcaggaggcctgcagcttgcctgggagtttcaaactggcaaaccaagggccacatttatattcatatgtgttggttcggcccacatcatttgaaatgcaagtcaaattttaaaatctggagattttacataaaaatatatttttccagcttttcatagaaatcagggccaggcgcagtggcttatgcctgtaatcctagcaccttaggaagccaaggtaggaggatcacctgaggccaggatttcgaggctaggaggttgagactaacctgggccacatagcgagacccccttttctacca

SEQ ID NO: 441557 - DNA, 417 bp, Homo Sapiens
  misc_feature (286)..(300): n is a, c, g, or t
ggctctcaaacccaaaacacagatcgatataagattttaggaggtggggtgaggcacaattatgaagtgcatattattcagatgtatagtaaatactttgctttgcttttataaagggttctttaaggattttttaagatttttacacttccaaagtacatttactttttgtcttgataatgaatcacttttgccagtaattggcctcttccaaaagtgatccttctgacttacagatgtttaaaatgtgccatgagtttaactacatcttgatacaaacatgatnnnnnnnnnnnnnnntatattccaaaggttgggactctggacgacaaatttttttaaattagccaaaaagcattattaacattataaactatatttactataaacaattgctatcttaaataagcaacttct

SEQ ID NO: 441558 - DNA, 660 bp, Homo Sapiens
acaagccaccacatccaacctccctcatatttgactaagaagtctcataaatctgagaacacctagcaaggaattaaggcgagggtgtggcactgttctggcttcagtctatcaccaggcagagtccacgcattcttcccagggagaaagaagcagtgacagctcttgggctttgagggaaatgattcagcgggagaaagaaggtggagaggggctaatatgcagataccattgctgcaggtggctctgcccctaagcactgaggagggcactggtccctctggccccacccagccttcaccccaaggtgaagtacgctttctcaggtccccaaggatgggtggccaggtcccccactgggagtggaggtctcactcccttccttgggttctgacctccacattatctggctgtgagggtgacctgcctggctttccccaccaagtgcagctccccgcagctgaaagccacactctcaacacaggactcctgagatctgacactggccaattcacaccctgcttgaagctggcatttgagaggccttcaggttgacaacagcagcaacaagtttgctgttcaaagtaggccaagtcacggctttgagcggcatcatttgaaaagtgctgggatcagccaggcgcagtggctcactcctgt

SEQ ID NO: 441559 - DNA, 786 bp, Homo Sapiens
ccgttctgtatgaattcggcattagctcacccaatatgggtgtcctgaaggaggactgatgttcaggagttaactgaccttttatacaagttagcacatgaaggatagatatgcactgaaacatgtggtctggtctgacttgagagaaaaggaatgttgcacaagggttgtgaatgtgaaagggggaatggaggaatggaaataaaattgggatgagccctaatggaggaagtcgggcaaattgaaagtataaatgaatgggccatgagtgttcagagggagaaaagaaaggtttaatatactcctttagttgagttttcttgtcttgaacataaaaagtgaatacaaattaaattcagtaatactaaaaacataccgagatactgaacttgctggcacatttacttctggtaagcataaagcagagagaacccaggttagaaggatgggaagagaaaaggagcagttttattgcttatagaaagccgttctgaggggttggtggggtaagctcagtctattactgagacaatagtgagatggcttatatgtttcccctgttaatatctggttaaattatgtatccatcaaatggtatgctcgcagcattagcaaaattaggagtttcatctttttcattgaatcacaggtggagactcctattttcctttctgttttcaggcctttgagcccctgggagcccaaataccactcaattattttgtatttatgattaataaaagttcattttttaaatttgtatttttatacaacctccaaaaaaaa

SEQ ID NO: 441560 - DNA, 521 bp, Homo Sapiens
taaagttaaattttataatttaattaagtgcttgtttttgtcactctacttctcaagtctcctgctactgctctggggctcatggcttgctctagggcagaaggaagttgctggaagcctggcctccaggctggaggggtgccaatgcaagggtcacactaatggaactatcaatgcacctgccttaaaggagcctgaagaatgcctccagtgggctgctgggcataagccctggactgtccatatactacttggaatattcaaacagagtccagagctcagaggcagggagagccaataggctgctgaaggcctagggaaagcaacacaggacagttgtccatttgagactctttctctatcaaagaggagttagggatatactggtcagttcagagaccacagtgtgaccctggcagaagaacttgctctctatatttcctaccatcatgggggacggccaaactgattgttactgaacaggttcagtgatgtggtatgagaagtgccagggacttaag

SEQ ID NO: 441561 - DNA, 916 bp, Homo Sapiens
gcgccaacaggaagtaaagggtaaaggttaagtggtttgagttaacgaaatggatggttggcctctggggagggtgctcccatcagctcagctttgtgacgacctaagaatatcccttccacacctttcctgatccaatcgttctggctgcataaaaccacctaaatcaatcaactgttacacttcccttagtgctaggacatattcatataactcccacgtattaaatgaaaatacatccatctaaaaataaaacagcacgattgctgctacaccaagaaaggattttaaaaaggcctgttcacaagctaagtgagggccagaggaaaggtgttcgtttaaactgaaattcgagctgcgataacacctcctaatgcaatcaaacgctgttgcagcacacttcttaggagatcgggttcaacggcagggattgggtaaggtgagaatctggcttggcggctccggccccggccatctggttcccttgggctccggccgccaccatccactcgacggctctcggcccgaacgcttggtcgcaccgcctgccgaggtcctagatgaatcgcttcaggcctggaaacgaggaagccgtctccggagaccatcgccaacgctgacgcccgcggtctgaggtcgccatgggaagagcggtaggccaccctgctcctctgatcaccggaggacagggacacattgttcagggccatattcaaacactgcccgcagtacttgcgttacgtccctttgtgaaggcaggcccttcgcggctccccagatcagtccagcctgtgtcggacccgatgactaagcacacaggaacccataactgagcctgcggaagagccagaagccgccttgcctcgtgccgaattcgccacccagtcctcgctacctataccgtgagagtactgcc

SEQ ID NO: 441562 - DNA, 662 bp, Homo Sapiens
ctttcctataaaattttatttattacataaaaaattctatacatttgttagactaaaatacagttttcattataattctggcaactgagtcagtacacagagaaaacttagcattagatcagcacttttctttctagttcgtatttctgcacaagaaaaacatttcaaagctccgtttcatataggctgattgttctctgaagccagatggaattccatccaattcagagctcttggaagttaatttcccagcaagatttgataactccaactccagaaagttaattgcttaatatacatatttttaaagtcctctgagagcataatgctccatctgtaaagtctgcactgtgtcaataatgaccgtcacaaatactagggctacaactgtgtctgtggggcatgttcaagcacctacatgtttgttcccccacatgaatacagtgtagtgacactgtaataagaaaaaaatccaaaataatggtaaggtaaatgattccaaactatgaattcatggaaggcttaactgtgatcctccagtttataatggacaaagacaagacaagatacaaaaattcattttggcactatgaaataggatgcaaatggcccatacacagctgtagtaagaccaccgatgtgggtttatgtcatatccccgg

SEQ ID NO: 441563 - DNA, 447 bp, Homo Sapiens
ctttcctataaaattttatttattacataaaaaattctatacatttgttagactaaaatacagttttcattataattctggcaactgagtcagtacacagagaaaacttagcattagatcagcacttttctttctagttcgtatttctgcacaagaaaaacatttcaaagctccgtttcatataggctgattgttctctgaagccagatgggaattccatccaattcagagctcttgggaagttaatttcccaggcaaggatttgataactccaactccaggaaagttaattgcttaatatacatatttttaaagtcctctgaggggcataatgctccatctggtaaagtctggcactgtggtcaataatggaccgtcacaaatactgggggctacaactgtgttctgtggggggcatgtttccagggaccccaccaggttttgttt

SEQ ID NO: 441564 - DNA, 474 bp, Homo Sapiens
  misc_feature (165)..(166): n is a, c, g, or t
ttttttgactaattcaggagttcttttattgccagtgacccagagatggctagagctcaaaattctctcagccccgaagaaggggatagatttctttttataccgtggtctaaatagggcagggggagcctagctgaagcaatttttacagaagcagaacacgcnnaaaaagttaaaagattaatggttacagagatagttacagaaaaatacacagttccaggtgcaggggcttaaactatcacaaagagataaatgcaggggcttgggtaccatccactgagcacgtccccaggagctgctggtacagcttgcctcaatatcttatcagtaagtgcattcctggatgtgcttggagtcagcttgcactagttatgtccttaagggagggggataaggggggctgcaagtgaagaaacaaaaatggagtctgtctggctctctcagctaaaagagagtcaatccggttaaaac

SEQ ID NO: 441565 - DNA, 537 bp, Homo Sapiens
  misc_feature (209)..(229): n is a, c, g, or t
agttattcaatattcatttattgagcacctactacataccaggcactagtaacacagataaagagtacactgataaagcttaattcagattaatctttaaaaatgctttctacttggcccctgggaccattgtatcttctgaagtcatcacagtagataagggagaaattttgccttaaaaaaatgcacccggttacagtgattaaaannnnnnnnnnnnnnnnnnnnnactaacatttgtggggtctaatggaatagtggggaaaagacaggatttggaataaggaaatccagtttaggcctattacttattagctgtgtgcccttaagttaaatttcacttatctggcctaactcttaattggtaaagtgataattggcctacagttgtagcatattagagccaaaaggaacagagatcatctagtcctgtgctttttgaagttcttcgttcaaatgaaaatattatgtagcagccccagtgtcaaaactgatgaacgcagtcactttgacatggccggaccggctgccataggg

SEQ ID NO: 441566 - DNA, 845 bp, Homo Sapiens
ccccccccgggaagtgcctggagcgcgcgacagcggcggggcggggcggcctggaggctgtggcgcgcggccggcagagggaggggagaggccactggggccgtgttagtctgccggtggggactcttgcagggccgtccccatgttgcgttttccgacctgtttcccatccttccgggtggtgggagagaagcagctcccgcaggagattattttcctggtctggtcgcccaagcgggatctcattgctttggccaacacagctggcgaggttttacttcatcgactggcaagttttcatcgagtttggagttttccaccaaatgaaaatacaggaaaggaggtgacgtgtctggcatggagaccagatggcaaacttttggcctttgctcttgctgataccaagaaaattgttttgtgtgatgtagaaaaacctgagagcttacactctttttctgtggaggctccagtttcctgtatgcattggatggaagtgacagtagaaagcagtgttctcacatcattttataatgctgaggattgaatcaaatcttctcttacctaaactacctacactgccaaaaaactatagcaacacctcaaaaatatttagtgaagaaaattctgatgaaattattaagctcttgggagacgtcaggcttaatattctcgtccttggaggaaagctctggatttattggagctttatgcttattggaatgttttaaaacttgccccgagtcacaggggattgcctggtaacttggtcttgcctttatgtttcatccaagtgactttggaaactcaattattccaagggggtccacaggaagttttcttacaca

SEQ ID NO: 441567 - DNA, 986 bp, Homo Sapiens
  misc_feature (112)..(129): n is a, c, g, or t
  misc_feature (134)..(134): n is a, c, g, or t
  misc_feature (140)..(140): n is a, c, g, or t
  misc_feature (144)..(144): n is a, c, g, or t
  misc_feature (155)..(155): n is a, c, g, or t
  misc_feature (159)..(159): n is a, c, g, or t
  misc_feature (236)..(237): n is a, c, g, or t
  misc_feature (247)..(247): n is a, c, g, or t
aggccaccatattcttaataaaagaccgataagagctgacaatttataaccacaggcaaacaatactttaatagtgtatagaaattcaattgtaaagtgcaaatccggcacnnnnnnnnnnnnnnnnnnaactntgatcnttanttacatgacanaacnccagcttcaaatactttctaaaatcattcatatgcaaaatacctggtttctgaaagggcatatgataagtatatcanntttcttaacntgtgatatggcttatttaataacatgtatttattgagagaagcataactttccaatatacagtatctttccaggtagaaagatgacatactggcacatttcaattttgtgttgcagttatctgagaatatactaaattgcactatttaagtggacactgtcatagatttaactgggaaagtctccataaatgttttccaatcttatcaaaaagcaaattggtcctcaatgattggaacagcaggttaaaccctttacaagtcagaattcagtgactggcaggcctgagtgcacacatgtaattcaatactgaggaactcccacaacactgtcttctaatttgcatgctcccacgaacatcacaaataatatacctgattggcaatcagtaaaacaaatctcaagacctggttgtcaagattcatacgacacatctggagttagggtttgcaaattgtattttggctacaaagatattaaactttatcaattattcgaagatcagacttgcctcccctcaacatagcatatagtgatgggtgttcatttaacattagtgttggccaaaattatttcatgtgacaacagtgtgaagtaaaactgatggtaaataagctgctgataaccctcttctgttgttttaagcctgtaattttacccagtcttctatttggaaatactctccaatttggttgtttttttggccaatgtttttaatctgtctctgtccttttatatta

SEQ ID NO: 441568 - DNA, 503 bp, Homo Sapiens
  misc_feature (98)..(118): n is a, c, g, or t
  misc_feature (483)..(483): n is a, c, g, or t
taagagactgtacatttttatttaataaaccacatggcaaaacaatactttaataagtgtataggaaattacaatgtgaaagttgcaaatacagcacnnnnnnnnnnnnnnnnnnnnnctttgctcttaattaacatggacaaaccccagcttcaaaatctttctaaaatcaatcatatgcaaaatacctggtttctgaaagggcatatgataaagtatatacaatttcttaaactgtgatatggcttatttaataacatgtatttattgagagaagcataaactttccaaatatacagtatcttccagggtagaaagatgacatactggcacatttcaattttgtgttgcagttatctgaggaatatactaaattgcactatttaagtgggacactgtcataggtttaactggggaaagtctccataaatgttttccattcttatccaaaaaggcaattgggcccccatggttgggtccgcnggttaaacccttacagtcgg

SEQ ID NO: 441569 - DNA, 1568 bp, Homo Sapiens
tttgattgagataataaactgttttatttattgaagagtaaaatagtacattaacaaaatcttatctgatagagagataataccagaagtcttcttactgtgattatcagctaagtgactggttgaaatcaggatataaatcactggatagtttttttctggaaagacttagaacacatcaataaggccctctaataaagaaattgaaatgagatcttgccctttggagaaagagaactgtgtaattcctgtagccagggcacttagtcaaagagaaacagagggttgtgacaatggtccagtgagcctggccccagaactcccttcaactagtctcttgcttgactttggggagaagactgggcattatttagaggctggagactaattcgacaatgggaagatgcaaaaattcatatcctgggttcaccctttgatgttgggccattaaatccagtttgtctttgcctctcttgtctaaaagatgctcagatattagtttcaccactttgagagacatggctgctgccgtcagtgagtgaaagattgtcttgctgcctgagatgggatgtgcctggccaacacccacttctctggttgtataagacagggacctaaaaagggaaaggatgggaggaggatcatcctgcagtgatcatgtagggcttcatgctataaatggttttgcatttccggagatgaaacaagtctcttcaccacagaactactgcagatcatagccctatggtctggctggttttgtcaatctggcagttcagggtcagtgcaaaggacatccccaacacctcaatcacacatacacagatggtgatgattccgatatacaggaaattggaatgaaacccacagtcttgctttcgcatagcaaccctccacttttcgatctgaggggcaagatgctggtgggccactggtccaatcactcgtgccatttataccacaacactgcagaaatgactggatggagtcccacgctgccttggtgctattgtctgagtggtaacggtggatgctgtcggtcagacccttagccacatactcattcagcttctgttcatatacaaagagcaggatggccaaggtcacctcagcaaggaggataatcagcagcaggatgaagaacgacataagcagacacttgttttccttgatagagcccatgcagcccaggaaggcaactaccatgataatagagcccacgatgacaaacacattgcccagcgtgagggaggggaggttatggaagagcactccgaagttgttgtggatcagcaggtagatcccaaagcccaaaatgcagcagccacagatccaaaagagcaagttgaagaaaaacaggacatacttcagcagtttcaagctactcatgcccatgccgtgatattcttgcccttttccaggcaccgttcctcagtcctttcggcagaatttagtgattatccttgaggtggccgagacaaggctggtaacacagatatccggggctgtgttacaggatcccagtgtccttcaagaccaccttggatgtttcttcagtctgtcctccc

SEQ ID NO: 441570 - DNA, 520 bp, Homo Sapiens
  misc_feature (45)..(45): n is a, c, g, or t
tacttccccggggatggtcctggcaccggtaccttcctattccanggttaggcatttccctatgtaaggaaacaaatacccccaaagacttttggtaagtaagagactccatctgttcccaatatagtcaatatccctcctatttgagcatcaattaagtggccttcaattaacccaccttgcattcggtaatagtctgaaggggagagttccttgattctgggaatcaaagagctttactgctgtgcctcatgcagagagcagaccagatgtcttctaaaagcgaggcagtctcctttaaatatgcattagagctagcattactatcacacttagccttccaaggctctaaaagcagtggcaaaggagggctaaacatacaaaatgcaagcaacttggtctgtaagcagtcagtatgtcattatccttcaacagaactctttcaattgaatgtttgtggtttagaggttttaggatataatatttctcacttgaaagagtttttttatattactatatg

SEQ ID NO: 441571 - DNA, 586 bp, Homo Sapiens
  misc_feature (60)..(82): n is a, c, g, or t
catggggtctgtataccttaaatgggtaaactgtatagttaagtgaactgtatctcaatnnnnnnnnnnnnnnnnnnnnnnnccaacagctgaagctcagaggtttccagtatctccccttggtccctgttgaaggggaaaagcaacaatttgaaggcttagagtagccaacactgactgccttttaatggacattcacattttataaccacatcatctgagcccatttcccatgcttgggaaactccccgccacaaatctacacaaaagatagggctcacttcctaccctataaaagaccagatcctggttttcccagtgctataaagccatgtgaccaagacttagctaatcagagcaaagcaagaaagtagagaacacattttggtggctatgtgacactttcgtatcaacaccataattctgataggctttatcagccagaatccattatttgactttaaagtaggattgacatatgtgacaacagggaccctgcagcactgggtccctcacttcctcctgtcccagtagctacatccctagggttaaaatcaccagaagagcagtttctctttaatctctc

SEQ ID NO: 441572 - DNA, 435 bp, Homo Sapiens
ttaaacaggctattttttatgccctggccgtatttcagtccctggcagagatagagtctacctataattcaaacatcttggacccagtaaccgcaagtatcttcttggaatattgactctttgtatttttttgggtctcatctaattttgtagtcgtgagctggtgcagtgtttgggtattgaaacatggattccatccgcacagtctagtcttggacgggcagggcaggaagagtacatccaccaatactttatttccattcactaacccagcaggttctggctttagtcattccactgagaaatgacaaagcagacagaaaaaccaggagactgaaagaatcctgagggccagggttcaaggaagctctttaatttgtgagcctttggaattaaaatcagtattcatggttcactgtgtaaaaatcctgcagc

SEQ ID NO: 441573 - DNA, 1427 bp, Homo Sapiens
  misc_feature (75)..(101): n is a, c, g, or t
  misc_feature (325)..(325): n is a, c, g, or t
  misc_feature (532)..(532): n is a, c, g, or t
  misc_feature (1225)..(1237): n is a, c, g, or t
ggtaagtcctttattcatagcacagtcctcactaaacataaggagcttcatctggaagaagaagaagaagatgannnnnnnnnnnnnnnnnnnnnnnnnnnccaggaagttgaagccaatgtccatgttccacaagtagttctgaggattcagggcttaaacgtagaggctgctgagccagaagtggaggctgccgagccagaagtggaggctgctgagccagaagtggaggctgctgagccaaacggagaggctgaagggccagatggagaggctgcagagcccattggagaggctggacagccaaatggagaggccgagcagncaaatggggatgctgatgagccagatggtgcaggtattgaagacccagaagaaagagctgaagagccagagggcaaaagctgaagagccagagggagatgccgacggagccctgacggtgtgggaattgaagcacccaggaagaaggtgaagtatcaagagcattcaggtaggaagaaccatactatgactgtcatgaatgcacagnaaaccttcacttccagcacagtattcagtgaacacctgaaaactcatgccagcatgatcatatttgagcctgcaaatgcctttggggagtgctcaggctacatcgaacgtgccagcaccagcacaggtggtgccaatcaagctgatgagaagtacttcaaatgtgacgtctgtgggcagctcttcaatgaccgcctgtccctcgccagacaccagaatacccacactggctgagggcatggggtaaaggttagaaaaccttcacctaggacttgacccttaccaaaccacagagaatccaaagcaatccatgataatgtcagtaggagacttaaccttagtgtgttacacacctgacttaacatctctaaactcagattgaaaagagaccgaatgtgcagattccacagtcttaagctttccccttcagatgtcagtgtctgcatgtgggaaagccatagcacacatcttacctttccaagtaatcagattgagaaaaccctatgagtattccagactacagagtttgcccaaatcaactgtaaatgacacttgtgtaacgtatatatagtgtttcatgaggtgtatataaaatagcaaattatgacagaacagtgatcacatatatttggatttatatgatatacagttacagtttactctgcagaggtaccttacctggtattctttgaannnnnnnnnnnnngggaggaggaagagagcaacaaatttgattatatttttaagtgtcttagatcctgagaaagatttattgtgcattatttgaaccctgtcaatatctttttgagtaattgatttgtttcttaccctttagtcttgtgaagctgtaggcatgatagataacatggcttttactccttactgtttggatgtct

SEQ ID NO: 441574 - DNA, 461 bp, Homo Sapiens
gcctcccaaagtgaaattcttaatgactggctacactaacttatgaatgccataatcaatacagattttttctccagagtcttgatagctattaatattttcctctttttttcactaaaacataaaatggaaatataattgttttgatttgaatttaatgtctatcaagattgcatcttttttattgccttcgtatgtgtctgtagatccaacatgtttatcaccacaactacctgagttctaatggtcccaagacaactctaccaccaaatttctacctttgtttctcaatgtctctgtgcattggcttcctctgtaaatgggaatacattacctgtttcaggttgttacaaggagtaaaggaaataatgtacataaagcatttggtgaggttttatatattatgatatcataatatataaagaacaattgtctaggttatctcctatagatgagttacg

SEQ ID NO: 441575 - DNA, 1057 bp, Homo Sapiens
  misc_feature (167)..(167): n is a, c, g, or t
  misc_feature (403)..(425): n is a, c, g, or t
  misc_feature (965)..(965): n is a, c, g, or t
gtccggaattctcgggatggcccctggctgactaaatgtcagtagcattctcagtcattgtaaacaccaagaataaaaagcattcccccaggttcaaatgccctccctgggaggttggtatcacctcccctgaatgccactgtctactgcattttgaggacacaggngagaaaaagtgcctatcctcaaacattgtctctgctgccttgcatttctttgggccctgaatggtttttctcccttcatttttcgagcctttctctcagtgcagctgttcttcagggaggaggttactgggcagccttggccattcagtgggcatggggacttggcctagtccctatatatatatacttaaagtccctatatatacttaaaggagagatcatacatgaagaaagcnnnnnnnnnnnnnnnnnnnnnnngccttacaacttttctttagaaccacattattggtcataatccttgttactgtcatgaggattgttgcatgggttaaacacaaacacagactagcaatgcacttgaacaaacctggtggtctttggaaataaatcaccattagatttcacctggttatgctgcatcccataagttcccaatgaatcacctgcttatcctattaacgaagcatttaattcacacaccaatggttgaatttccccctgtataaatgtagtcctgcgattcaacttttctaataagatttgtgaatgctgcatcatgatgaaaatgtggattaactgtgggttgcatgcctgttgttcatacttcagtgatggtcacacacaaaacaagatgagttttacttaggtgaaacattattaaacttgactaacaatacagaaacatattctcttttgcgctctttatcaccaaaactgaatggcaaatatgtcttgacattacttggatgaactgtggctagcaaaatttaattaacttagccactataatttttntaaaacattaaagtttctaaattgtttttggggcctagtaacgcatagttcataaaggtggtaatatgtaagcttttacatgggcttaagaa

SEQ ID NO: 441576 - DNA, 687 bp, Homo Sapiens
  misc_feature (484)..(504): n is a, c, g, or t
aatgatcaaatataattattatgtttatttgaagtgagatgatggaaaagatggcctggctgattttggaccgagtggcccatcacgatacctgaacaagcagttgtgagggtgggcctggcacacccctgggatgtttacaggagcatctggtccagtcctgtcttatggctgtgcccagctccagctctcgaagagtctctctgaggagcagggcctggagctgggcctgcaaagccagagctaccactagaagaagggctgggctggagcagggccaggaaaggagacctgtccaggggacaaggtgcacgcagccttcaggtgcagccagaacctgccggcagaccccaggccaccgacgaggcaggcctcaccaggaatgacacctggtgtctgaggtgaccttttattcccctaggtgcatgccatctttttaagtgagaagttttctaaagcaaagaataagcatctacatcttacnnnnnnnnnnnnnnnnnnnnngaagggatcctataacaaaaagcacttccttcttctagaaggaattctgagtctcaaataaagagaagatcttcttttaatatcgtttttctttctatgtaagaggagcagacgttattattcatgactatcaatcaatctgcatatgtaattataattgcaatgcaatacatatgaatataa

SEQ ID NO: 441577 - DNA, 712 bp, Homo Sapiens
gcaagctccgcatcccgggcacgccattctcctgaactgtaaaactggaataatacctacctctcagggttgttaattcagatacagtgcgaacagcgcctggcatacaggaagtttatatcaaatgtcatctctaagaatgtatttgctcgtattcagccaaattactcagagaaaaaagtattcccccagagaatttttaatggcctgtgactatgacaggcattcctatctattatatattctcctcctagatctcaagccaagaggaggcaggccaagtaacagtgcaagccttcggaaatcacctgttccaggtgccgactctgcccaggcattcatttcaagactcatgttccttgctcagatctgctccagctttcattgatctattacttaatcacctgacacactttgcagttgtgacccaaatggctaattctcagaagacaaattccatggtttaaaacagaaaattttgttctgtgctcccttccagcctggctgtgccctgacccttctatttgggatgtgggccttattccatcttcgcaaatagtctattgggaaactttggagaaggtgaaagattaggcctgcaggccctgtccatggccccagcattttataaagtttcttacaggagtaaatggactatcccctaaattacactgtattgactgtgaattccacatcacaaaccctgcagccc

SEQ ID NO: 441578 - DNA, 281 bp, Homo Sapiens
ggagctcggtacctactttccacagggcaaagccactctcttctccctcaggctctgaagagataacacaaatgtatggacactttttgtccttcaattaaaaaacctgctggaagctccagtgatgttaagaattaactggtagttctttatcttagctaggcttatgtattccaaattttgcctgttttcttggaattatatgaatttccttattaaacatttgatttgaaggaaactgtgcatgtctataatacccatgaggtaggtccgagctcgat

SEQ ID NO: 441579 - DNA, 832 bp, Homo Sapiens
  misc_feature (101)..(191): n is a, c, g, or t
  misc_feature (225)..(236): n is a, c, g, or t
ggatcccccgggctgcaggctacattgaaacttgagtttgtttcttgtgtgtttttatagaagtggtgttttttttccaaaaacaaagtgcaaagctgctnnnnnnnnnnnnnnnnnnnnnnnnnnnnnnnnnnnnnnnnnnnnnnnnnnnnnnnnnnnnnnnnnnnnnnnnnnnnnnnnnnnnnnnnnnngtaagaccctgtctctctgtctctctttctctcnnnnnnnnnnnnaaaggagtcagctctacaaagatgttgctttctttgatgcattgcaaaaagcaaagctttggactgggattcaggagacccggactctgtcattaaatcaactgtgactctgggccagttactttccatttttgagtctagatttcctacttattgagggagcttatttggatgatctttaaggtcttttttggcactaataactcggtgtctcttttttttcactttcaccatttcagttgatccaccaaacaaacctgagagatcaggtatggcttccaagagttgtctcggccaactctgatgtcatgcttactctgtactagacattgttcccagcattttacgtgcattaactcatttatcttcccaacatcttgtgagggaggcactatagagacgctatttgagatgggaaacaaggtacaaagagtctagttgaccttaagtacttataagaagtggagagtggagtcacatccggcttaagtccaaggttggctataacacatttggctcgttttttaccaaattttccaagagttcttgatccattcaggagttggccattggttattcgggcttatttcagcccg

SEQ ID NO: 441580 - DNA, 1131 bp, Homo Sapiens
  misc_feature (11)..(11): n is a, c, g, or t
gagcttgccancttcatgcgagctgtcttgggaaataaacattcgggccagtcaatcctttccttcggatatttttctctgtttccctttgttgccgggcgttggtaagggcctggactctcgccccaggaattcttcattttctgctgggctcctgtccttgatgcatctgtttggccagcagctgccctggaacctgtgtcctgagcaggtgcatcagatgaactcagcttccgagtaactttcccagccactttatctgacatgggtcttacttgccgacgaagagccgtaacctcttcagttttgcgacgtagaaccacttcttggtttcttttttgggcttccagaagtctaagttgatgatctcttttacgttgatcctttttcaactgagcaatctctctgtttcttctagactcagtcagtctggctttctcttgttcttctttcatttgtttcattaggcgaacctttgtttttttcatttccatcacatcctgctgcaatttcttcaattgcttttcatactgagactgatttttaagcaaccttgcatgttctttttgagctgcttgaagtctctgcagttctttgttcatggcttggagtttcttttcatattcagacctaactttttttgctttttcttctgagtaagattctaccgagcctaagttttgaagcacctggtctctttcaagctgagtatcccgaattttatgttgcagcatcattagcttctcttcatactgctttttcagagtctgcagtcttttctggctgttttctagttcatcaatcagcttttgcttaattgcaatttcacaagtaatgtttgccaagtctgcttgataattggctttttcatctgattcagaatctgattcatcagaactttcacccccatcaatgtcatcttcctcctcctcctactcctctccttcatcctcatgatcactcacttcttgactttcttccacttctttcattcgtttctctatccgcaccctattcttctttctactctcggtcagtgtctggattatcctctttacagccacacttgtttcttctcgatgctttccttcagttctgtagccttttttcttcccctgtctttcttttccc

SEQ ID NO: 441581 - DNA, 987 bp, Homo Sapiens
caccagcaaggaggacacggaacggccctgggggaaaggaaaactctttcggggcaaagccctctgggcaagaagcaaggggcctcaggcacaactagggcacgagcccaattcccaatcccagacagcaaggatggtctccgaaggggattccattggggttccaaaacccaggacttctgaggacccaagccctagttccaagtcatccgagtccagcctctgcaagaatctgagcacctgggagctggtggcaaggcagcccggggggctgaaaggcctcagactggaccacagggcagccacaggggccctgggcctcagggtcgacgatcctttctgcggtttttgtgtcccaacctgggaccctcgctgggcagccttcacaggcctttgaactgtccactgcagcttcatcttcttccctgcggttgagcttgcttctgttgagggggatgtaggcatagggatccggccggcctttcttcttcacatcaccttttgctttcttggccttgtattcagccccaggcatagccttcttggccaccagggcgatgaatgccagagcctccagcttggtactgagggggtatctccagctcctcctcctcagcctctttctggtgcttgagcttctggtgctttttattcctgatgatcacatcttccattgggtcagccatctcttcatcttcgcctttggcaccttcctcttcctccatcttgttgccgtctgcctcctcccttatgatcagccggccatcggcgctcaccttgaagccgtggtccttcttcctgccccggcctggcctggctgcgtggccaggactcgttgggccaccttgggatccaggaagttgaggggctcatccccaccgccctctttcagccatgcccggctcctctgtcgtgccagcttccgctgctccttgcctcgtgccgattcagccacccagcctcgtacctagccccgtaatgcttttt

SEQ ID NO: 441582 - DNA, 1092 bp, Homo Sapiens
  misc_feature (708)..(741): n is a, c, g, or t
ggttggaaggttcttttctggggttttgggttccccactggggaaactggccgggcaagcctcaaccagccctttgaaacggtcccctgcagtttatttttcttcttgcggttgagccttgcttctgttgagggggatgtagccatagggatccggcccgccttttttcttccacatcacctttttgctttcttggcctgtatttcagccccaggcatagctttcttggccacagggcgatgaatgccagagcctccagcttggtactgagggggtatctccagctcctcctcctcagcctctttctggtgcttgagcttctggtgctttttattcctgatgatcacatcttccattgggtcagccatctcttcatcttcgcctttggcaccttcctcttcctccatcttgttgccgtctgcctcctcccttatgatcagccggccatcggcgctcaccttgaagctgtggtccttcttcctgccccggcctggccctggctgcgtggccaggactcgttgggccaccttgggatccaggaagttgaggggctcgtccccaccgccctctttcagccatgcccggctcctctgtcgtgccagcttccgctgctccttgcctcggcttctttcctcctcctcattgtcctcctcgtcctctgagtcagctaaaatctcctcaatgctgtcacctttgccctgggcgggnnnnnnnnnnnnnnnnnnnnnnnnnnnnnnnnnnacggcagcctggctcagggctcggtgcctcttggcccgggcctcagctttccggatgttgaccaggactctgtggtactcctcgggcaacagccttttcaccagctcaaatccaaacttgcggatgaacttggtgaacaggttccgaagcttcatgcggaagtgccgccgcatgtcatctgaaagcttcccaatggcttccatcaccagctgcacatgtttggccaggtgcgccacgtccatgacagtcactgccaccttgatgaagcccagtgcagacttgaccacgtcacgggtgcgggaggccagaagcaggcctcgtgccgaattcgccacccaggcctcgctcctt

SEQ ID NO: 441583 - DNA, 640 bp, Homo Sapiens
ccaaccccaaaaagccgaaaaagagtccttaaaggtttaaaggctaaggacacaggcttgaaataatcgcccactttaaccaatggtgattgccactttggaagaataaagatgccaccaaggattccccaggtatagaatcaagcttggagctttcggcttaacaaacttgtgcttggttaattaaacagacacatctatcctcaaggacagaaaaagtcttgtttaacctccagaaataatgtagcagatggagttttaagaagttcagagttttggagcagccatcatttttggccaaatgggagcagggcctaagttttgagagattctcccgaaagctttgtttgctgagtgaattcaaggacactttgaaacatgcccagcagacatagtcatgaatatcatggccccttgctcctggctgcctcactggaataatccccctttgcttcgtaacagatgaagtttagtggagaatgaacatccgctgggctagaaatgcactgaatctcatagctggtcctgaaggaggaaatggagaagatggattaaatgtacctctgagtctaggggagaggaaacacctgcttcggaatctcagtttctagggagcaagccactgcccagcccttctgtc

SEQ ID NO: 441584 - DNA, 1091 bp, Homo Sapiens
ttttttttaacattttatagtttaaagagctttattaatgcaataaattaactttgtacacatttttatataaaaaaacagcaagtgatttcagaatgttgtaggcctcattagagcttggtctccaaaaatctgtttgaaaaaagcaacatgttcttcacagtgttcccctggtgtgaaattggggctccctcgcaaacgctggtttcgctgttcaaaaaagcggaatattgtatagaaaagcatgttgtcttcagtctgctttgcagcatctaaaaattttcgtgcagaaatgttgtcatggccaccaatgccccggataaaccttaaggcagctaacacttggtgtttggaaaggagaacttctactatttcatcatttgctgttgaaagtcgcttcagcatgtccagagatagctgatgagcaggaggatagaaactctctagggataacagcagacaagccaaaggtttggagtcgctgaggacgtggtactgcaggaactgatgcagcatataaaagaggttgtgctggacaagggttttgataacaagttcatgtaggtaatgctgtactgcaatctgaaactggttaagagaacgaatgtattccatcagcacggctatcacaaatttatgaggcatctccttcttttccacgaaggctgacaggacatgggtgtacacatctgactggtccagcaccgcctgggtccgcaccggcctcttgaggagcgggctgcttcggctctgccctgcttccaccgccatcgcataactctgctcggcatccaggtactttttatactcatggttgagtttatcaaaaacagtggctatcacgggcagcgatgctctgtctgactcacttaacatctgtgaacagacagacaggatgaccatcttgcattcctttctctggaggagaaagtccatgagtcttcctttgtctggtaagagatttactatgggctcaagtttcacttggaggttccagaggtaaccttggcttgcgctgataatgatgtcaggttgaaagacaatccaagatgacccatagagtttacatggaacagcacactggctggtca

SEQ ID NO: 441585 - DNA, 1227 bp, Homo Sapiens
ctcttccatttagcttttgtatttgtctctcaaagcagatagggtaaccccaaaacttaggaaaacaatgtattttattaaagaaaaataagttaaaacccagtagacacacctacgagatgctttctttgtccctcatttcatgccacatctaactggcaattaaatctcttcctttctaggggaacactgtgaagaacatgttgcttttttcaaacagatttttggagaccaagctctaatgaggcctacaacattctgaaatcacttgctgtttttttatataaaaatgtgtacaaagttaatttattgcattaataaagctctttaaactataaaatgttataaagtgtatctacaacctcaactgtcactaaaaatatggtatagaacttgtgggatggcttactcctaaaaggagagacagacagtgcattgattggcctttacagagtgtcagtgagcggatcacattcacagccatctagtgtcacctcctgcttgccaaagaatgaggtttctttcttgaagaggctgggagaagtttagtgtcctgtggttgcctccagatctagtaatactgcttcccaaagtcaaactgtgcattcctgagttcacaggcgctacgttcaaagctgctgccaaacaaccgatggttggcaccatccggtgttcaacttggccttgccgatgcagcacccgtccagtggtaaaccgaccgacccttagacacagttcagtcaggatgccctgcgagagggctagaaatttagaagccgttcgcgctctgttcctttgtatcgctcttcagtggcacaacttttggctttatttactgatggccctatgtaactgagtaagacagggagaaatattaatccgtgagtggctcccagtaagaccatggccaaatacatcctgaagtagaatatctggaaaatttgagatttggcaaaagccaacaccacaatccctccaaattttgtaagtgtgattccactgaacacggagctgcccatgtgggcaagtgcctcttccgcgcgctccacgcggctgcctttcatgctcaccgtgaacgctctggttatgtcgctgcagaactccacggagatgccacagctcatcaccaggttgaccaaggatacagcgttcagactgatgccccagagccacataactccaaacatgttgaccaagaccatggcgatggtggcacacatgatgact

SEQ ID NO: 441586 - DNA, 571 bp, Homo Sapiens
  misc_feature (44)..(44): n is a, c, g, or t
  misc_feature (46)..(47): n is a, c, g, or t
  misc_feature (55)..(55): n is a, c, g, or t
  misc_feature (491)..(527): n is a, c, g, or t
aatcaaccagcccaagttgaaagtccaatcagcaaagaaattcngnntttaattnttttggtgggtaaatgcgagtgagatcgaaatgcaaaggattcttctggtgaacactgaactgattgaacttgagggactaagttcaagtgttcagaatgaaccaccttatggaaaaatggttctggttgcacagacttatctacatcacatttagagtgctgagaatcattggttccaggctctatatgaatgtcactaagttggtccacagtactcgagactccatcttcagaaacttcattttcctgaatggtgatcctatctgccgactgagtttcctttgtttctttttcctcactaatccacacatcagtaatagtgcatggcaagctctcatctttgtttgttccacttggctcttgtagaatttctgtttccaaatcatcaggttcaccgctctcgacgaattcgagctcggccgatttggcctgatnnnnnnnnnnnnnnnnnnnnnnnnnnnnnnnnnnnnncgccgccaccgcgtaagcgcgttccctatagtgatcgtatcatc

SEQ ID NO: 441587 - DNA, 1309 bp, Homo Sapiens
cccgattcggactctgatcaccggctcaatggatgacctggcacaagatccctgccctggacccagagaagctcaatgtcttccggacagtacgggagatcacaggttacctgaacatccagtcctggccgccccacatgcacaacttcagtgttttttccaatttgacaaccattggaggcagaagcctctacaaccggggcttctcattgttgatcatgaagaacttgaatgtcacatctctgggcttccgatccctgaaggaaattagtgctgggcgtatctatataagtgccaataggcagctctgctaccaccactctttgaactggaccaaggtgcttcgggggcctacggaagagcgactagacatcaagcataatcggccgcgcagagactgcgtggcagagggcaaagtgtgtgacccactgtgctcctctgggggatgctggggcccaggccctggtcagtgcttgtcctgtcgaaattatagccgaggaggtgtctgtgtgacccactgcaactttctgaatggggagcctcgagaatttgcccatgaggccgaatgcttctcctgccacccggaatgccaacccatggagggcactgccacatgcaatggctcggtatactagtggcaccaggatctccaagggagacagagaaggggcaatacttggagcatctggggaatgatatggctaaggatagcacagagaggccagataatgctagggcctgcggatagaagatcctgaatgtctgggttggtctttgctgggaggtatggaattgaccttgggatctgattcttcctgaccttctctcttccactcagggctctgatacttgtgctcaatgtgcccattttcgagatgggccccactgtgtgagcagctgcccccatggagtcctaggtgccaagggcccaatctacaagtacccagatgttcagaatgaatgtcggccctgccatgagaactgcacccaggggtgtaaaggaccagagcttcaagactgtttaggacaaacactggtgctgatcggcaaaacccatctgacaatggctttgacagtgatagcaggattggtagtgattttcatgatgctgggcggcacttttctctactggcgtgggcgccggattcagaatgggctatgaggcgatacttggaacggggtgagagatttgatccctttcttcaaggaagtagtgtggtcccctagaagaacactggtcagagaaatgggaggcatgcattctagtcctgattttgccattaatttgccacatgactttgggtacttc

SEQ ID NO: 441588 - DNA, 1252 bp, Homo Sapiens
  misc_feature (527)..(538): n is a, c, g, or t
  misc_feature (673)..(704): n is a, c, g, or t
  misc_feature (708)..(824): n is a, c, g, or t
  misc_feature (1170)..(1170): n is a, c, g, or t
ttgaaaaaaaactttggcttttttattcagacacgtatgaaaacataacaataaacttcagtgatacaacagacgttttcccttagttccccatccaaggggacagaggtgtgcagctgaagctggatcttttttctgtcctacctggaagcttctcactgctggatgagaatggcttctaaaagtggatcttggggatccttgtgaatttgccctcggataaggagtgaagatcatttacggcacatgtggattatggtttacacaaagatgtccagttatttttccttctgactacccccaccaccacttcctgagatgagatgtctaggtataggaggatgtggctgttggggttagacttgattcagtgcaaaaacaagaaacagtgccccttaaacaagggctgtaacttaaatcagtttttcttggcaccttacaataagagcacatgcacaggaattgggaggattttgcatcctggatctactgcttaatttatttcatctctttaaggctcagtttcnnnnnnnnnnnncccctgtagagacagtgtcttgctatgtttccataggcttatctctaattctgggctcaagtgatcttcccatctcagcctcccaaagtgctggctgggattacaggcatgagccactgcacccagttctaaagnnnnnnnnnnnnnnnnnnnnnnnnnnnnnnnnaaannnnnnnnnnnnnnnnnnnnnnnnnnnnnnnnnnnnnnnnnnnnnnnnnnnnnnnnnnnnnnnnnnnnnnnnnnnnnnnnnnnnnnnnnnnnnnnnnnnnnnnnnnnnnnnnnnnnntccctttgtgtaaaatgagataatatgtatgtcacagaattgttttaaggatgataaaggactaagtgagataatgtaggtgaagtttagtatgatgcctggctcatagttaagtgctgaattatgatagtaatcaatatctactcctaacctttttcttcacaggttttaaggttctgtttttctagggggttaagagtcataaaccaaaattacactttcctctgctaggttcctccctttcctcttcttgacagtctgatgggaaacaaaggcacacataagaggctagtttcaagagtcaagagcctgagaggaagggatatggaagtatccttcatatctnccagagtgctgtgaagaagctgagaatggactgggaagacacaaaaaaggaaaccttcccttgggttggaagagaaaagtgc

SEQ ID NO: 441589 - DNA, 656 bp, Homo Sapiens
gtattacgcgttggcaaggaaaattgccagagatgtgcaatttacctttagatacaacaacataggcttgcttctgacaaggactacttgaatagcagccatcctccaaaccagaatactgctccatttaggagggaaaaaggaaagtaaaatttctataattatcagcaaaaagcatcaaaagggagagaatctgggagtttgaaaatggcctatgccggagcctgtcaactcacgcctataataccaacaatttgggaggccaggagttcaagactagcctgggcaacaaagtgagacccccatctttacaaaaaaaccacaattatccaggtgtggtggtgcatacctgtggtcccacccaacaaatctgaaggttctgagctcagagagcccagcagagcccatgaacagagagacaatccacattctgtgaagtgcaaagagaaccaggggttgactgaactgaccccggacagcacccaccctccagctcctaagcttatttaattaaatggtaaatcccaatcaaagtgttgaaagccagaaaagtcacaatgtgagctggcaagaattacatggctttaagctaggcaagaaactggaagaggaatccactatatttcttctaaagccgaattcgtacagcccgggga

SEQ ID NO: 441590 - DNA, 817 bp, Homo Sapiens
  misc_feature (623)..(623): n is a, c, g, or t
  misc_feature (658)..(658): n is a, c, g, or t
  misc_feature (783)..(783): n is a, c, g, or t
ggatggctcacaagcccagcccaccccccaaaaaaaggcaagactgcagtaacagaacaggtccatggtggccagaggttagggcaaggaaaggtatggctaaattcaggttccacacagatactggtgaagaggggcagacaggcactggtcttttttaatttttctgtgaccttgtgctactcttttgtaaagagcttgttcagtagggcacattaaaggctacttcattgctatgctgggatccagagagaaagcttggacgggactgatgatatttgaagtactcaagggaaggaaggatccagtgtgcgggaagctctttggacaaacgggaagactcacagcctcaccggtttcctctattcctagctgttaggtttaggctacttggacaaagcaacatagaaaacagccaagaaactaacccaagtgccaactttttcctctcccctaaatattaatccataccaatcgttccaatgacctacacatttattatccatctgtaatagggtggtcaccagtgggaaagtcatactaccacgtggatgccgagtcaccagtcacctttggaggccctgagagcctaagcagatctggaccctaggcctctagtcttnctctgaaacccttgagtacttgaacctttcagaanttcagattatgaggggcctttggagcttgagtgccaaagggtcgacatctagagttctgttgctatgaaaggaactgcaactattgggctagtttctacatgtcttttcatttaaatcaaactgnagggtcgcttaagacatttattcctgctatatgc

SEQ ID NO: 441591 - DNA, 740 bp, Homo Sapiens
atcccttgggctgcaggcattcggtacgagccttattcatggttttcctttctgaggttttagttacccatggtaactgtggtctcaaaatattaagtggaaacttccagaaagaaacacttcataagttttaaattgcatgctgttctgagtagcatgatgaaatttcgtgctgtcccatctgggatgtgaatcatccctttgttcggtgtatccacgctgtgtatgccacctgcttgttaatcattgagtagccatctctgttatcagacccactgtgatgggtatcacagtggcttgtgttcatgtaactcctgttttactttaatgggcacaaagcagtgatgctgggcatattgttttaattgttctattttattattaggttattgttaatttctttttgtggcctcatttataaattaaatatcacaagtatgtatgtataggaaaatacagtatatatagggttcggtactatctgcagttataggtatccattggaggtcttggaatatagctgctgaggataaagggggactattgaaattcatattgcaatcatgtgctaccactctcgtcattcctttaccctggatttttggttaaacatttaggccatttgtttggtatatgttcatttgtattttcggtatgttggtttatgggctttactttttcatatactgccactgccactaaatggtggcctctgtcggccttgccttcttttttcttgg

SEQ ID NO: 441592 - DNA, 1084 bp, Homo Sapiens
  misc_feature (977)..(977): n is a, c, g, or t
ggctgcaggagaaaaacgattgcaccttctccaagtctgcctttttaaagctacagttaagttggcaagacttccccagctctgaatatagccatttgccgactccggcctctttgcgagactgactcaaatctgtgatcttctgttcagcatacacatcagcaaagtgagaagatgagcactaaatataggctctattaactttacttttagatttactgccttcaaaaagtgcctattctgagcaacataaacgttattccttacatatgtatgtacacacggtacccagagtcgtactgtgcagccttcaaaaacataccatcagaaagagtaggtgctgagataaggaaactttgccaaatgaaagaaagtcactcacttccaatatcccctctcaagcggctaccgtgaaacgggctgcaaacacattccctgagcatcccttgctgatacagcttctttatatttatatcctactggatggtagcatattgctaaggtttcctgtactctgcttcaagggaatgtaagctttatggcattgaaacatttaggatatgtgtgttctataaactaagcatcggtgggtttagagtgttaaagtgtcagcacattccttctccttttgtctctcaggctaacatgagagaaaatagaaaagtcttggctgtggggattggaagctcagggggccaaatgtccttgccagatccttagagcattactttgactcctaaaaatagtagtgtatgttatttgatggcttttgtttccatagttccatcactgacaaaactgtcaatactgttgatggagcagtagcatagcctagagtgatgcattcttacccagaggtggcaataggagagggtccatgtaaataggacgaggtagacagtgcatgattgtaggagaagggttgaagggaggacatgattccaaaacagatcgttctcaatgtgtcgtcttgactncaaccagctgggcagatttacacttgccaagtcgtttcccttttccttcttaagttcagtttggctccatatttcacttggattatggcctttgttttggggcaaag

SEQ ID NO: 441593 - DNA, 696 bp, Homo Sapiens
  misc_feature (341)..(362): n is a, c, g, or t
  misc_feature (375)..(443): n is a, c, g, or t
  misc_feature (508)..(642): n is a, c, g, or t
gtaaatacgataataatttcataataatatgcttcacctagatttaccagttactaatattttgccagttttattttctcacacacttttgttgagcatctgaaaaccatacacatgatgacagttcaacccataatgttttagtttgcatctcccaagaataaggtttttcttctgtataacaagaatattgtaatcatacctaagaaaatgaattttattacatatgtgttctatattcaaatttctgtaattacccctaagatgtcttttaaatgatttttagcattgatagtctgtgcctgtgtagattataacattggctattgcaaaataatggnnnnnnnnnnnnnnnnnnnnnngagacgaaatctnnnnnnnnnnnnnnnnnnnnnnnnnnnnnnnnnnnnnnnnnnnnnnnnnnnnnnnnnnnnnnnnnnnnnaagcagttctcatgcttcaccctcctgagtagctgggattacaggcaggtgccactgtgctctgnnnnnnnnnnnnnnnnnnnnnnnnnnnnnnnnnnnnnnnnnnnnnnnnnnnnnnnnnnnnnnnnnnnnnnnnnnnnnnnnnnnnnnnnnnnnnnnnnnnnnnnnnnnnnnnnnnnnnnnnnnnnnnnnnnnnnnncctaaaatgatggttttctgattctagcatttcttttataagattgctatgtaa

SEQ ID NO: 441594 - DNA, 678 bp, Homo Sapiens
agaacttgttcttgaccttcaatttatttagtgaactttctaaccgcatagactaggacacaaattacgtctcaaggtaacagtgcaagttagagtacggtattcagagaaaagagaaaggctgaatcccaaatgtttaactatgcaaaacccaggggtgtctggggcctcggacctttgcagaccccagcacggcacagaaaggaaaccagtatttgcaccgtggcaaccgcgaaccaggtctttcaaacgcccgactgcatgtgagccttacattcttgctcgtgccgaattcggcacgagggacatatgctatcacatagagttgggatacgtttaactttattaggaagagccagttttcccaattggttttaccattttaacactcttagtagcaacatgtgagggtctagatgttccatgtgcttgccagcacttcaaattgtcagtccactactgggtagtggtctttcacttgtgcccccctttgtttttaaagaagctgtgccaatctttgcattggtgttgtaaaggtcttggtaaggccttctaaattcagatcttgtgattaacatttcccaaggcttttctaatgaccccgtgccttttgagaaaactgtagctttttctaatgtaaagggttttaagctgtatttcaaggggacattacttgtg

SEQ ID NO: 441595 - DNA, 175 bp, Homo Sapiens
caacttgagggattctttatattttctatgagagttcctttgtcaggtgtaccttagagcaaacatcttcttccagtcctgtttcttgtcttttccctatcttaacagcatcatttgatgaacagaactttgtacttttgatgaagtgtactcgtaccgaattcctgcagcccaa

SEQ ID NO: 441596 - DNA, 1614 bp, Homo Sapiens
gcgccttaggataatagaaacgttgtataaaaagcaggctgtaccggtccggaatcctgggatatcgtcgaaccacgcgtccgggagaaaacattccctcttgcaatggcaagaactaggggcagttctctgtccctcctcccaacccctcctttcgcctgcccttgtcctgatgcctcaaggcttagagagaaacattgtatccagaccgagggctctgctgcttctttccagaaagtgattggcaaggctttggagagaagagcagttctgcagctggccttgttccttcatcatcccccttccttgtgcattatgcacttgctgctgcctcctgggctttgatagaagggcagggctgttgagctggatgggtggaggcttaggtagccggacctgcctgccaccctcctctcccactcaggcacaatggtgcctaaagtgtttccaatctctgggacctctgtacccaaactgaaactctaaattggggccctaactaattttccttttgaggttgtgggcataagtgctgatctagaatacagtctgggtcccacactgtgtctcagtgagactgttgatgccttgagatgaccatttcagatctgaatcccatgggtgtgagggtgatgggtactccaggactggcctatgctgtgttgtgggctttggttcggctttatcaggggccaggcatatgggttctagagtacctaccatgacctagaagcatttatgatttatttgaagccacactgtttgcatgggtgttacttgtctgtacctcagagtctgaggatgttaactttggaactcgcagtcctctagaacagcttcagattatggctttttcttttgaggaagaaattattcactccagatgcatgccctgagccagacctcactgctgcactttccaaggtgctaagattgctgctctccaatgctaactttctgacacagtgctctagaaccctgcctgtggtcctgagcactgatcagcttagctagaccatggttgactcttcttggagattttcacttggtcctagaatgtggcaacgtagttgtgctcgccagaacgtgggaccaaattggcctcaggtgttgagtccagacttctgcttttgagagagggctgcactttttcatggtatttctaggggaggtggtaggctgcatgtgccacttggtcttgttgtgagtatgctgacaccagaaactcagagccagcttgtggcaagaagttggggtggggggtctctgacttgctcaggacaaactaggccagtggttttcaaactgcttggcagagccctgaagtttcctaggggttgcctcaggagtccttggggagatgaagggggtggggagctgagcaggctgggcaatttgccctcaaacagaacagctccccttgtagctgtcttacatatcggggttcagggtaagattttatttgcattaaggggttgctgctgaaaaaaagttggaaaaccactgactagaccatcggctccaaattggagtctgtgcttccttacccaggtatggagcacactcttcaaccataccctctaccacaggacacatatccctgttagcattccc

SEQ ID NO: 441597 - DNA, 601 bp, Homo Sapiens
  misc_feature (66)..(177): n is a, c, g, or t
tatatattacgatagccacaaaaaatattaaaaaagagtgagaagtggcagtggaacaacagaagnnnnnnnnnnnnnnnnnnnnnnnnnnnnnnnnnnnnnnnnnnnnnnnnnnnnnnnnnnnnnnnnnnnnnnnnnnnnnnnnnnnnnnnnnnnnnnnnnnnnnnnnnnnnnnnngttatagtataataattttctcttacacgcatttgctttattcgaaaagaggcttttaaaatgtgcatgtttagaaacaaaatttcttcatggaaatcatatacattagaaaatcacagtcagatgtttaatcaatccaaaatgtccactatttcttatgtcattcgttagtctacatgtttctaaacatataaatgtgaatttaatcaattcctttcatagttttataattctctggcagttccttatgatagagtttataaaacagtcctgtgtaaactgctggaagttcttccacagtcaggtcaattttgtcaaacccttctctgtacccatacagcagcagcctagcaactctgctggtgatgggagttgtattttcagtcttcgccaggtcattgagatccatccactcacatcttcc

SEQ ID NO: 441598 - DNA, 686 bp, Homo Sapiens
gcacgaggaactagtcttgaagcaaaggaatcctgcccaatcccctgagacaggaagccggaaggaaaggaaggatgcagataagtttgcaggtggcaaggagagagcacaagaagttaaggaagttcctgtctgatggcatctgttttctctgttaagtagctgggaagtggtggggtagggagaatggtaagctcttgtaaatagctcttgtgaggactagtttgcctgcaatgttgatggacccacatctatacccaggtagatgctaacctatagcaactgtataatttcttctagcaatgccctaatctgtcagcattgccctctcctatgcaggcacagtagaactaaggattaagagataccttagataacaatgggaagaaaatagagtggtctagtggaggagaaaaagactgaaaaataggcatagttagtcagaaggttgaaaggctgtggtcagaatattgggagtttatgatttttgatatgaagtgcttctggatgatttcatccacccatctatctaatcagtgggagattctgatgggtagagaggcaatacagcctatggtgtggccatagtgaagtagaaggcaaatggaggtagctagagttgaagtgccaagataacaagaggccaggaagtggacagtcaaccagatgagaagactttgccttgc

SEQ ID NO: 441599 - DNA, 1001 bp, Homo Sapiens
  misc_feature (77)..(113): n is a, c, g, or t
cggaaatgtcactacgaactcacctaattaagggacgaccctccgggggggtttttaatcccgacgggtggcggcgnnnnnnnnnnnnnnnnnnnnnnnnnnnnnnnnnnnnnatcaggccaaatcggccgagctcgaattcgtcgagagcggcgggtcacatggcccgcgggacaacatggctgcgcccgcactagggctggtgtgtggacgttgccctgagctgggtctcgtcctcttgctgctgctgctctcgctgctgtgtggagcggcagggagccaggaggccgggaccggtgcgggcgcggggtcccttgcgggttcttgcggctgcggcactgccccagcggcctggcgcccatggcaattcggcagccgctcaccgatactcgcgggaggctaacgctccgggcccagtacccggagagcggcaactcgcgcactcaaagatggtccccatccctgctggagtatttacaatgggcacagatgatcctcagataaagcaggatggggaagcacctgcgaggagagttactattgatgccttttacatggatgcctatgaagtcagtaatactgaatttgagaagtttgtgaactcaactggctatttgacagaggctgagaagtttggcgactcctttgtctttgaaggcatgttgagtgagcaagtgaagaccaatattcaacaggcagttgcagctgctccctggtggttacctgtgaaaggcgctaactggagacacccagaagggcctgactctactattctgcacaggccggatcatccagttctccatgtgtcctggaatgatgcggttgcctactgcacttgggcagggaagcggctgccacggaagctgagtgggaatacagctgtcgaggaagcctgcataatagacttttcccctggggcaacaaactgcagcccggccagcattatgccaacattttggcagggcgagtttccggttgacccactggtgaggatggcttcc

SEQ ID NO: 441600 - DNA, 607 bp, Homo Sapiens
ttcaagaataaacattttgactttattaatttttctctattttttgtttgtcctcattagaagctcccattttcccatgtcattggtttgatgtgtaatatttacatgatcattcaatttaaaacattgtctgacttctgttttgttttatcagttaactcattgtgaattgagaggtctgctactttattttgataatgcagggatattatttatctttgcagaatcaggtgactcccaacgttcccggaatcttctagtggtctgtgtcaggggtctgggctggctggggttcagtgatgtctactggaggcagcttccatgccttctggggtcctgagtctccatggcttgtggggtctgggtcccccctggattagtggatggccagagtggcatagacactgggctcagctggagaggccccttcctgggatggaggaggctcagttgccttctgtctgagggtaaagctgtgcagccgggcgtaggtcacatccttgggggcttcagatgcagcagcctcagtgtccatctgtctgtcctcttctgcctgtctgtcctttgtgttcaggaattcctcagacagtgggggagggagggaggc

SEQ ID NO: 441601 - DNA, 617 bp, Homo Sapiens
gttgaatccataatacaaactctccaacattacatgaacattctaaatggatacttatcattttctcagtaacgaaatagctcagctcacctaaaacagtatctggatgtgcaatgataaaatgcactaactcttatgaatttacttaaataattatttaagttaaattcctgcaaaagcctaattctgacctggctttacctggaatatatttttgggtatcagtaactgataccctcctttcttatcataaacaatacttctccatcaagagataccaataaagaaaaatatgtaaggaacaaaaaatgtgatgtagaaaccaaccattccataggtaatataccgataaggaagttcaacttccatgtgctgtcttgcttttcgaatatcatcacacggtatattgaagattttgcaggctaaaggaatggtgatctttttcattacatctctgattattagtacaaataccatccctatgaggatccgcaatatggcttttcccaacagagtcacagtaatggggggcccagctaaaggtaatgtatctagagaaggatctaatactagacccatgttataagtaacatgagatccacatgcattccaacgct

SEQ ID NO: 441602 - DNA, 900 bp, Homo Sapiens
  misc_feature (422)..(446): n is a, c, g, or t
aggctagagttcgcacgaaatgcaaggcgagttggtatacggtgctggtatccatatgaacttgtctagcggccagaagcgaggttcgctattatcttgtttgcactctgatctactaagtctgtgattctagttgctcggatgagagtcatatattagtgggtggggaggtctagctgaagtaacggtgggatactgggcggtcatgataagacagatgttagtaagatggggtcgtatagtgtataaaataagagagaggggggaggtggtgtgtgttaaatatatagtggtatggggtgaggtggtggtgggctgaaggagtgaaaggggtggttgggcggttggttgtcccctaaaggtgtgccagcacaccaggcgagcgccgtgatatagtgatgtgtacacgatatataggtgannnnnnnnnnnnnnnnnnnnnnnnnatagagggcgcaaagaagccttacaggcgtctgatgatttttcttcgaaaacattgcgatattctgggaaattgttgtattaaggtgtttcgagggcttcgggtttttgtatagcacccacattgctctttgagatagctccattccactccagagattttgaaatctgtgggtcatggtaagggactcttctttttgaaataaaacttggctctttcgtgatgcctaattgatctgatctaagtccagcccatgggtactttcgccccacggaggaattacaagactctgacaaataagactttttccacaggaagttcctctggtattcactcagccccttgaagcgcaccggcatgtcgcccggcgccggagcccccgctactccgacagttaactggagaaaaagctccgagggggcggggcgataacagtgttccctagcaaagcctcg

SEQ ID NO: 441603 - DNA, 609 bp, Homo Sapiens
  misc_feature (473)..(522): n is a, c, g, or t
aagttcagagtctgttaatctgtattaatctagtttacactccctacaggccaggtagacacaagtttctcagcacagcaaagatcatgtctgtggttaaactcagaaaggtctgagggagtaaagctctgagtgaggttttgccaaacaacagaaggctaaatctggcttctttgtacttagggctactgatcgctgttggaggaaactttggcagatgcaattcctcccttcctggtctttaatctaggttaaatatcaccacctcgtcccacctccaccaccaggacaaagagttatgctactattataaattgtactctcctgtccactattcctttccaaaaacaaatcacatgacattacagaagcttaattgcaaagtacgtgaggtgctaatatcgatgtatagcatattcaaagtatatgtagctaatatctatatataaattctctgtgtaagattcaggccnnnnnnnnnnnnnnnnnnnnnnnnnnnnnnnnnnnnnnnnnnnnnnnnnncatattagcagtttgggggttctgaatgtatttaaatgatcattgtgaggcaaagattctgacttgcctaccaagataaccattctt

SEQ ID NO: 441604 - DNA, 928 bp, Homo Sapiens
gttctagagggtcccctccagtaatgtgtgaccagggctggtttaaaccagataccacattttcttcctactgaaaacaaaatgccagtggcattggtttcccctgggctagaacagtttttttcttacctctgtaaggtgggttctgtaaaaaatggaggctttagagaaaagccaatcatttttaagtccaatggcaaacatagtgggggctgcagtagcacctagcttttaccttaatttcgacacacttctgttgaatctcaccagaccatgtgggaggatttaggtgaatccctagcagatggcttcccagggctccctgagtgtgtccagataccaagtgaggaatgaggtgtgatttgctgtatcatttgaaccaaagagtatgcagcatgagaatttgctagatcgtttatcctgactgaaatagacaaagtaagagggaaaggaaaagaggtatcaagtaaatactgaaacccaatggtgtttttaaactgtttctgtttttattcatcttttgtaactatgacagaaatgtgctattttttcagtgggcaattttgtaatatattcagactatccagatacagagatgactaaggtcattgatagcgtctctgaacaatcagacggatcaccttatctctacacagctggcaaacaccaggctgcggcttggattaaccaggaaagaaagcttttctcactgagttgtttttatgtattgatggggacttttccacctcattagactaatactcattcagagtttggttctgctgtaaatccttgccgcctgctgaaacatggtgtgcaggtcaacggagaatactagctgctcctttttcaccacctttaccaatttcctatttgatggtttgtaagtagacagtaaggcaaggcagatgattattaccctcagggt

SEQ ID NO: 441605 - DNA, 1191 bp, Homo Sapiens
  misc_feature (91)..(104): n is a, c, g, or t
ctgagaacacttttcataaatttgaggaactgcctaaatattataggcttgaacatctgaacttgtcctcagcatgaaagcaggtgagacnnnnnnnnnnnnnnaaacaaatgagcaggtaacacccagagaggttaagtggtttagccactggaaagataaggaagttgggtgtgatgtttacttctctatgatgatgcttctcaaactttcatgtgcatacaactcctttggatctcatcaaaatgtcctgggtccagagtggggcttcagattctgcatttctaataaggctctaggaaatgttgaggctcttggtctgtgggccacacttttaatagcatggactacaacacaaagacgggatccaccccggccttcttgggtcatgagaggcctgctttagcgttatctgcctctcccaagcacatccccaagcaaaaggtttcgatgcactgcataaggtggcagctgcctacaagactgcgttaatatattttctgagagcaccgtgactacatgaacagccaacaagtaacataatttgagtaacataatctaaatttgacaggtctatttgctgagaataaaactcatctcctacttatgaagtctttcttaaagtgaacatgatatataaaggtattaaaaaacccagcatattaaatttcatagtaaaatgccgcatgtgcacatgtatacagatagtatgagttctaagaaattcaatgcactgtaatcagaataaagtgctaccactgctcccagctaaaatcatctcctcttccaaatataaggaaaaacccttgaattgtaaggaaaatgactgcattgcctgccaacacaaggccgcaggctccccatttgatcacagccacacgagcaagaataacaggaaatccaaaggcagaaacaacaattccagtagtgaagaaatatgccagttcccgacaggcactactggttgcatctgagtcataggtgactcttttggcaatgaaatgggggatgggggagatggcgtggaaaatcaggacgaataagggccagtaaacgccataatcctctaaggcacatcccagcataagaaaagtcagtccaatagccccactgaaggataatgccacgagagctttaacgcccgccatgtctcccgaactggggccgcggctgcttccggcttcctgcccc

SEQ ID NO: 441606 - DNA, 2004 bp, Homo Sapiens
ggggacccccatttgtagagttcatactcttcggcaggctgataattcgtgctacaggtagtttgttccccctccataactcgcttttctctgcacattaatgactttcacgtgtagtatttaaagactatactttgttcatgcacagaccccttgtatacccctgtgaaacagtaagtgacacttgagtgtagaccttcctcttgaccaaggtgtaagaaagaccatttcaataacctgtgccaccccagggcttttccgcaaaatgttcctgtcactcttgaaaatgattgtaaggacaattaatattttcagtggggacaccaaatgtaattaatttgacccctagcataggaccataatataatttctttagccatttttcatgagaatagttcattgtacagttgaggaaacatatgaaataaggcctgtggcttgattgctagtggttaagcatgttttcaatctttgccttaatgtaaaagatttgcagtgaactgcaaactgatgcagaatatctctcctgcttttccaagtcttgttcaggaattgtaaggttcagtaaattttgtcccacaggattttaaagcctacgtcttgtatataatacaatgcaggcctacaaaaatggtgcagccatatttacaaatttagttcacagactgctgcagtaaaatggctggaaagttttgttttgcttgtttcacaatttctctaaacagcagcagaatcttaaaatacctggctggcatctcttttctttgtaacaaataattcactttagtatactctgtgtatatacaaagtttttgtatgttttataaaaattcacagaactgcaaggttcagtcatcttttttacaccagagaaccacaggtcaagagtcatctcttcaagcagagtttgagggagctgcgtcaggccaatggtgtctttatttattaatactcgcatgtggcccttggaattccttagctgtatgattaaagacttgtaaccagctgcatttgtccttctctaacatctccttctggaatacacccttctttgttaatggggattatataaccatcactattgcccctgctgatctggtagcacatctgaagctgatggccagctccaagatttggcatgcttttatagtaaatgtcctcattctcactcctcctggagggagagaggtcttcttccatgtcagggctgctctccggatagggagagtctctaagattgggcatgcttgtataaagagagtctctgttgggggactgtaggtgatcttcagcctctgctgtcagttgggagacatagctgtcagttccctcggacttcactttcttctggggttggtacagaagggagtgagtccgctgaggaataagtggtgcctcgagttctttgtgatggagctccagccctgggttgtcgctgtgcattaaagatgaagcatctgccacaatagcatcatcttcactgctgctacctccaatcacaggtttgactggtagcgtgagctcgaggttgtgagtcttgctgctgccccgtaagttgttgtgcactaattctgaaatgatcattttctcaaaagcagtatcattcagacttagtccacagtccacaacttgcacgctgtcattatagtcacccttgtgcagcgagtagctgttgttaaaattaccatttagcggtagagtatccatggcacttgtatccctggcattgttcagtgaatgtcatcatgtctgtctgctcaggctactctggcctaagagtagctggtgagttaaatacaggagctgaaggggcattacatacaactgtttcagcgagcaatgtgttataggggttgttagtgccgtggggtcgaagaagagggctttgttagtaggtaattgccagtcattccttgattaagtgttgaagtgctattgatgtcacctgagataaaagaagattctgattgttttctcacagtatcattccacattcttcttata

SEQ ID NO: 441607 - DNA, 1177 bp, Homo Sapiens
  misc_feature (1007)..(1007): n is a, c, g, or t
attcggtacgagagttggtgttgtctttataaaatcaaaatacagaggggcaaaaattaagtttggtaagaatgttaacattgaagaatgccttaaccccttatttcatgttgatcaatcttaaatctagcaaaggactcatttattcttacttctccacctatctttactcagagatgatctttagttccattgcataatgacgagattttaattagatcatagatgggggaaatgttaaagactacaggaatgactagcacctccaaatacaccaatccaggtgaagtaatcaccagggcataaggccctttgggttctcttcctttgcaattgtgtggattcatggcatactttccttccaggaaaaaaacgtgactaccagcgtctgggatggcccagcccggacgaatgcctcaaactccgctgggtagagctgactgccatcgtgagtacctggcttgcagtttcttcaaaaaacattgacatcacagaacacatagattttgccacccctatacagcagccagcaatggagcctctttgcaatggcaatctccccacgagtatgcataccctggaccacttgcatggggtttccaaccgagccagcctgcactacacaggggagagtcagttaacagaggtattacaaaatctcggcaaagaccaatatccacaacagtcgcttgaacagattggcacccgaattgccaaagttttggaaaagaaccagacgtcctgggtcctctccagcatggcagccctctactggagggtgaaaggccaaggaaagaaggcaatcgactgcctccgccaggctctgcactatgcgccacaccagatgaaggatgtgcccctgattagcctggccaacatcttgcacaatgccaagctctggaatgaccccgtcatagtagccaccatggcagtagagatcgcaccacactttgctgtgaaccacttcactctgggcaatgtctacgtggcaatggaagaatttgaanaagcactgttgtggtatgaatcccccattgaaagcttcagcccggagtttgtccccagcaaaaaaccgaatccggaccatccattgtccacttaatgctgaaagaaaggaaccggcgctctcccttaattgaacttccttccttccccccctttcccctttaccccagga

SEQ ID NO: 441608 - DNA, 1026 bp, Homo Sapiens
ggaattcccgggatgcgagttgcattgtgggagctggggtcagcggcctggcctccatcaagtgctgtctggaagaaggactggagcccacctgctttgagaggagcgatgaccttggggggctgtggagattcaccggacatgttgaagaaggcagagccagtctctacaagtctgtggtttccaacagctgcaaggagatgtcttgttactcagactttccattcccagaagattatccaaactatgtgccaaattctcaattcctggaatatctcaaaatgtatgcaaaccactttgaccttctgaaacacattcaattcaagaccaaagtctgcagtgtaacaaaatgctcagattctgctgtctctggccaatgggaggtggtcactatgcatgaagagaagcaagagtcagccatctttgatgctgtcatggtctgcactggctttcttactaatccttatttgccactggattcctttccaggtattaatgcctttaaaggccagtactttcatagccggcaatataagcatccagatatatttaaggacaagagagtccttgtgattggaatgggaaattctggcacagacattgctgtggaggccagccacctggcggaaaaggtgttcctcagcaccaccggagggggatgggtgatcagccgaatctttgactcgggctacccatgggacatggtgttcatgacacgctttcagaacatgttgagaaattccctcccaaccccaattgtgacttggttgatggagcgaaagataaacaactggctcaatcatgcaaattaccggcttaataccaggaagacagggactcagcttgaaaggagtttgtggctaaatgatggagctcccaaggacgcatcatcacctgggaaaaggggttcatcagggccaagcattaaacgaggtgaaaggaaaaactcctgtccttattttaacaattaccttcaaaagggaagaagcctaatttgaaccatcaatttgggcctttttggcccaa

SEQ ID NO: 441609 - DNA, 697 bp, Homo Sapiens
  misc_feature (453)..(466): n is a, c, g, or t
taggcctgattatcttctaagaacaaattcaataatagccagtggaatggaatagcttccatattcctttaggtgggactttaaattctctcaataacaattcatattaaacgtcattccctttgtcaagagactgagttctttagttctgaccaccaaaccttactgttcacaagtgttagaattatgtcgtcctagagctggaagaacccactctgaagactacccactcattttgtaaagggtattagaacccaagaaaggggatggacttgaccagtgagtctgaaccaggactggagctaggatattctaccttctagctcagtgcttttgcatctttttgatgactattttgtgatttagttctatgatgaagcattcaaaataaatcccttaactgtccatgccactgtttattcatctgttgaagattgtaatttccccattgannnnnnnnnnnnnnaagttcctcaagagctgggactgtgccatccatctcagtatttcccaaggcacctaactcataaagtgctctacacacagagctgctcaataaatggtcactattgaatagttgaatgaatgaatgaatatgacctttaattgggccttgcaagtgatgacctcttcagaattaaatgattttcttctaaagtggggcaccatctcagccattcatttggttatctttcgg

SEQ ID NO: 441610 - DNA, 427 bp, Homo Sapiens
attggtacagacaggtctttattgttgacatattttctcatttaatccttgaagcaaccctgaggtaggttttattatccccacttcgcagatgagtaaactgatgtccctaggttaggttacttgccgaagatcacacatttactagtggcaaagccactgataattccaaacccaaggggactcttttgagtagttcacaggctgctgccaaggaaagtagagcagaaaacttcaaaggggaaggactggatcattgactggagcttgaggggctcaagcaccagggatgaacgaggcacattcacaggccaagaccaggactcagcaggagaagcctaaagccatgtgcgagtggtcaagcaggaagaggtcttgacgtttggtaagagctgacaatgtcatcaaatacacatagagctcagct

SEQ ID NO: 441611 - DNA, 497 bp, Homo Sapiens
  misc_feature (126)..(174): n is a, c, g, or t
  misc_feature (393)..(425): n is a, c, g, or t
ccttcttttacctttatattgatatttaaaagaaaaagaacatgatggatacgggaatgggggaagggacaacggttctacgattaacaacaggaactgataggaaccagaagctccaaggatttnnnnnnnnnnnnnnnnnnnnnnnnnnnnnnnnnnnnnnnnnnnnnnnnncacgttatgtatgtgagtcccagacaagcaggaagcagcagcaagaagcaactagcacacagaaacacccgtgcgtgtgcactacacattcaagcaaagccattcctctagctaggacgcagcaatccccaccctcccacctacgggcaaaagagaacagctgaaaacaaacttccctctttaagggccactcagtaatttttgtcctcatggccaggnnnnnnnnnnnnnnnnnnnnnnnnnnnnnnnnngtcgatcttgccttgaaagcgggcagtggctattttcttctctctgccaaagcaggacacgttattcttaac

SEQ ID NO: 441612 - DNA, 745 bp, Homo Sapiens
  misc_feature (569)..(569): n is a, c, g, or t
gcccgggtgaccgcgtagaaatgaacacagaagcggagcaacagcttctccatcacgccagaaatggcaatgctgaagaagtaagacaactattagagaccatggcgaggaatgaagtgattgctgacattaattgcaaaggaagaagtaagtctaacttgggctggacacctctacatctggcatgctattttggacacagacaagtggtccaggatctgttgaaggtctatttatgactttaatttttaatgactacagtaaatattattgttatggaaattttaagatgaaagtcttagaaaagccacctgagccataatgacttatttaaagcaatagttcatcattcaagacacttaattgttctttattaaataaatacatgaattaggttagcctgattaattaaaattggatgtttaatcattagatttttttattactagcttttaaaaataataaaagtaggcatattaatgaagattttattttcagttctgagtgtgacagttgaaaaaataaccaaagcacaccctaaataattaaaaaataatgtcaatacacanataataaaaaaacacttgccggcgtttacacgtctgactggccctgcgtacccactaatcgcttgagacatcccctttgcagttgcgtatacgaaaggccgaccgttgccttccacagtggcaactgatgcgatggcaatgagcgtatatttgtaaatcccgtaatttggcttttt

SEQ ID NO: 441613 - DNA, 842 bp, Homo Sapiens
gggtctaggtagcgaggcctgggtggcgaattcggcacgaggcgccacctcgcgctccgccgtggtcccggcgccgggtcccggagacagacgttacgcgggctcgagcgtcctcggggagtgccagccagagttggtgacgaccacttcctcgacgtggggcgggcggacgggaagcctggggtcgtggccaccgcctcgggagctctgggagcccgggtgaccgcgtagaaatgaacacagaagcggagcaacagcttctccatcacgccagaaatggcaatgctgaagaagtaagacaactattagagaccatggcgaggaatgaagtgattgctgacattaattgcaaagaggtgaagacatcgagtcagaaggtggcaccagatctgcaccttgaagaagtaagtctaacttgggctggacacctctacatctggcatgctattttggacacagacaagtggtccaggatctgttgaaggctggtgcagaagtgaatgtgttgaatgacatgggagacacgccgcttcatcgagctgcctttacaggacgaaaggtgaaaatcattctatgttcaatgtttgtaagtgaggtatttggaggagtagttaccattgttttctctgttataaccatctgaccagcaaccgaagaaagccacacaaaaaaatgtatacaccagcactttgggtcaaaaggccacaggatctttgagtctgacagtgaggtccagtactaaggtcatggagacccccactctgtagcatccctgtgaggagatcattccgtttctgcttgtgtactccagcaatggggaactcctgattattctttttttt

SEQ ID NO: 441614 - DNA, 510 bp, Homo Sapiens
  misc_feature (348)..(356): n is a, c, g, or t
aaagggacaatatatgggaagaatttatttgctgaaagatgtcagtgagagaaagatgctcagtgttggaacccctggatggggagggatatagtattcacaagtctccacaaactccaacacaaacctcaccaacacatccagagtggaaggcaggagacttgttccaagaggctttaaaaagacgaaaagagataactaatgccagggttatataggagcctgagtgagaacaaatggaaatagctcaaaacattgaccagtgagccatggatgggggtataaaagtaagtttgtcttcaggattaaattaggaaattcaaaacagtattattcctctggtttacnnnnnnnnntagttgagacctattcaaatttaatatataaagtggcaaatcacacaaaagttaaacgtataaggaatggcaaatatatcttctacagtctatactcctgcaaagtacatgtgtaatttttagcttgcttttttacttcatatttaatcatttt

SEQ ID NO: 441615 - DNA, 457 bp, Homo Sapiens
caccaccacccaccttttggacagacgttgagaggatttgtggtgttaggaaaagggctggttaacacacagtaggtattaattcacaagatgatggccgttttcttactccttgtctgtactgcagcactcacctgttctccctctttttcatcgtcacctggaccactgcccacaggatgcagtccaatctctgaccttgactttctgtggtcctttcttcatcacatgttccctcacacctgtgcttcttctccctcaggacgctcctttcccagaacatactgcattttctgacttgtcaggctcgctcaagacgtgttattcgcctatggaacctttccatccacctccacctagtgaacccattcattagagcaagttcaaatgctgtctcctcagaggctccctggatgctcgagccgaattcctgcagcccggaagatccactagtcta

SEQ ID NO: 441616 - DNA, 687 bp, Homo Sapiens
  misc_feature (544)..(584): n is a, c, g, or t
gggttaaatatattttattaatgaattattaatcctgactgaggtggcttattacctctagtccactgttaaatccccttagttgacttaaataaaatcacttaaacccagaggaaaggaaatattttatagttaagcctacaaagtcctagaactagaatcatttgatgacaggctggtttctataactcaagcaaactgtacgttgacttaatatagctgacacatcaatctattttacagtgttttcaatttcaaaaatacaacacattaaaatattttcaatttatcaaagctaaaagcaacatttaagtaatgtacttaaagtgcgaaggcccttttaacacaaagtagtgatacccagtggctatactcggtaactgacgatggaaataccatatatcattatttacaaaagaagttgtagtccccaaaggatctttgggggtcttctacaaaatacactaaatatccattttcatttgaaaagtttgcctattctttcttcagtcactataatctcctcttcccactcccacactgnnnnnnnnnnnnnnnnnnnnnnnnnnnnnnnnnnnnnnnnnctatgaagaaatgcattgtagaaacattcatgtccactgatggttcctaagaagagaagggaaaaagaaggaataaaaaactcgagctaaagccgaatcctga

SEQ ID NO: 441617 - DNA, 277 bp, Homo Sapiens
  misc_feature (126)..(216): n is a, c, g, or t
gaagttttttatcatgaagggatgttggattatagcaaaagctttttctacatctagtgagatgattctaaggctttttaaaaatcctatttatgtggtgaatcacatttgtatttgctcatgttnnnnnnnnnnnnnnnnnnnnnnnnnnnnnnnnnnnnnnnnnnnnnnnnnnnnnnnnnnnnnnnnnnnnnnnnnnnnnnnnnnnnnnnnnnnattgtgtgtaagtcaggtctcgagccgaatcctgaagcccgggggatccactagggtaatt

SEQ ID NO: 441618 - DNA, 584 bp, Homo Sapiens
  misc_feature (61)..(73): n is a, c, g, or t
agaatgctctgcacgagtattgagtggcatgaaaaagatctcatttctaaaatgtgatttnnnnnnnnnnnnngggaagtataattcagaatgttctttagattttaatgcaaatttattactgtgcttcattttctgcaagatatgttgaaacattcatgttcaaatgtaatacagaaattaattttgattacccaggaatgtatcatctctattcacatattcaagttcaagtagtaaatacacgtaaagatgtaaaatggggatataaattatgctggagtaggcaaggtacgtattctatcgttcatatggtaagtgttgaaagcatatgaaaagcctgtccagaatggtctcacagacatttaaaacacaactttaaatattacttttactatgtactcagagttagtgtttaaaccttcctgaatcagacattctgggtgacctgaaaattatattggggctcttgagattgaaactgggacatttcagaccaaaaaacaggacaagctttatatgcatttttaaaacaatatggattatattagcatactcaattaaggcaatataaaaggtgaatg

SEQ ID NO: 441619 - DNA, 1143 bp, Homo Sapiens
cactgaacgttacaatccaaattaacctttttaggggttcttctgttacccatttttctttcatgtggtgaatataaactgaattatcatggtcaaatagtttctgggaatagaatactacagacacatacaatgatttagcaggctactgtgattttatatacaattgataactttaaacaattgctatataagttttatttcaaaacacctagcattgtatttctggaaaagaaactgaacattgagcaacctcagttaatccattaaacgagtgccaccacaaataagacaacaaacagagaacaagcttcttatcttcaaggactgaacctaatggccataccaattatattattccgatttgtcactttagtacaacaaaataggatgttaatccattaccactgttcttccattcgagaggcagctgatggttaaagcgcccgtaacatacatcgattatttttatcccatgactttattgtatgtttagaaaggtggaacagcagaagaaaaagaggctggacaaaagacgttgatgtttttgttcttcagatgtatgcagagctgattatgagtacgaaatttatttctcctgatgaagagcttcaatgaaagcatcaagtttttcatgaatttctctaactttcttgaggtcttccgccagttgaacgcgtttaccagtaagcaatttaatcttattctcaccatcttcagcaaaatcttacaatacctctttaacatttttctctaatcgcctaacttcagtatttgtaagttgttgccttaaagtatttacggtgatagcaagcatgcgctgtatacgccaaaacaagaccacatcattgcattccaactcagaatctacaaaatgcctttggtagtaataaaaacctcttcgacaaaggttacaatggtttagagctgtttttaaaaaatgtcttctataaacttgatgccaagtatccttaatcaagcttggatctacttctactcctcgggattcaaggttcttccggactgtggttatttcatcacttgcaagataagctgggtgctcctcattacatttcaacatcttctccaattcattcttggtttcattgtgaacacactgttcttgggtccgattcttccagt

SEQ ID NO: 441620 - DNA, 523 bp, Homo Sapiens; identical to SEQ ID NO: 207490

SEQ ID NO: 441621 - DNA, 687 bp, Homo Sapiens
  misc_feature (64)..(91): n is a, c, g, or t
  misc_feature (535)..(567): n is a, c, g, or t
  misc_feature (629)..(629): n is a, c, g, or t
tatgtactggaccagccatggatttttgttaaaatacctgtcgcccttttttggaatttaggtnnnnnnnnnnnnnnnnnnnnnnnnnnnnggggtggtgatgacatgtgaatgggtgcgggtatgtgtgcgtgtgtgtttgtataaggctcttttgagatgaactggtgcttgtttaatttccagctcaaatcggagcaggaatatggacaaactgctgctactgaatcctgcactgagccgaggtatttccatttggttaactaaacgctagctaccaggaaatgacgcagaagtcacgttcttcttcccactgccatcttgcctttgcattctcagttctacgtgccctttgaactttaatggtaaaacatttcacactttggatggtttgcttgactctagtttttagaaagctcttatcactccttcctaagaagaagggcaggtaaatttttttaaccaaacattcctaaatatggacctgtgaatttagtaaattacccccatgaatatactccttcagtgcagggannnnnnnnnnnnnnnnnnnnnnnnnnnnnnnnngcaacagccttgctcatattccaggtgtagctagccccctgtttttgaagcatgagccttanttgattcagtgtagatgtttcctgtctatcctttgtgacagggggccttttggtgttt

SEQ ID NO: 441622 - DNA, 1105 bp, Homo Sapiens
  misc_feature (56)..(67): n is a, c, g, or t
  misc_feature (255)..(340): n is a, c, g, or t
  misc_feature (343)..(350): n is a, c, g, or t
ccccccggagggggtataaatattctttggagggaattttttgcccaatttttgtnnnnnnnnnnnnaaagagagggttttttcccaaaaagattccccaagggagcgcttttttcccaatccccggggtttgaaaaaaaaggggcccccgggcctatatttttaatagcgccccccttagggggccccctttttcaaaagaaaaatgggtgccgggtaaaacttggcccccccagggggtaattttggagcggnnnnnnnnnnnnnnnnnnnnnnnnnnnnnnnnnnnnnnnnnnnnnnnnnnnnnnnnnnnnnnnnnnnnnnnnnnnnnnnnnnnnnnttnnnnnnnngagaggcagctgggagagcagctttattatcatggctggggatagaacggggtcctctccctgggggctggggtcttccactggttaccacccgcagcggtcctggaggcaccacgcagctcagtgctggcttagctgcggggcagggccttggagaaggcgaactgtccagggaagtagaagctgtgggggtcctcaccagcccgctgcaccctgaggcactgggtctcctggtgctcctcagcctcccgcagaacttgggtctctatggggcagtggaccaaccggcccagaactttgtcctcagagcccagtttgatgcaggccaggcatttccgtttcctcccattgggcctgactttgcactcgggtttcttccagtccctcttccggcagcttgtctgctgcagcttaaattccagcctcacaaatattccagctgggaagggcgtgtccacggcgctctccacactggtctcctggaaggcccactgcacgggcgggtgcttgtgaaattcctccagggccacctgcaggccccggcgctgggcttccgtgagctcggcgacgcccacgcccaccgcgcccagccacagggccagagggatcagcagccgtcgcatgcttccgtgtcaccctggccgtccttccctgcgcctggaggtctcccctgaccgtcccgcagctgaaatcttggcctcgctgtccgcctcttcccgctcttcttctccgcggggcggcccccacctcctccc

SEQ ID NO: 441623 - DNA, 724 bp, Homo Sapiens
tttgggttaacaaaacccaattccacccacggttctgggttatccattagcaatatcctgtcttattggatccaggaacatggggtaaaaatatttggtatttggccaatctttccatttttccatgacctgtaacatttgatttccagtccccatccctcaaacctgtacggtctgataactccatcttcattgaagaaccgaggaggtcgcagactctccacttcagaagtctctgtagctctttttattccctgaaatgtactgctagccatgtctatgatgcctccagttggccttgctaccgctcctactaaacctttcccaacacctttaaagaaaccagctgctcctcctttttgagctcctttgattggttttgtaacaattcctgttatgccactaacaaatccagaaactaagccttttcctccacgagtgatgccttctctaaaaccagctggttgcttattcatggcttctcttctcttctgttggtagtcttcatccatggtcatagctgctacccccttagccatagcaccggtgattttggaggcagcaccagccaatccaccaacagctccaccaactagtgccttaagtcctagtgccattccttccacaaactcttcaggaccctggatggctccctggtaaggttcataaaaaaatgcttctacaccttcagaaaattctctaattaagccaaatggatttcccc

SEQ ID NO: 441624 - DNA, 521 bp, Homo Sapiens
gatagcacccatatgcaagtggaccttatttaaaatctgtaaaattctaagacaatttttgagaaaagtgaaaatgtgaacacaagtcggatatttattaataagaaattatcattaattttttatgttataatggcattgtgcttacattttttaatgttcatcttttggaaacataatgaaatatttataactgaaattatatgggatttgcttcaaaatgatgcaaaggaagaggtagacaggattgtggatggggcagggttggtcattttctacttttgcatatgcttagaatttctcaaaaaaataaaggttaaaagaactagtgatagatgaagctttaaatagtatgcctattaaagtctaacactgaatttgggtttgttcccccagctacccagtcatctctgcaaacttcttcacagccaaacttctcaaaagaggtacctgtactttctgccttcagtttttcatctcccattcactcatcaaatctattccagtatagttcctatccc

SEQ ID NO: 441625 - DNA, 390 bp, Homo Sapiens
  misc_feature (146)..(169): n is a, c, g, or t
aagttaaaacaccaaatttattgcataatattgaactatatgcacacacatagaaaataaacatttcatataactgtatatatatttttaatcctgtatttataaagactgaaaaactaccaatttagcaattggaataagttttnnnnnnnnnnnnnnnnnnnnnnnntttacaatccttcatcaagatttgatgctttatcacagttcataaatacttcattttatataaataagtcttttctctagttactaggaatttaaaattagacttacatggattctttaatcatgtagaattttcttactccatgatgaggaaggttgagcatgtcattattttttacctatatttgatttaaaccaattccccctaaatcccactgaccg

SEQ ID NO: 441626 - DNA, 995 bp, Homo Sapiens
  misc_feature (25)..(25): n is a, c, g, or t
acaataatgcaaagtatgtgtctgnacagataaattcgggcatctctcatcactgtgagaatgctgcattctccatatcaccagctctggcatgccctgtcacaagggcactgaatactgcctctgtaactggaagatccttagtcataaatcccaagaatcttgctggcaccttcaatatctcctacattccaataagaagcaatcaatctctggtatgtcactcgatttggttgaatgtttgcttcctccatttttgccaggaaatcagttggtgagaatttatattcattttgaagatagactttaagtaaagcattatagtgactcacatcatacacagcacctaatttctgaagtgtgtcccatatcctatgagcaaattctgttctctcttcaagctttagttcaggcaagagagaaccacaactacgtagtagaagcaaggcatgactaccacctaggccacctgagcggcaggtatcattaaaaactttttgtagaagcttctttggaatgcggccagttcttcgaacagaaagatctagtctcattagagcccaatcaaactgattggaaatcttcctagaagaaaaagtggactcctcttgaatatctttttctttggcagcaatggcatacagcctggctgggctcagtagtcctccggccacgggcccggcgcgagcggcgggcagataggaggcggcatgcagccgagcccgggccgccagggaggaggcgcagggagagccgggaggcgctggggcctgccccggcacgctagctaaccagcgcgcggatctcagcagggctgccattgctcgacacgttccccgccagcgggaagcacgctccgccagaaggccgctctcgacgaattcgagtatcgcccgatttggcctgatccataacattcgtataatgtatcgctatactgaagttatgcagccgccaccgcgttaaatccaggtcgcccataggagtcttcatcc

SEQ ID NO: 441627 - DNA, 676 bp, Homo Sapiens
  misc_feature (91)..(91): n is a, c, g, or t
tcggctttccacaccatggacaaagtctcagaagtcaaataaagctagtcgtctcctcattatgagtgcatttttgtgacttgcaggttanagctagtcatagagcacaaggcaggatggttccttagacacctaccaagctaccctgccagccctacaccacccttttctataccagtgctattagtcaccgggataatgggacactttcatattggtaataataatagttttagcaaattactggagtggtctatttgggaaatactctttagtctgttaatctacattacaataatctgttaagatttttttagatcctacctttaatactgtgttaatttaaaactgtactcatatactatctatctagcagtcaaggtgtggtgtgttctaatggtggtaattccacaccaaacacaaagcagacatggttaattgatgggacagtaggaaaggatgtctttccagctataaggcattttcttttagacccaacaaactgaattaatatttaacaggaatatatttgagggaagatagcattttaagaatctttttcagaaggtttttaatgtctacactgttttttaacattgtcctttcaaacaggagctttttgttattatgtggattgactgcacataccaatccttcacagaccaggagaattaaa

SEQ ID NO: 441628 - DNA, 523 bp, Homo Sapiens
caggtcttgttgatgcattttattgtgagatgggagtctggtaaaaaactagaaaatgaccatgatgtaacaaggaacttaaaaatgaagagtcagatctgtaacttacatacatgaatacaggaacaaattggcacaaaatgttaaacattgttcccaacactgtttatagaagttaatcctaatttggcttactaaggaaatgagagttgtatggttaggctgatttcttaataaaactgcagagcatcatgctattagtcacacagtgaatttcaaaatttaagttttatattaaaaactgggtaaaggtaaaatgacttgattgtagttgtaaaactaatacattcccatttaagttctgttctacagtccaaggcaagtataaatgttaacataacactgttaaatcaaatctcaatgcaggagaaccaattgcatctctactttaaatcttatcaactttccaaattttcatactaaaatatattattgtattaatacaaactacagtattatacac

SEQ ID NO: 441629 - DNA, 1038 bp, Homo Sapiens
  misc_feature (333)..(399): n is a, c, g, or t
  misc_feature (972)..(972): n is a, c, g, or t
gatgtttactgcccttgggacacttgtgggatctcccagtttggactatgggacagagaattgaccctaactaactatgaactatttatttcctccctcccctacccctagttaagtgccacaaagactgtgttatgtagtcagtacttttctcatgtatctttctctagaccatttatatacgggtgaaatgaaagcttttttgcatgtacttgatactcagtctgtaaactcagacttcgctttttttgtgagactatcctttcaatatttttataaacttttgtgtgtgctgtggcagggaacagttaacaaggagtttatttagagggnnnnnnnnnnnnnnnnnnnnnnnnnnnnnnnnnnnnnnnnnnnnnnnnnnnnnnnnnnnnnnnnnnngatgggatcagaacttaacattttcctgaggactaggaagctcatcagacactgggaatgcagtgattcttctaatgatggtcaactgcaaggagaaactgtttacatccttcccactacacagttgctatgatatgtaacaagtcacacatgtatatatcacacaagtcttaccaattctgcgtcactaggaagctatagcatggtcgtgaaagctctcctaatacttacttaaatagccatggaagaaaattatgcttgtcccttctgactgggttaagccatctttcttaagattcctgaagtagaaatagcaattaagaaattaattcaagttttgacggttaacatttagcagaaaaacaaaccattgaataagctactaggtgaaatgcaaaacaaccatcaatttttttaaactcaataattttgtgaaaaactgccttccacaattaaagaatactcatagaaggaaaataatcataaatcatatttggataacatttcatttaagctttaaaatatcaattttttaaatgctcccattaccccaaatactagttatgggctatnccttcatgatagaggagacttgatcgatctgtggactggactgacctggattgacagatgtctatc

SEQ ID NO: 441630 - DNA, 664 bp, Homo Sapiens
  misc_feature (572)..(572): n is a, c, g, or t
ggcacgaggctttttggatggttttcagaacttaacattttcctgaggactaggatgttcatcagacactggaatgcagtgattcttctaatgatggtcaactgcaaggagaaactgtttacatccttcccactacacagttgctatgatatgtaacaagtcacacatgtatatatcacacaagtcttaccaattctgcgtcactaggaagctatagcatggtcgtgaaagctctcctaatacttacttaaatagccatggaagaaaattatgcttgtcccttctgactgggttaagccatctttcttaagattcctgaagtagaaatagcaattaagaaattaattcaagttttgacggttaacatttagcagaaaaacaaaccattgaataagctactaggtgaaatgcaaaacaaccatcaatttttttaaactcaataattttgtgaaaaactgccttccacaattaaagaatactcatagaaagaaaataatcataaatcatatttgattaacatttcatttaagcttttaaaatatcaattttttaaatagctcccatttacccantaactagttatgggtctatttctttcatgattagaggagagagaccttgattcacgatactgattgagctgggactgagcctgtgtgacagg

SEQ ID NO: 441631 - DNA, 791 bp, Homo Sapiens
  misc_feature (93)..(93): n is a, c, g, or t
  misc_feature (477)..(486): n is a, c, g, or t
ccctgcccagaaccagggtactcaacaatttttgctgagcagaactgtcctcaatggagaaaagaaaggagaaaggcttttactgaagactgnccccaattccaaaccaaattccattttaaatggaatatatacactttagcccccaaatgcagaccagtgcacgtctgtgtagtttccgactagtcacctggtaatagatcattcctgtcattcacaggctcagtcccagctctatttttcagtatcttgaatcaagttctctctcctctaatcatggaagaaatagacccataactagttattttgggtaaatgggagctatttaaaaaattgatattttaaaagcttaaatgaaatgttaatcaaatatgatttatgattattttctttctatgagtattctttaattgtggaaggcagtttcttaggaagggaacaagggttctcttttacaaccaaaagtttggtggtggnnnnnnnnnncacaaaattattgagtttaaaaaaattgatggttgttttgcatttcacctagtagcttattcaatggtttgtttttctgctaaatgttaaccgtcaaaacttgaattaatttcttaattgctatttctacttcaggaatcttaagaaagatggcttaacccagtcagaagggacaagcataattttcttccatggctatttaagtaagtaagtattaggagagctttcacgaccatgctatagcttcctagtgacgcagaattggtaagacttgtgtgatatatacatgtgtgacttgttacata

SEQ ID NO: 441632 - DNA, 819 bp, Homo Sapiens
ctgctaaacggattcgctatatgttgcggttgatgtgcctgtagaggaggagtccgcccagtgtaacctcgccctcttgggccacagagctgtgggttcacagttaagtggggctcacgcgcgaagtaggcacgtgtcgtgcaagtgaaagggtttgaaacaattgtgccgaacttccctggcgggatttcccaaataatggcgacttcgtgcctttacgttccggttcacttcgtcggagaattcttgttggctcgcatttccggaatccagctggaagggtcaatcccaggttggagtaagcaatgcccacccaggcccagtgccggatgggtgtcaaagttttcgcagcgccctcggcccagtgcaccccgcttgtgtcaaggatgctctggtgggcccgcctcctcttcgccatgcacctgttccagtaaccgctgctcctcgctctcgcaaagactcctcaccagactcaaccgctggataaccagttccctcgctgcactggccatgctcactgctctttgattcttccccggcaggacgtccgccacatacttggtgatggcagcactctgtaactgcagcctctcacactggtccacaatcttgttccgcagctcctcggcgcgctcctccgcccggcggatgcggtgcccccggcagcgaccgcccaaccccgcgcaggcggcagcacacgggccgtcgctcggagccgcagaaccagctcagagcctggccgtgttcggggcagagtggccccggcccgggcccaggacccggaccccggccccggctccgcgccctcggcgacatggc

SEQ ID NO: 441633 - DNA, 960 bp, Homo Sapiens
  misc_feature (255)..(255): n is a, c, g, or t
  misc_feature (867)..(867): n is a, c, g, or t
  misc_feature (934)..(934): n is a, c, g, or t
gcctactgggttaccaccaccaaatctttaccttctgaccaagtcatgcttgtttatgatcaacaagaagttgaagctatattcttggtgatcttggtagttgtcataataggagaatttttcagtgcctcttctgtcacaatcgtagacacggtcacactccagtatctgggaaaacacagagatcgctatgggttgcagcgcatgtggggctccctgggctggggcctggcgatgctgtctgtgggcatcggnatcgactacacccacatcgaagtgctcatcgatggaaaggggtgtaagccccccgagtacaggaattaccagatcgtcttcatcgtcttcggcgttctcatgaccatggccttgatccgttgccactcagttccggttccgctacaaccatttcaaaaacgatgattctaaagggaaagaggtggagatcccgcaggtggaaaggaacaactctacagagtcctctgaggagacaccaaccaccacaagccactcgcaggccttcaacttttgggacttaatcaagctgctctgcagcgtgcagtatggctcagtgctgtttgtggcttggttcatgggttttggatatggcttcgtgttcacctttctctactggcatttggaagaccttaatggaactacaaccctttttggggtctgttcagtcctgagtcatgtgtctgagctgacagcatatttttttagtcacaagcttattgaattgatcggccacatcagggttctgtacattggcctggcctgcaatacggctcgctatatttatatttcctacctggagaatgcctggactgttctccccatggaagttcttcaaggagtgacacacgcggncatctgggcagcatgcatttcttacctcagtgcagccgttccccctgagctgaggacatctgctcanggcatcctgcggccttccttggtttg

SEQ ID NO: 441634 - DNA, 840 bp, Homo Sapiens
tcagccaaggactctggagccgccgccgccgctgctgcggttcatatccggagtagacggagccgcagtagacggatccgcggctgcaccaaaccactgcccctcggagcctggtagtgggccacaagcccccagtcccagaggcgtgattttctggcatccttaaatcttgtgtcaaggattggttataatataaccagaaaccatgacggcggctgagaacgtatgctacacgttaattaacgtgccaatggattcagaaccaccatctgaaattagcttaaaaaatgatctagaaaaaggagatgtaaagtcaaagactgaagctttgaagaaagtaatcattatgattctgaatggtgaaaaacttcctggacttctgatgaccatcattcgttttgtgctacctcttcaggatcacactatcaagaaattacttctggtattttgggaaattgttcctaaaacaactccagatgggagacttttacatgagatgatccttgtatgtgatgcatacagaaaggatcttcaacatcctaatgaatttattcgaggatctactcttcgttttctttgcaaattgaaagaagcagaattgctagaacctttaatgccagctattcgtgcatgtttggagcatcgacacagctatgttagaacgaaatgctgttttggccatctataccatctatagaaatttgaacatcttatacctgatgctcctgaactgatacctgattttctggtgattgagaatgatgcaagttgcggattgcattatgatgctatttcatgcagatcaggatcgagctttggattacttgtacttgcattgct

SEQ ID NO: 441635 - DNA, 651 bp, Homo Sapiens
cacaaagacatagaacggatgtatacttacaaaaagcactgttcaggtccactttaaaacacactaatgaataataaaagttgctccaacaatgtctttaatgttaatgtagggaaaagaatagtgctgaaatagaattacaataacttcagatacttaatgactaaatatttatcctacctatgtgtacttaaaagtgatgttgttggatgtgtacaaatgaattaaagacatgcttgggggtgtcctttttagttgcatttgctactataccacattagccagaaaaaactttccttgtcattgatgaaaaacactctctcttcttacctgtctggggttaactagggattgccatgcatagagagaacttaatggtatgggaggtcatttatttgtgtggctctttggagggaatttcaattttggcgcctagattacaaaccatattcaagtcttctgaagaaccttggaaaaggagaacaacttacaaatgccacacaccttttgggaggcaacaaactccctacgagcaagagtatccaaataatgtcccacctctctgcagggccactaatgctcccgacacagggcagacctccaagtagagaagcatctctggagaaattagagcctccccacaaggaatcc

SEQ ID NO: 441636 - DNA, 692 bp, Homo Sapiens
  misc_feature (46)..(46): n is a, c, g, or t
actttaagacgtcttgctttccttaagaaagcaacacttttttttnatttatttataaaggctaaccatatccatttgtcaatattttcggctttaaggaaaatagtttaaaaaacataaaaaggtaaatacactcaagagtaactgctattaaacagttctgaacaggcagaaaatgtagactttcctttaacagaaaatgttaaatctgtaatagcagcataatttatatatagaaaaaagctggttttgaaaacccagatttatacccaaaacattttttttctgtacaactgcgtttacactgggaaataagtttcttcacattatgttcattcccatcaggtacaggtgtgagcttgagtttgatcagccagccctgagcgcaagctcagcgctcagcacaatcttcaatccaacaccatggcagatagcgcatttagatctttcatgtatgggtgggcctccaagatctggtctacagtctttgctctgagtcagggaagatcttcagaagggcttccctcagctcgttggtttctgcagaagatctctgagctggcatgggcaggttctgctggagactggggagggctggcagcagtgggaagtggggctgctgagggaccagtggcttgaaggggctccctgaatccgggtcggaggctggtggctggtactggctgcctggg

SEQ ID NO: 441637 - DNA, 1316 bp, Homo Sapiens
  misc_feature (256)..(256): n is a, c, g, or t
  misc_feature (360)..(361): n is a, c, g, or t
ttttaacaatttaccttggtttttatattgatataacttagagaaatgttctcaggttaccctataggagggcagtgctcttgcttgtttccatgcccaaagtgctctgtggaagaggtgacgaaaagggtggccatcccctgggtaagtaaagtgccctatgaagaaagtagccccaaccaaatggctttgcagcaccccatgttccccagtgggaaagctgagggcccagagaggggaaagggacatgtccaanggtcacatggtgatgggacacccaggggtgttgccactggtccgtgcctgacctccagtgggtctgccagccaagggtgaggaaggctgtgggaggggaggtgnnccaagtcaggcttcccccctttccacttgtcctcgctggcacagccctcggacacagctctgcgccgggatgcccgcctctccaggtactctgccttaagctgctccagctcccgcagctcagcctccagccgctcccggtggaccatgcgcagctgccgcagctgtttcatgcggaaggggttcatgtcattgaaggcgatgttcatcagcttccggctgttggagatggtcttggtgaagaagcgcaggtactggtagatttccaggccattctgtagcctcaagatctccttctcgttgtacttgaaaatggccaaggcatagcgaaacaccaccttcgtcccctcgtacaggaaggcatcccagacccgaaggaggatgttgctaatgagactgtccgcaaagaccacgaggaaccagttgaaggtgacgagggagagatccacgtggtgctgccccagatgggccatcagcctgggcagcttctccgagagcaggtcctggagcacccgctggtccacctgggatgccgtcagcgtgttgcagtagtaatcagcgggcatgatggtctccacaatggccaccaggcaccagaaggcgctctcctcctcctctaggaccagcagggcaatggccgccagcctgttcaggcctggcagtagccgatggtggggttctgccaggagaaggccagcagcacccggcggagcttgtcggggaagctggaggtggggcaggtgaagtgtttgttgttggggaaggtccggttcaggtccagctcaatctggcgggcagcagggtgctcgcgggcctggccccggctcagcagttcctggtagcagcctggagtgtgcaggtgctgacacggaggtggaccagccacctccagacacgagccggtgttcacgggtactcctgcccgcagtagctgcttgagctcggctgaggcacag

SEQ ID NO: 441638 - DNA, 702 bp, Homo Sapiens
gcaggaccaacaacccggacactcagggaagttggggctgaggatctgtgtctgagctcccgagggtcatgtaaggcttggaggccactggaaccggagcaatccctgatgttgcctctaacagcctctcctttgcagagaggagtctctggacagctgggtgaacacacatgcacatgtagggtagatgctagacgccctcacacagggaggacatggagctgcttccagcctcttgttcctggaagccctgggacctggccccggcctactcatccttgggaggctaatcggtgtccacacctccctccttcctcctgcccgttggcttccttgtcctgttcctagtttccttgtcccattcccagctgggtaggctcctccctccccagctccctcgctgtctctcaatgctccgaggccttgggtcttacctggcttaagaggtttgcctccaggccccagcgctgcagagggaagagaagatagtgaatggggtggcccagcttatccatctactacttatccaacccccaacccgggcgtgtgggcagtgtggaatcacacaccccaggtcctcccgctcagacttggagcccctgggaacctagctctacttctctcgtgggttatactctctgagtcccagagtctcagcctcggggatgatgggcttggggtggtggctcacgcctgtgtcct

SEQ ID NO: 441639 - DNA, 993 bp, Homo Sapiens
  misc_feature (133)..(133): n is a, c, g, or t
  misc_feature (152)..(152): n is a, c, g, or t
  misc_feature (193)..(193): n is a, c, g, or t
ccgtagaaaagctacatataataagtgataaactgcaatcatttatccagtagaatactatccacatatactaccaactgagaaatgatagaaatgcagtcattgcgtagcaggaagcagactaataagaatnattcacatctaaggagcanaatacagaccaaaagttagccatgagaagtctggaaggtanaatgctctcaataaacacattagtataacgccgaaaataaccaagataaccagcaacacagaagttagagccataatttattttattttctatacataatatctacacatgatattggtggatgaaatgtctttgattcagccttcattggcctagcttgtgaaatttaggcaggaccaaatcaaacaatgaagcacatttaaaaagaaaagtgtgtttaggaaaacacaatgtattttcctatatcattggatagcagctttttgagaaaaacattgctcaagacttgggtttggatcccaactgtcttatttggcaataatgctaacagatttatgctgtagtattctaagtgtgtttagaccgtgacttgtggattctgagcactaaatttaaatatctgttaaactctatcagacaaaaggagacttcaaaaataccttctgcataaatatttatctctaaaacatctgggcagtaatgaaacagactagaatttttataaggaagtattaatggacctcttttatttaaagcccttacatagtatacctacaaatatattgctacagtataaatgaaatgtaatattactcaataaaagctattttctgtacattcttttatgtattttatatttaatgctacatatggtacaacacttattgaaatagttggtattagcaaatatagcaataatatacagttcattttctagctccaactaatgcttcccattttctttctatattataatagcctaaaatagggaaatgtgtggaatgacttgaacagagagc

SEQ ID NO: 441640 - DNA, 779 bp, Homo Sapiens
  misc_feature (644)..(644): n is a, c, g, or t
ggaatcatttttctttcatttttaccctttattaactcttcatttgtttacaaaacaaatccactctatgaacgcaatctctaattatgtgttttctttcaggtatccaaaccttgaaacctttgctctagatgtcaggcttgtttttgacaactgtgaaacatttaatgaagatgattctgatataggcagagctggccacaatatgaggaagtattttgaaaaaaagtggacagatactttcaaagtgagctgaagttataataatctctttatttttttccttctaaacaaggacaaatgagaccagcaatgtgaactgtatttacataaacgtgcaaggcacatacataatgactttctttttccttaagtataaggccctcggttattggtttgtgtgatttatcagctaatttaggtagaacagggaagcacacccaaagaattttcaaaggaaagggtgttatagtgcaatagcaattaaaatatatcaaatcgcactgaatactcaacaccagagctctaatgtgggaaatggttctccttttcctctcaataaatatctatttttcatttttttactttgtaagttattttttagtgatgggattaatttatgactaattatgattaaccacatncagaatcttcgtttctgtgggagaactagaaattgcttaaatcttgaaatccaggattggttaaatttaacaaagcaattaactgtacactgttgggcttaaagcccgaactttctggaagtacgtcattttttt

SEQ ID NO: 441641 - DNA, 640 bp, Homo Sapiens
  misc_feature (499)..(508): n is a, c, g, or t
acccagcacgacggtaaacgacggccagtatttatttaatatatttatttttttgacaattttacagtcatttactgtagtagagctaatacaaacaccaaattgtacataaataataaatggaagatagaataagtacaacagtaacaattcccagtcacctttatttaaagtatattaaataaattatctcaatatatacaaatagaacaatattacctacataaatagaaaatccccatatagaaaacctttttaaaaaattatatatacaatgtcaaccatagaagctttaagtaccttaaatcataaactctgtagtttgtatagtagtcttataaaaatatagttagctctcaaatgtttaatgccacttaagtcagttaaagtgcagattgtaaagcatattaggaaggtgcccagaataccaatgtctcctgcacttaacacattaatacaaagtttgccaattgttttgaatttccaaatgtattcctgnnnnnnnnnngaacctaaacactatattatagacatatgttagaaaagtcctagaaatgcacccaatttccttccattttactttcctacatggattgaagtcagcccctcaaaagcttttcggctgggcatggtggttcac

SEQ ID NO: 441642 - DNA, 1307 bp, Homo Sapiens
  misc_feature (48)..(183): n is a, c, g, or t
aaatctcacaaacataatattggtgaaaagaaaccagatacgaagaannnnnnnnnnnnnnnnnnnnnnnnnnnnnnnnnnnnnnnnnnnnnnnnnnnnnnnnnnnnnnnnnnnnnnnnnnnnnnnnnnnnnnnnnnnnnnnnnnnnnnnnnnnnnnnnnnnnnnnnnnnnnnnnnnnnnnnntgtatgcacgtgctccacttgtgaaaaatcattgatgtgtttctatagttacactttaataaaaagttaaacaaaatgatttgcctctgtctggatactcgactcaaaactgaaaaaaatgtctcctttgctctcagcctctcactttggctacactctcgtactggcattctcagctcctgccacttgcaaatggtgagggtgggaagagaatccctctccctgccatgcaggctaaactagatttgctacaggttgggctgctaaagaaggtggtctaccaaactgaaattcaagtcttatctctgcttcctgccagtgcactcaagtgctgtcttgctctctctaaccccctctttcaacaaagccccttactcagaaataaacactcctctcagggaacatctaagtaagtatcaacgttttgaaccaaaagaatggagctctaatagttaacatctcaagctgcaggtggtggatgggtgaggagtcatctgggctgacacccgtggaggtatataacaagcacttggagggcaggcccagcttgaggagggggtgtgaaaatcctggctctcctttgggcaagtctgtatcctctatgactcagtttcctcatcattaaaatgggaataatggtgctgagatgttataacaatcaaaatgagttaccacaggtgaagaatttagcaaagtgactgacttaggtaggaggctaataaacattagctgtcagctcagctttgtccaaggtatgttgcccccaaaaaagcacaacccaggagaagtccagggagcaggggactttagggcttgctcaagtctccacagccaaactggagagtacccttggatgtcctgtgcttcctcaatatcgtggtgaggtgcaggcactaaggagtggggtgactttaggcctacatgggagcagaggacaaactgagcagcacgagagggagggaagaactgacagtgccctgggatccagtcctgtatgcatctgctaaatatcattacacaagtgtagtagcctttgcactggttgccttcaaagaattaggaatgttgttctgtcagagggcggggaatgaaaacacttgtcaagtgtgcagtgtttgatatcc

SEQ ID NO: 441643 - DNA, 941 bp, Homo Sapiens
  misc_feature (260)..(305): n is a, c, g, or t
  misc_feature (896)..(896): n is a, c, g, or t
  misc_feature (908)..(908): n is a, c, g, or t
  misc_feature (920)..(920): n is a, c, g, or t
attaaaagggagatgagatttgtcttagacagatttcagaatccttttagatgatccaattcaagaaaaccctctataaaatttaataaactgtataagttaactataatattttatactttctttttggagtcttaaaaatttaaagaagcgaggaacatgccatttggtgagtaccgatggaagctattttaatttctaggaaaagccccaaatatcactccaaatagattttgtttgcagatctcagttcagaatgnnnnnnnnnnnnnnnnnnnnnnnnnnnnnnnnnnnnnnnnnnnnnngagatgtatttatctttccaaattggattctggtttcagagatagagagtttgtataaataattgaaaggataaatctccccctgacagtccgccaaattcaagaacagatgtggttgccaactctctaacaacaatgtttgggaagctgattccaaagtagctgaggatgaggtcataagcatactgtgaaacccaagattcttcttccctggtagaattacaatagttactcttgataaatataagtattccatgtcttgccctctttcctcactctctgcttatccttttagacctaagtttcatttgaaatagcctgaattagaagaaagcccatccgaatctttattagccccctctaatgattagtttccaggctgcgttcatacctttgacctctcagtgtcaaagtcctacctaggcctccccacgacagagagggccgtaacagcaatccctgcccctcctttacctcccagcctcttgcagaggagcccagtgataacacatgtgaagttctttggctgtcctcttgtagaaggtgctgcagtgcaaagtatttaatacggtctttaggacaaaattaacngttcatgatttngggaccagtttnggtgaggtttttcagaaggaa

SEQ ID NO: 441644 - DNA, 926 bp, Homo Sapiens
acaaattatttgttttattttgtattcactgttgcacagtatcagaagatgttccaagcttcagttcattattaatatcatttcttctttgttctcctggcaaatctgatgccatgcttgatattggcgtatggtggaatggtactgagtagtctgttaatgaaggcggaatagcagcaggatcaaccgaagtcacactgggcacccttacagaagatggctgatacatgagaacccctttggttgggctgctttgtgtttctgacataaagatgcatttccttttggcaggagggtcttcctcttcgtcagaagagctttctattgtaagatcaataacatctactttcttcttgcttgcctcactggctacagtcactgaacaaggcttactgaggacgcttgaactttctatttttgtacacggttggctggatactttcatagcttctttcttcggtctcattggacaccaagaaccatcttcttggaatttgatctcatctacatcagaacagtcattgagaatttccataaaaagcccatctaatattagactttcataggcagcttttttgtcacacacaggacaaatccaggtgggctttttctcattcatttgtagatagagggcagcatcaaaacactgcagatgtgtacaagtcactgcacggcatgggattgtcagcctcatttttcctaaagggcacatcaaggatacccgaaggctagttgtagcaatttcactatcaggatctgcagtaagtttttctttaattagtgctctggaatgatcagggtttctaatacctttcgtttttaatctctgtaataacatggctgatgtaagctgccgtacaagatatacagacatagagtaattcttcccaatttctgctcgtgccaaattcctggagctctcagag

SEQ ID NO: 441645 - DNA, 425 bp, Homo Sapiens
ggactttttgggtcgtaggaacctggtatgaggtcccccggacgggattagtatccaataccccttcgaggatcaggaagtctactagatatcggaacgtagcgacctcctcaacgacggctaatcgtaaggagaaatcgcccatacttcctttatcatatagccgtcacgacacgcaataagctatatacgcacacactatataagctccattaacctcgtgctatcaggaagtcacagtacggttgcgaaagtctcttcaacatccatccaaacagttacggaagaaaaccacgtccgctttcctcgatcgggccaagttactccctcccaagaaccttcgaagcagcaaccagtaacccaagaacaccaacctaaggccccggtatggcaaattaccagctacgatttacccgcctgtcttg

SEQ ID NO: 441646 - DNA, 1540 bp, Homo Sapiens
  misc_feature (1371)..(1371): n is a, c, g, or t
tttgtaatttgaattcactttaatattttttaaggtagcatatggcactttggggacaggaagaaaaagtcacaaagtccacaaacccatgaaggtgtcagctcacaaggctggaaatgactgcattatcgattctgctgtcacagtaaatgttccataacaaaggcatgttgaatttggtctcattcattagagtataggacttttgtttggtcacatctttatcatttaagaaacatttaaaaatggtattcatttttatttcaacatgtcaactgtgcatttccaaaacagcaggcttttcaaaggaataaatcagaactgtaaacacaagatacagtacaagtttttgacttcctacagtcagtttcacaaatccacatactgtacattcataggtgaggttaagcctgtcacccatttctttatttctataattacacaagcataataaatacatctgattttaaaggtcacttaaaatgagtcataatttacagtacagtacgtttcagttcaagtgcaaaaaataactatttgctgaattctatttctttcagttattttatttttaagctgtgttttattgtgaagcgagacatccaagtgtagaatttcttatcccaaatgcagtattgggcagaactatggtgtcatggagaagccctcactttacaattgatcctgtctaatcagggtcagagggtaaggtgagttgctcatttcgactgttcttttctttcctctctctcctgtgctcatccacagctattataaattatataattcacctttattcagctaaaacagttttcccttttccacactccccccaggtttcctgttaacctctgctttgatttttagtggcaagctttacgtgcgatccacccagccattgttctggctgcagttgtaacgtttgcagttgcatacattacattgtccagtgtctgactgtgtcttcatgagaacgaatatactgagattttctttctttagtcattggaaagtatagttgctacttattgccatccttcccattcatggtttcctatttaccaccttttcctcaccaaaaacaaaacaaaactgacccaatatgtaatttctaaaaattgtatccttcccccaggcacttaaatcttatactgtgatttgtaactagtactgcttatttaaggaactcttaggaattcagtgatttttgtgtgtttcattccctcagctaattagagcctgaattactataagatagtaaatagcgagagaggctatttacagtatcaatatatttagtaaactcttgtctatcaaaacacaggatactgagttggttggttgatttgaaataatcgcttgtttctgttntttttctcaaagcccatttaaaacaaaaggcatttttaagctcggcttagcttgcagtagttaataatagcttctgttgctcaaagaattatttccattatatgccatacacatataaaaatatatttgctaaagatatgtaaagtttctgatgaaacttttaacttca

SEQ ID NO: 441647 - DNA, 809 bp, Homo Sapiens
  misc_feature (710)..(722): n is a, c, g, or t
cccctggtatacccataaagttaggtttttcaaaataaattatgggctataattcattcataaattggaatttaggaaaagttccctttgccaaaactgatttctggactcttttaaaatggtatttattcactccccaccaatttgaaaaatcttgtaaatttacagagggtttcctagtcattaccatggattagtaatgctataacttaattcaaaagcgattacttctttaaaaaatagggcgcatcccaggaaagcttagcatcagccaaagctactagcacaccacgggcaaaaggccaactctgcagggatatgtaaaggtcattttatggataatccatataaaaactgctctcaagatattttgcccattagaatttgtttacaaatggaaatctaatttgatgattttaggcctttgtgctagaatctcacaaccagaaagaataacacctttaatatgaattcttatgatattgtcagaaagtttaacaggagttattttaactcctgttaaaataatagatgacagtaaaaagaaattcaaagggaaagaaacaatatacgaaaaagctatggggtaacagatgttgagcctacaattaaaaactatttattttaaatgttttcctatgtataagacagaaataccaagcactttctacttttgtgttgtcagaaatcccaggaaaatccagaaatgnnnnnnnnnnnnntgaaggatagacatgcatcacatgcatctagctggttgactgagaaaacctgagaaatagcactaaaaaggataagatagcattatt

SEQ ID NO: 441648 - DNA, 638 bp, Homo Sapiens
tgaattgccctgggagatttcctcagcttgtactggaggtgtgtggccccatgaagcccatagtcaccgttcaccctgagagacgctggctttggggctgacacacctgctgcggggcagccccaggagatggccaccctgtttctcctggagctggagctgcgcgtcttctcagaaactgtggtggctgtcctgttttgtttgcatcttataaacctttacctgattacattttcctcttcaatttagctgctagcttaaagtcagattggtggctcaccagtaatgagagtttagagtagaggtaaactttatgacatagtcttagactcttcactttctcctcagccaacatgattcacatttactttattttgctgtactgtgaagtgtctttggtgtttcctgatttccttctggaataaggcaggtttttagtaagcacaggtttctggtccatctcatagccttaggcagtgggcggtgctttccgtgctccctttctgggttacctgtggtaactttgaattgcaaggctgcgatttgaggctgattagtccaacgggttctggtgggtccgtggggtttgttcttaatgtgacaattccctgggccctgtgttttcccctttggctggg

SEQ ID NO: 441649 - DNA, 1996 bp, Homo Sapiens
  misc_feature (1972)..(1972): n is a, c, g, or t
gatatgtagacaaaagtttatttacaccatacaacattttaaatattttatacacagctgcagcagagaaagcttctcagagctttctagagaaaactgcaataataaagatgtgaaatatattattcatataaaagtgagattattactttattgcatttaaagcaatgaagaatgtagctcaacaaacattcatttaatgacaaaaactttgcttttatattataaagtaaaaagtgtagtaatggccaaacagactgttataaactttaaaaactggcataaatatatacattgtgcttcatggtgaagttttttgaaaactaaaccatatgaagcggttacaacatgaatcgttgcttgaggtttatctataaagattaccttacaaatccattccacgggtacttacaacacaggatggtcagaactgtacacctggtcatctctccactaagcctgactagtgagaagttaccatatggaaaacaccactgaccgtttgggcacatgaaggtcctgacataagatagtcacactgtccagatagaaatgtcaggcttcccaagtcttaagtgtcagtgcaataaagttttgtctctaccttagtccattttgatttttttaaacttctgtttgaaagtcaccctcttgcacatccagaggcaaattcagacacttctcccactctgctggcctcagttccaaagcatcctttgcctctgtgtctaagacattgattgtggtgtaatgcgggtattcactggggtttttgaaagtgtcccatggattcttgtttggtgcggggttttcccatactgccttgtatttggtatatcccgaaatctgtcccaaagtttgaaatttctgatttagttcttgaaatagttccatatgcctcttccttgtatgcatgaccttctcaaagtcaaggtctgaatatcgtgattttcttctctctaaagaactcattgatatcgttgatcccagtttcacttcttgatagtcctgcattatcatccaactcagaggccatgaaattcttcacagctgtgcgaggttcaaagggcaaattctgcatatgttcctggggtgcgagatgttgctctaagttcatattgaactggtccattacagggggattcatattgaattcagggtttactttgtagtgcaatagcctttcatgtggcaaggtttccatgccaatattcattttgctttcttctttcattgaaggctggttatttacagaacttctgggcatcacaatatagtcactttccatcattctttcttgaggatggactatgtccatgtcagcccctctcaaattatcatccgtacataagtacacagttctccgcaattcactattttcttttttcaaacatggattgctaagctccattcatactcatgggcatgtgcaaacctgtgggttgctggatgatgactttggaaatgacatttccaggcaatgttgaatagcttagcccttcagggtttgttcccttttcttcttcatcatcatttagagaaatcctagaaagtgttcctgttaattgtggctgctcggcaaggaccaatatccttatgaagaactgatcgacaggcaatgtctacatccttttcaaagtctgtcatgatttgagcatgcccattaggaaacgaactcgaagaatctgcattgatgggatcctgacagtttctcaatcggcatctaaatgcatcctgaacctctctccgaagaatgcagtggaccatgactataacaaagccttgcaatgaatcaaacacagcaaaaagtatttgaaacaatatggagcgtttatctgtcatggccagaaccgcagacatccacgtcaaagccagaaggggcaacaccacacaggagctccaaagagacgccatggcgttactggcggtagacgctgacaaagctgttgttgaaactactccacacttggcncctagtgccgaatccggcagcccg

SEQ ID NO: 441650 - DNA, 685 bp, Homo Sapiens
cttttcatctgcctttacttctcatttcaaggtttcacagagtgctggtctcaacccacatcagtgatacttaactaacttgccttccccagacagaaacatgaaatgacttaaaaaaatagaaaatattcttctcgccaggcacacaagactgtacacccaaaaccagaaacgctgtggctttgcaaagtgtgctcccacacccgcgcacacaggcgcacttaaataaataacgcgcacgcacggctttccccatttcgaaacaggcagacggtctagtgagtttcagcacttgctgggaacaggcgtgtggccagggaggtgccccgcgggtggcaatgactactgacggacccctggtgaatcagaacagagctggcacctgagccgctgagcgggcggctacttctggctctgttgagttttggaagacctttgagaaatcaacagcatcaccgggcaggtcctgagtccatggcctgatatgttaggatcacctgtgggctgctaaaagcccacagtcctagccccatctgcagagttagttggcttctgaaggctgggagaagccctagaacctgcatttctaaagctgctcaaatccaggcctttggaggcttaagactaagcctgcaccatttcaaactaagtatagtcagagagaaagatcccagcacgccccccc

SEQ ID NO: 441651 - DNA, 718 bp, Homo Sapiens
  misc_feature (77)..(77): n is a, c, g, or t
  misc_feature (242)..(242): n is a, c, g, or t
  misc_feature (264)..(264): n is a, c, g, or t
  misc_feature (297)..(298): n is a, c, g, or t
  misc_feature (314)..(314): n is a, c, g, or t
  misc_feature (512)..(531): n is a, c, g, or t
  misc_feature (595)..(607): n is a, c, g, or t
gcaagcttctaaatgccgtatattatattgagaatgtattatatgagacccgtacaatgcttaaaagttccggtttntcaaacttaggcaggtcatattctatctatcttatccagcattactgtaggctagaaagtgataatggctttcataatcctgccttgtcttaggcactttcctgcagtctttagaaattctaagattctgctaaaagttttaaatcacaatctggagaattttcnatgattaggaagtgctctgttnttcatcccaaagtgttgggattacaggcgtgannaccgcgcccggccgtntttcctcttgatgtagcactgtattcactatgggctggctttaaatatctgaaattcgcatttctgtttggcagttttgaaataaaaaatgagaaattaaaatgccccttaaggattacatttcagcataatttttttagtgtgataagtatccaatccttcatagcaagaaattagggaagagggaataaaattcgnnnnnnnnnnnnnnnnnnnnccttatgagaaagatttggtatggaaggaggttaaatgtgtggaatgatagtttgggaagatcnnnnnnnnnnnnngagggcacattttcagaatctggatatacatgttaacactgcatatttagtaattactgtcttctttgttcaaaaacagttgaaaggctgcccttgcccatgatcggggct

SEQ ID NO: 441652 - DNA, 980 bp, Homo Sapiens
  misc_feature (576)..(590): n is a, c, g, or t
cggtccggaattcccgggatggaagtgccgatcggtggggcggaaccatgcaggaaggcggaagtggcttcgctagggagcctcccggcgtggagatggcgggagctggtcgcggagcagcggtgtccagggtgcaggcgggtcctgggagtccccggcgagcgcgggggcggcagcaagtgcagccgctggggaagcagcgcccagccccgtggcccgggcttcgcagcaaagagaagaagaaagtgaactgcaagcccaagaaccaggacgaacaggagattcctttccggctccgggagattatgaggagccgccaagagatgaaaaacccgatcagtaacaagaagaggaagaaagcagcccaggtgaccttcagaaagacattggagaaggaagcaaagggagaggagcccgacatcgcagtccccaagttcaaacagaggaagggggagtccgacggggcctatatccaccgcatgcagcaagaggcccagcatgtgctgttcctcagcaagaaccaggccatccggcagccagaggtgcaggcagctcccaaggagaagtctgagcagnnnnnnnnnnnnnnngcgttccagaagcggcgactagataaagtccgacggaaaaaggaggaaaaggcggcagacaggctggagcaggagttgctccgagacacggtgaagtttggtgaggttgtcctgcagcccccagagctgactgccaggccccagaggagcgtaagcaaggaccagcctggcaggagatcgcagatgctgcggatgcttctgagcccccggtggtgtgtcccagcctctgaccgcctccctggcccgccagcggattgtggaggaggagagagagcgggccgtgcaggcctacagagcgttgaacgcagcggcagcagcagctgcacggggagcgaaccacctcacttcctggaagaagccagagccgcagctgtgatggagagacacccg

SEQ ID NO: 441653 - DNA, 1803 bp, Homo Sapiens
atgattttaatatactttatttaaaaagtacacagttttaaattggtttcaataggtttcaagcagaagggacactgcctaccacttgcggtcccatttctgatgaagggtgattatcatgtggcaaactcacatttgcatgactggcaaagtaaaaagatgatagataactttttgtcaacatatctttaagagtttatatcacgcacagtttaaaatcatgatgagatgctgatggttggactatattcatgtctcgtatgttgcaccatattttggttcacagtttatccatgatttagcatgccaagagaacatctcagtcagtaagagaacatctcagtcagtgtcaccttgagaagagcatcaaaagcagagggagcagaaggaggactgtctgggcttggagactcggcgcacccccacactcccttgcattctcctcaggatggaagccatgacaagattctgggcgccttctgatcttctgggcctttagacgttcacacttaagggattcattatacctgatttcaatgggtgccatggtgatgggggccacagattcacagaggcagctgctgtccaccaccaccatgaacaggttgctgcttgggatttgctggatgacaaaggacttggagcagtcttcacaagcaatattccctgtagtctccttgatggtgcgctcagagacgaatgctggatattcagtatcacaaggctccagggtctgtttcaatttctgggctttagctgtcatatcggagtgccaccaactgcagaggttaaattccaccaggaacaagacaagttctgtcatgatccattttactgcagagaggaaggcattataaggatccaggaggccatgggcgccatcgctgctttccttgttggctctacacatggcttggtagtcataaagggtaattcttttaaaggagcccattgttagcaatttgttcatcacagctccctcgatctcaccaaaaaagtctccagtctgtgtgtagtcttcagacaccaaaataaatccattattgtctatgaggtaacaattcacagtctcatcatcacagctgatggagcatttgccatccagggaagcacactgtctgctggcagtccagaacttcctttggaaaaattcaagtttcatctgaatgcctacagctgccaccacaggagatttccgttcatccaggagctggatggatgtacttgctgtcaccacattgcttttattgactggtccagtgctgaatgggatcgagtagacgaagctccctggaatctgctcagcggctcttcggtaccagagagggaaatggtctgcgttaaaaatgttctccttgtcgccagctttcaggaagtcctgattggtgagctgctcagccccgacaaacaggttgattctggagaggcccgtgcgagtgccgaggaaggcaacctccacgcccttgtcagaattttcagatttgttgagggccaggctggtccaatacgcttcaatgggggcactcaccaccgcgtcaaaaaggacttcttggatcaattctttatcacactggagcagaggttctttgccttttaggtagagcttaatcgcttctaactgagacagatggcggtgctcagggtgtaggtcagtgttgcagtaggaccattcatctgccaaggacacatcgggatgttctaagtcatgcaggccttcttcgatggttacattccctcggaagaaatatttcccatgacctctggaaagcgccacacctaaactgaaaggagtacccttgatgt

SEQ ID NO: 441654 - DNA, 689 bp, Homo Sapiens
  misc_feature (577)..(587): n is a, c, g, or t
aaaaaagagcatcacctagaaattacaatacataatatatacaaaattttttcattaactttgaaagaacaaacttaaaagttgaaagtcctagagtagactcatcacaaatcactgtctcttctgtcttatcatgagtaggttacattttctcttaagttcttgtgttctcatgttagtgttgttcagaggctaggtttaggcttttttgttgttgtttcttctttcaattaaatttcaaagtttttttaaatagctttcctgaagtgacactgactgtatctacctctccttttcttcatctgatcctcttgcttttgtctaaagtccattttcttagctgatttcctcaattaatccttgggcaatcagaactaaaagttcaatacccaagaatagactcattccaaaacacagattcttgtcttttctgtaacaggtttccttttctctccttcttttaattcaatttaaatttttatacaaaaaaaacctaagtgtcctgaagtgacactgactgtatctacctctcattttcttcatcaggtgttcctttttctaaatccatattgactgnnnnnnnnnnncaattcaaccttgggtaaacaaaactaaacattcaaaatccaagaatagactcatcccaaagcatttcatattctgtcctttattcaacacctgcagcccgg

SEQ ID NO: 441655 - DNA, 951 bp, Homo Sapiens
tttatgatttgtttcagttttattttcctgtctcagtttcagtaaaagattcagagaactgattgacacacatcataagctatcacccatataccctaaatatacactgtttatgctttttctttttcacggaacaaggtgacactatctttgttcaaaccaaagtgaaaaggaagagatacaataattttaaaaagaggggtgtgtgtggtctttcactctcagatagtgaatgtacgtcaccacaacaaggaaaaagcgctgaggaagaatgtgcatcccacaggtcagagagtcaagcaggaagtaccagtagagcacctccaaatatagcaaatttggaacaactaggcattactgtgaaagaacttcctagtcatttgtctgccaccacattgctacattggaatttaagccctcttcacagtgcaaatatcaaaatgagccaagtcagggttttatggcaatcttttgctaaaatatattctattttaatatacatgctataaaagtatgctaaaaaggtcaatcgagagctccattaaaattaataatttgcttttttacattataggataatgtacattcaattctaaaagtatatttgagaaaagctattactgtgatcccaaatatttctagcttcctattttgtttataataatattgattttataacacacatattcagtaatgctttcttataattctggatttcaatgcctcaccaattattttaaatacaaatgtggggggatctgtgtatctcaaggagttcttactcatgcaaactactgagtttttaatgtaagttcttataaaattttcattttattctttaaactttggtagcctaaatttttttatgaccaacatttgaggctgtaatgggacaaataaaaacatgagatgttgaaaattaaacttgtaggtgacatgattttaaatgcg

SEQ ID NO: 441656 - DNA, 1952 bp, Homo Sapiens
  misc_feature (18)..(18): n is a, c, g, or t
  misc_feature (33)..(33): n is a, c, g, or t
  misc_feature (46)..(46): n is a, c, g, or t
  misc_feature (75)..(75): n is a, c, g, or t
  misc_feature (93)..(93): n is a, c, g, or t
  misc_feature (103)..(103): n is a, c, g, or t
  misc_feature (111)..(111): n is a, c, g, or t
  misc_feature (129)..(129): n is a, c, g, or t
  misc_feature (274)..(274): n is a, c, g, or t
aagcaactactctttggnagtggactctcccanggtggttaacccnactctgaacacaataggaaggaactaggnagccttccctgattaccnaaaggaaatnccaagcancccatcatctctcccaangcaaagcccaaagggggctttaaacttccccaaagtgcctaactgtaaatccaccaaattccccctgggccctccccagtgcctaaataaataagccaaagccaaaaaataaagtgtccattccagtgccagttgtcactttgcnagccctgcaaccccgaggcacttcttccatgaggaagaacactttgtgacccttctttggcagctcaagcaaagacacaagaatgcatttgagagctgacaggtactagtcgagagttctatgagtcccctatttctatctgtggtagtaatgcattctttcctccactgcttccttgaatttagtgttaaaaattaggagaatctgctgcctaggctctgtccccttgaagttgatggagtcaaaagtgactctctttggtctgggaacaaccagcacagtcctcctgaagcgcttgctcagtcaatgagctactctttgcagaggatcagggaactaaggtatgcctggggaaaccccacccaaatgagccatgccagacagcccttgccatcagctctctaggcacagggtcagccattccagggccccaggctccaccatttctcctgactgctctgcaggaaggcctctcactcatttctgaaacaaaatgagagaccagacttcaagctctggccattaaaaatggccaggtcatcattttcatgttggggtacgctgccctaattatgttgattagaaggacagaccacaataagggtcattctttcatgccatcctttttcttcctccagccacaatctcacctcaccacttgggaacacatacaaccaaagctgggaggtaaaatctttaggactttggtcatgctgagccctctataacccaagtgctgccagacttctttgaaaacctagtgtcctcccaagtaatatacaatacagtacatttcatggcattccatcacttataataagaatggatgccaaagaacaaagccaaaattagctgacaatgttataaaacaaaagcaaagtatacacactctatacacacgtatacctgcactcagcctgctgagtatttaaataacatccccaaatatccatatgtggactttggctggcctagagactttcaagaatattttgcaccttttctcaaaatacttttttttaaagaaaatgaactgtaacacaactactcatctccttacttatatcagtccctcccttccacccctccccactggggaaaaaactgttggggaatctgctagagaactggtatctgacagcaaactaagccgtggggtaaactaaaaagggactctgggtagaggaaaaaaatctaacctcccatatgtgaatgagagtatgagctaatacttcccaagaatgctaggaatgtgaccttcataatggaagcacagacttatgattatagttagagtcaaaagaaaacagtctggaaagggaactatataagacttttcctaaaatttcatacacaacagacttacaatgattttccagcaagtagagagtacttacccctcctttcttgacacctgactcccttgaagccccatcatagttcccagaaggacagtaagttagtgcagagaatagagtacttgaagtatagctaaataggtggtaaaattctgagaatatactgaacatcctaccaaaacaagctaaagcctgcagagcccaaagacactgagtcagttactttatcatttgcaagtaaaaaggttattagcactacatggaatttctgaaaggctccaagagtttagggagctactatgctcaaacatatcatgatc

SEQ ID NO: 441657 - DNA, 1202 bp, Homo Sapiens
  misc_feature (945)..(960): n is a, c, g, or t
caggcctgtacaaaactttattatactctgaataacaagcatgtaacaaaattttgagcatgacaaggatgaaatatttcaaattctgtttcttacaaaagcattaagcacaatacacaaagactgttcataatattttacagtcagctaaaaataacaagacattctaggatttcaggagttttccttttctttcaactagagcattagctttatttccattagctttgctacaatgaaaattaacatatatggacatacacatataagtgaaatgggaaaatgaagggcatacaaccaaacatttccgattaatcaacaagtataaaatagtcttttagtacttccaaacttacattttctttgaatgtacaatgaaattttttgtctaaaatgtttttaatgttaattttgaccattcccaaagtaattaatactctttcttagcaccaccattaatctaattttagagtttgaaatgaattaagaaacactctaatcttattcagaggtgctattcacaacaccgaacaacaggcaatccactgccctttatcaaggctgagacactgtagtaaatgagtagttcaccaatactgtctatccccaggtgaatatcagccctgatcttacttccaatgatgagatacatgttttggcttatgtagtagcatgagctatgagataggaaacatgaaagtcacatggacatgaaattaaactcaaatctctactgcatggaggctgaatgtgaaatatttcacagtgactaaaactgactggctaacaggcaatggtggatttttatattcaactttgattaacataaatggactttacaagaaacccttgagatttaattaatgctgctaatccaagggctccaaatgactgaggagcctttaaaatcagtatatgtgatcttttatatttttttccataagnnnnnnnnnnnnnnnncaccgaggtacttaagtttcttttcaagggattactgttggttatcttcctgagatgcaaaagaccacagaaaaagcaccatgcctaggctgctgaatgaggcatcagacactaatagtttggtccttttctgaacggatctcttctggcaatacactaaaaatagtgatgggtcgcagatgcctggggggcctggttgcccttggattccaggttttccatggtctcatctttgcaaggag

SEQ ID NO: 441658 - DNA, 1551 bp, Homo Sapiens
gccagaatgttggtatttcaagtttttctgccttttaaaaaaattcctgtaaatttggctgcatgtacaaattcattagctggaagtcccatccttggcggcatacagggatcgtaaagtctgaacaactttattagtcagcttattagcactcgttagagcaatttttttgtaaataatgtctgactctttaatagtgtctacccaaggcaccagtttgcggccatcacggcgcttagcctcagtccaggagccactgtaggagcctgccatccactgaacactgaagccactgctggttttctgcactactcttgcaatttgtggtcgatctttgtactttggacagcaaatagcgatgacatccatgacgtcaacactttcattcatctgtgctgccaactccgtagagtctgaatttcgttttgaccttctcaatgagtaatacgctgcgaaatacgttgactcctcctccgcctcacccctgaagtgcctcctcctctatcctccccatcactttcatcatcttctgtctctgctgctgtattatttttagggctgcctcctccaagcagtgaggtaattgctttgttccgagcatttgtgctagctgaaacctccccttcttcttcttcttcatcagggtccagatgttccatgagaagtttgaaatctagatactgttttactatactccttttcacctcttctgtgattttggaattagccatgtcactccgcaggaagtccagtgtttgttttggatgaaaatgaactcctgtttttcggtttatcgcttttatcatatacttttgcagattcagatggagagtacttctgaattttactatcagaaaatccacaaagattcttcaaatgttgttttaacatgagaagtaataaaatacccctgggacacatttgcaaattcgattaaaggagctgaattttctggcaaacatttcatcactgaatttatatcgtcttctgaatctgaatctgaatctgaatctacacgtttccgtgacttccgaggcctggaaacttcttcttcactgtcgcttgactcattttccttactaggtgatgattttctctctttccttttgtcctttaccatagactccttgaatgactgcagtaggttactaccagaaactgagagtgtaatgtctatatgatgcattataaacaacggctcttcctgtgtctggtatggaaaacaggctagattgtctgctatatacaagagcatagtcacgtctgtttttgctgtgtcatcaaagaggttgagtaaagaaataagaaaggctcgtctgtgttggcggtttccacggatcatggagtaaaggtgtgaacacaaagcgctagaggactcgtcttgtctgaaaccccttacaggatcttttaggcatgtgttgattgcctgttgtacctggtaagacatcttcataccagccactgctttcatatgaatgaatccagcatattttttgtctatttccacaagttgctgatcagccttgttccgcatagcaggttctgggtccc

SEQ ID NO: 441659 - DNA, 627 bp, Homo Sapiens
  misc_feature (502)..(587): n is a, c, g, or t
ccccaatggaatccacagacgagcctttcttatttctttactcaacctctttgatgacacagcagtaagcacaaaaacttattattttaagaaaataagtgctctagaaattttatggataaagtagtcattttttaaatattaccattttattagtatatgatagtaacttcattaagtgttttcttaatcttctaagttatttacaaagtacacagtcagaagtgaaggggaaattttgtatgagaataagtgtaatgaggaataatgtataattttgcctccatactgaatatcctataaactttgataacagtttctgtaagcgtatctttaaataagcaacatcactaaactaatcgctttgggaaccgattacctcaaatattgttagagaataactgttctaggtttttggctattgagatccctagttgttcaacttgatttcccttaatgaagggaagtcacttttctgtatagtagtccacttttgtgtatnnnnnnnnnnnnnnnnnnnnnnnnnnnnnnnnnnnnnnnnnnnnnnnnnnnnnnnnnnnnnnnnnnnnnnnnnnnnnnnnnnnnnnagtcatgcatcacttaatgacaggtatccctttggggggg

SEQ ID NO: 441660 - DNA, 700 bp, Homo Sapiens
tttttaaataaatgtttcctagcttgctgcaaggggaacatttgctgcttgctggaataaatgttccagagttgtgaaaaatctgattctcacagttttgtcagtatttgcatggcttgtacggggcagagaacttctggaggtccttacttagccattcttgctgacatcactcaggattctttcttggaagtttctgtcttctttcgcccttactcccagatggtagcgacagcggcaggaggcagacaaatcctggatagaaaggtcgttggatttctccctctgatatccatggctcttctccttgctccaatttgaagatcacctctggcttggaaacttgatatccaagagaaaccaggtggctatagttctccagcatcacatccctgtataagctcctctgagcagggtcgacatggtaccattcttcctgggtgaagtccacagacacatctttgaatgtcactgattcctggggcgcggcggtcggaggcctcggggccattcctgcctcgccagggcccggctccggggcaggagcgcctctggggggctccggatttcgtgacctccggcccacccagagcctcgggcagctcctcccgcccccgccgaaggctcggttgtctccaattctgatctgcggaggggctgcccaaaggggcctcagccgcaccggggtcggacaatggcc

SEQ ID NO: 441661 - DNA, 1439 bp, Homo Sapiens
  misc_feature (31)..(31): n is a, c, g, or t
  misc_feature (40)..(40): n is a, c, g, or t
  misc_feature (48)..(48): n is a, c, g, or t
  misc_feature (104)..(104): n is a, c, g, or t
  misc_feature (144)..(144): n is a, c, g, or t
  misc_feature (249)..(249): n is a, c, g, or t
  misc_feature (273)..(273): n is a, c, g, or t
ggggaccgatgattaagttctgtaggtatcntgtatggtntgtactanttattcaaaagtctgattgtatcagaatggcaacgtaggccctgtatggatattcntacggttacatggtcaaacaaatggaacgtacagatttcnccatctgttgtagtagaggtatgttttgaaatcgttgaagggatcctggtttccattcagaacagctatctgggccacatgagatgactaaaccatctttatttnttagataagcagcacctttaatcncaaaccttggtataaatagaagcacaccatttgttctaattgaataaataactccgtcagatatgcaacgctcctcggtggcagggtctttgtctttgaagtacatgcactggaagagctcagtagactgcttctgagaatgctgtgctgcttggtttctgttgttgatatgtctgcataattcctcaagatctttgttgctgaacagatttcccttaatttccattttcttatcttttgaaatgtctgccatttacaagcggtgtactacaatatctgaatatcttggcttattggagaagtaaattgggtatattgtatgctgaatggcaagaccgtaattgatggaactcctcctccgcacagggatccggtgtagaagtacagagcaattcgacatggcctgcgtggccatggagcgcagtagcctgttcacaatgggatcgtgggggtcgttcgcattatccagagaatcagccagtgttttattggaccgtggtatctatgaagaggcctttggctttagcacattcccggagttctgaaaagaactcctggtctggaggaggtttgctggcgcagcaaggcctgatgagggaagctctcccagatctttttggcgacccagtgtttggccaggatcatgcattcagccactgtctcgtggacttccaggggctgcttggggatgaggtcgtgaatgttctttttgtcatctagctgtacgcaaacctctaccccttccagttccagggcaccacatccgtctcgtttagctctgacatggcgagctatgtcggtcagctttccaattgcccacaccaactcctccagcttggcttgtctgctcttctcacccaagtctttgaattctggaatatcatcaacaacgcttaagtttccatccagtagttcttgggctgcttcatagaacagtttgtatgctgatcgaataatggttctgccataccacactttcttaatttcataagaggctttatccagttcccacatgatgcttacagcatacctatcaacgcctcccagaagggaacacaaatctgcactgaggacggaaggcagcatgtcatagcgacgatctgtatagataataagtggtcctcgtgccgaattcgacacccgagcctcgtacctagccatagtct

SEQ ID NO: 441662 - DNA, 660 bp, Homo Sapiens
ctgatttttagatttttcatatcttttatttggtccaatgaagcagaaaatttaaatgaagttattacctttgcctgatttttgacacacctcaaactataacttgaggttgctaactatgaaacactggcatttaatgatttaaagtaaagaattctgtaatttgtagacttctgagaagttccagaaaataaatcagatggtatgtaacagcgaccgtgtgctcaaaagaagtgctgaaggaagcaaccctcctaaaccactgaaaaaactacgctttgatattgaaggatcagatgaagcagatggaagtaaacatctcccaggagagtccaaatttcagcagaaactggcagaaatgacttctactcgaacacgaatgcaaaagcagaaaatgaatgatagcatggatacctcaaacaaggaagagaaatgaggatctcaggaccttggtggacactgtgtacacctctggattcattgtctctcacagatgtgactgtataactttcccaggttctgtttatggccacatttaatatcttcagctctttttgtggatataaaatgtgcagatgcaattgtttgggtgattcctaagccacttgaaatgttagtcattgttatttatacaagattgaaaatcttgtgtaaatcctg

SEQ ID NO: 441663 - DNA, 863 bp, Homo Sapiens
  misc_feature (87)..(87): n is a, c, g, or t
  misc_feature (93)..(93): n is a, c, g, or t
tagcctggtgggagggtgccctgggtttccccagggcccccactgttttcgacctgaaagctgtttcctggaggagaaggcgggccnttgagnaattttggcctggttgattctattcccccctggggagctttttcagggtggagggtgaactgctttctgtgggatgaatatagttttcatcattatccttccacggggaccacataatcagcctcatcctcaaggaggcctttgggtttgggtgggacttgaggtttctgcaaagcagtcagggccggcagggtggaggtgagccttgctttctctgaaggccagctgggcttactgggaagtgtcttgctgaagggtggggaatgcctctggcttgatcgattgtctatatactcgcctctggcgaagggcagggctgggtgaaccggcctggtttcctgctctactggaggcggctcgtagctgtcatcagcgttctcctcggcgggcatcacgtacatctctgagtccgagtgctcatctggattttcatagtcgctgtcaaagtcatcggaccactgctcctcttcgtcagcggggctctctgaagcgtagtcccttcgaggaacacttggaggtgctttgacttttagctttttgattttattcattattccaccttcattgtttttaatatcatggaccatcttttgaagctgcctcaacttctgactggcggggacggttattttattaagcttgtccattctgtttggtaattgtaagagacacgaataactgtccagtggtcacgtcagcagttcctggccctcctagggagcagcatggtaagcctctggtctcaagggttccggccactcaagtctccc

SEQ ID NO: 441664 - DNA, 1123 bp, Homo Sapiens
aagcgaattagaaggcctgtaagagtaaggtttgctaaaacgtgaaacactgtaacacttttaaccactgagcattccacagtgaaatgttatttctatgctcttatttaatgtaatgtttctcctgtcatttttgaagttgagtttggagtagattggttgcttctgagaacacattctgccttcctgggaagtcggggtgtcatcctttcctctgtttgatgtgaggtagtttaaagatacaaggactttgtgtgaagctccagcatctgtgccccttgaattgcttaggtgcagacagttctaaagcaaggagctgcagcattctcatcatagatacgtgcagtatctttaatgagtatcttcatggtatgatagtgtgtgtttgtgagtgcgaagtaccaattaaggtgtcttaaatttggcgcatagaggagagaagggaaacctgaggagtagtgttcctcctgaatgaaggttcaggtcaccagccttctgtacactgcctttggttttagcagttctttgaaaagcaaacactttcatgtcctgtctattcattcagctggctgtgctgtgctgtggaccagctgtgtggatctctagcccagctacagcaggatacattttcccagcaaacctaatgatgacaaacactatccacatctgaaaactaccacaccatatcagggatcataaattatgcctatctatgaattttccaaccaattcttacttcctgattggattggttttgccgcttatgttacggcagccagcttcttagttcaaaaagaattctgagtttttcaaacactagtctagaggtggacattgtcaggggttctggaatgggacccaggggaccttttggtgcagtgggtgcctgtaactcattagacgtactgaggcagcacttctgcaaggtgcataccctgattgttgtcatttgtaacagggtcacttcctttttactcagttttaaaattggtgatgggacgtttctttgaattgaaccttaattactcctctatttttgaaaaaggtaacaaagtaaaaaaaggggcccaataattccatttcctttggcccatggaaaatgggaaatggaaaatttaagggc

SEQ ID NO: 441665 - DNA, 725 bp, Homo Sapiens
caggcagggtgtagcccctgtctattctttgctggcttgttttaacaagcaatagggaggaaggggggacagaggtggctcagtgagctggcacaggaggaacacttagtgcctttagccggcccgtgtccccggaccatagcccactcagtcagagcctcctggggcagcggacaccgccacccacactggaggctctgaggggagaactcctccagcggccaggcaggcacttggtgggctgtcatgactactctgcctcctctccagttggtattccttcctttccctcccactgagaccccagataagacaacactcccctgctcaccccagggccctctaatgccaacaccaggaagacacccaatcctgccacctcgtcctgctgccatttcctcggctgaacgtgggcttcctgccacttaggtctccttccctgccaccaggtacattcctcttctggccctcccggcctccatccctgcccattatcaggcctgaagtggctgccaaggtcagcgccggctgggcttgagacagggagcccggccctctcttctgtcttggcctgtagcatggttctgcccccgtgggcaccactgctgtacccttcaccaccaatctttgacgagtgggggccacccgtggggttttggctattggccagaactggacagggagaagggggattcttggagagtgggttggctggcccggtgtgg

SEQ ID NO: 441666 - DNA, 1108 bp, Homo Sapiens
cccccccgttaaaacccggagagggttttttcgtggcggatccgaatagaaggggggttgcttcccaaagcctggcgatgggtttcccacaggagttattgtcttgtttcaaaacttccttggtaaatattctgccggctgatgaccatattgttcatttcctcaatagatttctggcaattccacagagccagggttacttctccctgaaaacttatgtaaagcttgtttgaaaagattaaaaagcagtcacaggtgattccaatgagacataaacttttgccaagtacagaaatgtatctaccatttcctgctgcttcaggggctgatttaaacctgtttttctgcttcacgatacattcccaacctgtagtaacattttccaatctgtactttccaccaccagtccttgtactgagaatgttctgtggagagggcagccagatccaaagcagtcttaacatcattttcatgatgaaagatatactcaaacaaagcctttgccaacttaggtttctgggaatactttgttaaattcagcctagataaatttataaatggtccatcaggacttgtaagcatggaagccgttcccagcctgacaaatcttccggaggagctggtgatagggcgggctgtgtaggcggttctgggtgttctgatagcctgttccatagtgcctggccttccactctgcgtgctgggcctgaggaaacctgtaatgggtcttccagcttgtgtgattggcctaacggcctggctaggccctcctgtctgattagttccagggagtttcaaagacgttccagggcgtggaacttgagctatagcattttcatccagcatcatttctgcaattccttcctgatctacatcaatttcatctatgtataccatttctgttagcgctcttgcttttaagatccaagctgcctggtcataaggggacttctccagcatctgcgtgcatagatcggcgcagagctggaacttcctgcgcctaaaatagctccaggccaggagcagcggctccatctccgagctcatggctgccggtgcggccagcgaaggcccagcgctccaggagagatcccgagaattccggacc

SEQ ID NO: 441667 - DNA, 1069 bp, Homo Sapiens
tgaaggcaagcccgccctttaaaacccgggaggagtaattttttgggctgttcccggaatttggaaggtggttggtttcccaaatgccttgggatgggtttcccaccatgagttatggttcttgttttccaaaactttctttgtaaatattctggctgggggatgacataattgttcatttcccctcatagattccttgcaattcccccagacgcaggggttacttctcctgggaaaccttatctaaccccttgtttgaaaagatttaaaagcagtcacaggttgatccgatgagaacatgcccttttggccaagtacagaaatgtatctaccatttcctgctgctttcaggggtgatttaaactgtttttgtgcttcaggatacattcccaacctgtagtaacatttgtccaatctgtactttccaccaccagtccttgtactgagaatgttctgtggagagggcagccagatccaaagcagtcttaacatcattttcatgatgaaagatatactcagaacaaagccgttcccagcctgacaaatcttccggaggagctggtgatagggcgggctgtgtaggcggttctgggtgttctgatagcctgttccatagtgcctggccttccactctgcgtgctgggcctgaggaaacctgtaatgggtcttccagcttgtgtgattggcctaacggcctggctaggccctcctgtctgattagttccagggagtttcaaagacgttccagggcgtggaacttgagctatagcattttcatccagcatcatttctgcaattccttcctgatctacatcaatttcatctatgtataccatttctgttagcgctcttgcttttaagatccaagctgcctggtcataaggggacttctccagcatctgcgtgcatagatcggcgcagagctggaacttcctgcgcctaaaatagctccaggccaggagcagcggctccatctccgagctcatggctgccggtgcggccagcgaaggcccagcgctccaggagagacggcctcgtgccgaattcggcacccagcctcgcaccgtaa

SEQ ID NO: 441668 - DNA, 767 bp, Homo Sapiens
  misc_feature (45)..(81): n is a, c, g, or t
gaacgggaatgactatggggactggagtgcacgcggggcggccgnnnnnnnnnnnnnnnnnnnnnnnnnnnnnnnnnnnnnatcaggccaaatcggccgagctcgaattcgtcgagagcggggtggcgcccggagcccgagagtttccaggatggcttctgcatcaacttctaaatataattcacactccttggagaatgagtctattaagaggacgtctcgagatggagtcaatcgagatctcactgaggctgttcctcgacttccaggagaaacactaatcactgacaaagaagttatttacatatgtcctttcaatggccccattaagggaagagtttacatcacaaattatcgtctttatttaagaagtttggaaacggattcttctctaatacttgatgttcctctgggtgtgatctcgagaattgaaaaaatgggaggcgcgacaagtagaggagaaaattcctatggtctagatattacttgtaaagacatgagaaacctgaggttcgctttgaaacaggaaggccacagcagaagagatatgtttgagatcctcacgagatacgcgtttcccctggctcacagtctgccattatttgcatttttaaatgaagaaaagtttaacgtggatggatggacagtttacaatccagtggaagaatacaggaggcagggcttgcccaatcaccattggagaataacttttattaataagtgctatgagctctgtgacacttaccctgctcttttggtggatccgg

SEQ ID NO: 441669 - DNA, 531 bp, Homo Sapiens
ttttttttacaaataattatgttatttattttgaataaaaaagtggccaaaataacaatactaatggctctgtatacaaaccacaacatattcaaggttatctcacatttacaaaactgccattatgtacagcactacatattcacagcaactctattagactctaagtaccagaatcatgtaagcaattgaggggaatcccaaatgagaaagagctaaaaccaatggtagttcatcaattggagaaatggccaaccagcgacttggtaaagaaacagaggttctgttacccttttaacaagtaataactaaaatatgattaccccacagggccttatactgacaaaccaccctccccaaatttccatttcattttctccataatcttccccacttcaaaattttcctaggaacctcagctctaatattagataaaaacgcaggacactgatatgtaatcttcaggaaaagaaggttaagtagtgctaaggatgtgggatgatcctggtgccgaattcctgcagcccgggg

SEQ ID NO: 441670 - DNA, 1329 bp, Homo Sapiens
  misc_feature (50)..(50): n is a, c, g, or t
  misc_feature (88)..(88): n is a, c, g, or t
  misc_feature (153)..(153): n is a, c, g, or t
  misc_feature (209)..(209): n is a, c, g, or t
  misc_feature (216)..(216): n is a, c, g, or t
  misc_feature (218)..(218): n is a, c, g, or t
  misc_feature (265)..(265): n is a, c, g, or t
  misc_feature (367)..(367): n is a, c, g, or t
  misc_feature (386)..(386): n is a, c, g, or t
tgagcactgtattcgacgcgtgattgcgctggtgccgtagcgttgatctncggttactcgaatgagtggcgtcgttgtatgtcgggtngatatgacctgggtacagactcagtggtccgtgtgttgtgggtaggtagtctgccactgtgcggncgcggagatgctatcgccctgacccccagcttgttctctgtcgcctccgatagttnttgagtngncgcgtgtgggagcggccgccgccgccagacgtcgtacgcctgtcagnctgactatgaatgtcagcgtcgggcggcccgtgtagggatatgtgcccgcggcggcgtgtggacgttgagtggcgagtgcgggccggtggtgtcagacggancgccggttggtctgggagnggctatcttctctgttgccgtcgcgcggtggcgcgtgttgtggttgtaccgccctacgcgcgctcttcgttagtgtatcggtcgcgtcctgtggtgcccgggtgtcttgtttctgtatgtgcggtccgagcgtcgggcgtggcacgtcggcggtgttcccaagagacggcgcggttgtctcgctcggtgtcgaacccgggtgcgtggctcccggggtttctcggttgttcgattggcggccccaccggccccgtggcgttagggctgcttgccagtgttcttctctacgcgcgggggcggggcacccgagcggctgcctttctttcttgttctccctcgctgtcagccctcgccgcttttcgttgcggtcttgggttggctttgccggttgcctgcgttcgccaggtctttctctgtggtgttttgttgtcgtttctgtaggatttttattggtggcacctggggccacatggagggagtcctcagcacaggcgctggggtgtgggaaatttcagaggcccctcctgggatgtcacccttcaggtcctcatgagtcaatcttgagtttctccttcactttctgaaatgtctctgaaaaccactcccgcatcttggcagaaagttcactctgtttgatgcggctgatgagttcccgagccttgtcctccagtgtgtttccaaactccttcagcttatccaaggcactggagacgtctggggtcccctgggctggggctgggccttccaagacgatcgacagaaccaccaccaggaccgggagcgacaggaagagcctcatggcgaggccggaggggcactctgaatccttgctggagggcttggttgggaggtcctgtcctgcccgcaggacctttatcaggctgtggatcttcgtgactctgtggggtcctcagaccaccttagtccctttccccactcagaa

SEQ ID NO: 441671 - DNA, 2025 bp, Homo Sapiens
  misc_feature (955)..(963): n is a, c, g, or t
cgcaagactagatggagaattaatgaagaagaaatagaaatgaggcttatttaaggtacaaaattcttgtatttgtaataacctagatttatagatataaaacaagtcttttaaagacttccctaaaatactcaatataaaacaggagttacttatcctagatcatccttagttaggtacacatgattctctgtgcaactagctggtggacatgaataaaagctgctgggcctataatgtactaaaacatttttctcccttcagcaagacaggtagggttgaaggctaaatgcatcagaggagtattttcttaggcattttggacaatctttttgcagtaggttccataggttttccccagcgaaagttgactcagacccagagtaactctgaccaccaagttgccaagagggaaaaaaatacttcatttgctagattacccaaatgtgtagcttcatttaattacccaaggtaagaatcatccccaaccacttttcagctgagaacacttgccagagaaatgtctctggatgggaatagatgtggtaccagctaggccactggactacccgagttcagctgccaggaaatcagagccacctcaaatattgggcatgctctgattcagcagtggcagtgccctataactttcagatgattatctccatgtgctatgttaaccaaaataggcaaattatttacgaaaccatttttttctgtaaagcaaaataaatatatacaattcaagattcttttctcttcctaaaaaggtacagatagtgtgagctgaacatcagtaggaaaattatttcagaatctggatgtataataaatacccattattgtatatcatgttttcaaagttctaagagaccgggaagccaccaaacatagagttagatgggtaaaaaatgattgtgaaaagtactgggaaatatgattgtatgaaatttgnnnnnnnnntttcacaatccctaaattgatctcaaatcttggagggacatgaagcattatagaaccatgtctctgttttgcaaccaaaaagttattccattttaagtatcctgtacatttctgtttgcttctgtaaacttgcaaaagaagtggtgagagattgctgatgtgtggggacttgactgagcagacaacagggatgtttctttttctcggcgggtttcagtggccttcgtcactactcgatgagcaggcccagtcatagatgaccaagggaatgctgaccaaggagaacaacacccccagggcccaagaaaagggcagcccaaattctttgagttcctttatctccatcctggtctgtgatttttaaataaagagatgaaggaagaatgaaaataagcatgttagcagatgtaactcctacgactccaaaaatatccttcatggagggtatgaagatcaccaacaagttgataacaaccaagagtatgcaggtaaccacggtatgacgacataaattaaactttgttttcttagccagttcaaataaagatgaacgaaccgtgaaaaataacaccggcactgtgaggatcacagcaacaatgacagccagctgcactgtcaggatgagaatgtcatcactctgatatgtgaaggaggtcggactgcacgttgtcatagaatgtcaagtagccaaaaatggcagtcaagaagtacataacaaacatggcgaaaaaggagatgtttgaaaccatctgcatttctgtgatcggtctttaagctcactgtaaattggcaggactgacgggtggcaaacaaatgcaaatgcaatggtgggtaaagcatacacggtctttgaattgaaggtaacatattttggcgtacacgtgtcagcatttgttgaattagcacttattgttgaatttagctctggaacaatgcagggaatttgaaatttcttgtaaataaccacaattaggaaaaaaaccatacagctcaaggaaaatccactagtatagccaagataccctaagttcttcaagaggtgccgaattcctgcagcccggg

SEQ ID NO: 441672 - DNA, 220 bp, Homo Sapiens
ttctggcgcttcaggctgccaaggaattctttggctttattctcactcaacggccactttagtcttacgttggaacacggtgcttctcgtttttgaagcattcagcttgacgtgttactttgccacttaatgccatctgtctctccatataattagctctccatgcaatgcagttgaatttctccagcaggaaggagaaagaagtcttctaacacttgag

SEQ ID NO: 441673 - DNA, 823 bp, Homo Sapiens
atgcgttgaaagttttttgttgtttctgtgtgaacaaaatgctttatttctatttttaaatgagaggcattcccatgaaatatcaaaaggcatttacatgtgttgttttaactcttcttttttgatcacacaaagtaggtagaaaagatctgctgaaatagagcaaatcagaaaccaagtagtgtaaggcattaggagatacatgaagagaatcgctatttgcttcttgtacagcgtgtggcaagtcatggttagtagtcatcgtagttgacgctggctccatgcctaaagccgtaggggctccggggaccaattgcagagtcttcatcatagtgacgttggtagtaatcgccatagtattcatgtccatttcgatctctgttaagccaataggtgatgtcatcttcaaatttcgcttcgtcaaagcccatgtagagaaactgctggtaccactgctgcacctcgggccgagtccggtcccacagctgccgcttctggcgcttcaggctgccaaggaattctttggctttattctcatcaacggccactttagtcttagttggaacaggtgcttctcgtttttgaagcatcagcttgagtttatttccacttatgccacctgggccccagcacaggagcaggagcagcgccagcccggtcagggccaggacacgcagccgcgcgggggagcgcagccatggcggcggggcgcgagcaggagggcgaggggcgctacttcgaggtgctgcgagggagaaccgggcgcgggagaggggtgcgagcgggcaggcgcggccgcgggttatccctgcgccgctccgct

SEQ ID NO: 441674 - DNA, 361 bp, Homo Sapiens
ggtgtgtttacccttgatacatatgactgttcaaatccttatgaaagatcaaacaacacaaaaaactagcatccttttcattggatgtgacatgccaattaataaaattcatcttaaagctttaataatgtatttaatgaggcatgcactacagagataaagcagaaatgatttcctcaatagtttcactgataatactcccaccaaagtcacccttgaccttaccttccaggtctgtcataaaagtgtgatgctgccggccgctggctccttgtgaactctattttcccttgattcaagggcataagctctctcctgtgacaatttaacattctgtttcgtgttctgagattttttctaa

SEQ ID NO: 441675 - DNA, 555 bp, Homo Sapiens
  misc_feature (425)..(425): n is a, c, g, or t
ggtttcttttcagtgttttatttttcaaaatatacaatttaagtttttatttcacaaccgtagttttgtatatttattccaaaatctttaaatagctccgcagcaaacagtacaaatcacaaggtccgtcaaactgcttctctttagcctttacacttggcgagttttttaagtttcaagtagtaatggtttgtgggtaagaaaggaaccaaaaacaggaggaaacaacattttttacataagctcaacatgtaggattagaaagggccgtctgaccagctccttggtctgggaccagactaagaacatgtatctggtttataaataagaccgtcctgggagcagtgagggttttggttacgaggaggaaggggcagggacctcatctgcggaggctgggaggcagggggaggtgaggcactganaggtggctccttctgggagcgcccgagtaggggcctgagcggggtggaggccaagaatggccagggacggggtggggctgccactggtggagaagcctcctcagcctcccttgggggagaagggctgtga

SEQ ID NO: 441676 - DNA, 710 bp, Homo Sapiens
  misc_feature (563)..(563): n is a, c, g, or t
  misc_feature (631)..(631): n is a, c, g, or t
  misc_feature (645)..(645): n is a, c, g, or t
  misc_feature (659)..(660): n is a, c, g, or t
  misc_feature (668)..(669): n is a, c, g, or t
  misc_feature (699)..(699): n is a, c, g, or t
gggaacaaggttagaggcagatctgctgtaaaatgagtgaactctatgaacttcatgtttctcctctcctaaatacacaagaagtaaacctctcccccacataaagaggcgtaatcacagtgattgagccacgttggacagtgcagtgagaaactagcattggtatttcctaaattagtctgtaaggagtatgattttattctctctctttcttgtggaactctctgatgtgctgtaattgtttatctcatttgcttatttaaggctaactggaaatcagtttaagaaacatttgagttgtgcctttgtactggacactgtgttaggcaatgagaatactcaggtcaatgaatttagactctgccttcaaggtgttcactaactagtaagggaggaaagcatgaaaataaattacaaatccagggtgatgcctagaacaagagtaaataaatataagatgcaatgtagcatataggaaaaatatatacatgtgtatatctatttctccatacctattttgaactctagaaataggactatgtggtgcttgggtaaggtagctnctatggtaaaattaataccacaattgaactcctaaaacctgttactactaaaatcaagtgtgtccttnccacaatatcagtngccttaaattgcanntaaatganngtatgcccttgaaggtaaagtacagtattntctttcttttt

SEQ ID NO: 441677 - DNA, 1006 bp, Homo Sapiens
  misc_feature (249)..(257): n is a, c, g, or t
atttgtgtggtttctccgggggggccggaagccaaaaatatttccataacgcgcccttcccaccaaccatttaggaaaccgggtgtggcccccaaatttttccaagcccagtgtcccttgggagggagaagacctttccaaactttttttaaaaaaaattaaaatagttatctgtcgaaatggttttaagaaattattacataaatataaaaacaccagaattctagagtatccattacttctgcgttnnnnnnnnntccattgcagaatcactgagatttctcaatccagtttacatgagtgcaagtttcttttctgtgatagctgtgttttataaaagttgcctgtttagcccatcatctccccaccatcacctccccatgggagatgcttcatcatcattttggatccatgtcctcttgcgtacgtttttctgctttccctacccacttgagaagcggctgatgctccttaaactgtgatgaaaatacattgtgaagacggttacctgaaaggggcctacaagggaacatctttgccacacaaagacagtacagcttcgctgtgttgaggtttggttctggtaaaatggggacacgtttattttgggggaactcccaactctagccaagtcacacagtaagaaacagggtccagggctaaacgggtgcactctcttgctgctggtatcccccttggtgaacagtcctacaagcagcctgcagattcttctccctacatctcctgtaaggacgaaggagtggtgtaacctgagctccggccctgtggagaccctcatgaggcctgaggctaagaatgaaacagatctttgcttcttccccagattacttacatacgtgcatgccatgcacacactacttcaaacctttctgtagtcttgagtaaaagcatttagcctggaatatgtccaaactctaggaagccaaggggagatggagaaaaataaacaaactaagcacatgatatgtgctatagctcacttccc

SEQ ID NO: 441678 - DNA, 2076 bp, Homo Sapiens
  misc_feature (310)..(327): n is a, c, g, or t
  misc_feature (1287)..(1299): n is a, c, g, or t
gctgaatccgctttttaaaattcaaaacaagaaacaaaacataaaaaattaaggggaaaattatttaaatcggaaaggaagacttaaagttgatagtgagtggaatgaattgaaggcagaatttaaagtttggttgataacaggatagataacagaataaaacatttaacatatgtataaaattttggaactaattgtagttttagttttttgcgcaaacacaatcttatcttctttcctcacttctgctttgtttaaatcacaagagtgctttaatgatgacatttagcaagtgctctaattgacaggnnnnnnnnnnnnnnnnnngagtttatgtcagctttgcttagtgttagaaggccatggagcttaaacctccagcagtccctaggatgatgtagattcttctccatctctccgtgtgtgcagtagtgccagtcctgcagtagttgataagctgaatagaacgataaggttttcgagaggagaagtgcgccaatgttgtcttttctttccacgttatactgtgtaaggtgatgttcccggtcgctgttgcacctgatagtaagggacagatttttaatgaacattggctggcatgttggtgaatcacattttagttttctgatgccacatagtcttgcataaaaaaagggttcttgccttaaaagtgaaaccttcatggatagtctttaatctctgatctttttggaacaaactgttttacattcctttcattttattatgcattagacgttgagacagcgtgatacttacaactcactagtatagttgtaacttattacaggatcatactaaaatttctgtcatatgtatactgaagacattttaaaaaccagaatatgtagtctacggatattttttatcataaaaatgatctttggctaaacaccccattttactaaagtcctcctgccaggtagttcccactgatggaaatgtttatggcaaataattttgccttctaggctgttgctctaacaaaataaaccttagacatatcacacctaaaatatgctgcagattttataattgattggttacttatttaagaagcaaaacacagcacctttacccttagtctcctcacataaatttcttactatacttttcataatgttgcatgcatatttcacctaccaaagctgtgctgttaatgccgtgaaagtttaacgtttgcgataaactgccgtaattttgatacatctgtgatttaggtcattaatttagataaactagctcattatttccatctttggaaaaggnnnnnnnnnnnnncttctttagggcattggcctaagtttcttaaattagactggtaggcactcttcagcttaaatacctcagttcttctatacatttggcatgcatttatgcccctgtaaggaggctaggtcgatggtataatggctggaaattctaatttactattctttattggcacggtaccctataattacctctaaattaacccttgttaaaaagcggggggctcagtctgggcaggtccaatcaacataccgagtagaaggttggcggcaattggccccgctaaataatgctgtgaagttcaaaaaagcgtgagcaaaggggtctcatagttgcccagaagcaggatccggaactggaggctacagggaaatgcgtgcattaatatgatacgtgacattggaatacgggcctccgggttaatcgggatcatccacccacagagaaaaggcctcgtgtgcgagtgaccacgacagaaaacgggaagctcggatttcctagagagaacccttgaattgatgcgggggtacattaagcgttctaacaggtgttagatggtgtgtttccaaagtcttagaacactttaaatgtgagactcttaagtgtacattaaacacacgaacttttgggagacaaaattaaggcataactggtgtggtaaacaaatatttaattcccgaatgtggaacctttaaaatgtataatgtggatttgttaaaaaaaccctttaagtgtagaattgacccagtgtacaacaaggcaatccgtgatttatttactgttaac

SEQ ID NO: 441679 - DNA, 459 bp, Homo Sapiens; identical to SEQ ID NO: 134388

SEQ ID NO: 441680 - DNA, 626 bp, Homo Sapiens
gcacgagtttttttcctctttttcaatgggaaataagtgaaagttttaccatttctttcttattaatcttcactattaagagtctttaagttgttactgagtgaatgctcattctggctattttgttaaacctaaccttcaactggttatgtttttctctcctttcttgtctctctctaaaattttcatattaaacaataaagcttctgaaactactcattgtaaatattttcaagctgttcaagtaaagatttcattatctatggggcagatcttgctattgaatcttattccactccataaattatattttattggtttggaagtatatatgttttaagtagttgtgaacgtgttttttcacccaggaagctctggcccagcttggtcagcatgtaaaataattttccaacccaccagatttagcagtaactgttcatgtcttgctgaaatggcttccttgatggatatttgggatggggggtatagaatgatattccttccatacccccaccaactaaatttcaggctaggctacttttcactacttaattaggcccttgtggaacttagttttctccgctaacctactcatatttactaaccctcagatcatttcaggtacg

SEQ ID NO: 441681 - DNA, 1085 bp, Homo Sapiens
  misc_feature (617)..(634): n is a, c, g, or t
  misc_feature (1041)..(1041): n is a, c, g, or t
agcggactcagcctggagaccgaagcgcttcactgagcgctcgccgccgtccagcctctcctctcgcgcctcctagctcttcgcagagcaaccaggagccaggagtggtctagagcccgagggtgggaagggggagtctgtctggcttttctcctatcttgcttctttttcctcttcccttcccactcattcctgtagtcaaaatctggtcatgttggtcaaaagctggattatttagatctacaaacagatcttgaaatctgaatgctctggtttgagcaattttcgaacattctttgcctggtgcactgtgtctgtggtgccagaggcgtccgtggatccagaggtggttatgactcgtgctgcatgcctggtctttcctctgtttctccttcttctgaaagttttctatacctgtctcctttctcagccacaaaataaatgtcgggagaaagtgatatataccactttcccagaggaagaaaaacttacacttggcgacttggcaaattcctagtcacaatttttttcagcagtaacaggaaaccacttatcacatggagacctaatgtacctactacgaaaaatactcataatagggagaaaccaagagaagnnnnnnnnnnnnnnnnnnccaactgtgttcattagaacagcgtgttctaagtatttgaaactgaatgtttattccttgatactaaaagttcttctccaatcctatcactgatagtgtccaaattctcaccaaattgctcctaagcttcaaatcagaagcagaaactggcaggccatggaccttaattgtccctcaggtagattttgtttggtatgcagaatgtttttaaaatatgagtggttattgaaaatatgatgtttcacatcctcattctcggacccatctttgctcatggcaacagttagctggagctgagtagcagctgcctgattagatgactctcagtccccatggcaccctgctccatgttacctagagcaggcacttgattccttgctgggcagtatccaataggcatttgattntgcccactcctacactaagcgaatgtgtacagtgttgcattagg

SEQ ID NO: 441682 - DNA, 823 bp, Homo Sapiens
cgttgtggtgttcgagggaaagatgggatctcagcgttgggaccgaaatgtttaagctatacatcaggttatgatagccgagatcggtgtcatgagcacgccatagttcggtgtaatgaagacgtgattgtgtgagatttgtgtcttcatgtaacatttatgattgtaccctgttgtgacaccgttcacatgggatatttttggacatatacagtatcttgttttagaatatttggagaatatatatctacaaatgacctaggggttttagttaagtggttattgtgtgttttctgacttgtttcttgtatctttgaaccatgctgtccccctcttttctctctcattctgtctccttctgacatgactgttgctctttcgcttgctctgtcagaatcctgtctgcctagctgcatagtctgctttgctccagactgccagacaggggtctcttgttcttaaatgaattatgagaaataaggaaactttcaaattctttaagacagaggcaataaagcagatgggaattactgcgttgagaacataaatgaattcccagtgcagaggactgaacaacagaatgtgagtaaaagatctattgatgtggtgtgggggcttttagctgaggctctctgtttaaatacgtagcccagtagactaagttaaagattccaaatagcagcgggaaggctattcttgacagtcggtcaattttgctgacactgttaaaggttttcttgggttctggtggttttgtcttcgggcttgacctctttaggttctatggttgcacttttagcaatggtggctaagcccgggaact

SEQ ID NO: 441683 - DNA, 1083 bp, Homo Sapiens
  misc_feature (400)..(410): n is a, c, g, or t
  misc_feature (681)..(681): n is a, c, g, or t
ggttggttatttaaaaaggaattccttttcaaccaatttccaggaagtttgacaaaatttatttttgcccccttttaaaaaaccatttttctattagggagaatttaaggtgagggttgggggttcaatgtgctttttggaaaaattggggggaaaaaagggaattattttttaaacttattttaggtttagttttctagggagtataccatgtttgttaaaaattattcttcctggagttctagtggtaaaagctcagaatgaaaaggaaagtaacctatttaaagcattaattttcattggactaaatgtgctttacaatgagcaactgcaccttttacgtatgaaagttccatgaattttaaaatagcattttatgacaaaataatgcattaggccnnnnnnnnnnncaaagagaaagaatggggatcttcagctttggaaacaaaatgttaaagctatacatcagtttaaaaagcaaaacaaaaacataagcacaccatagtttgtgtaataaagacgtagatttttaaaattttttcttcatgaaacatttataatttaccctttgaaacaccttcacataaaaatatttttgacatatacagtatcttttttagaatatttggaaatatatatctacaaatgacctaggggttttagttaagtgttatttttttntctactttttcttgtatctttgaaccatcttccccctcttttctctctcattctgtctccttctgacatgactttgctctttcgcttgctctgtcagaatcctgtctccaagctgcatagtctgctttgctccagactgccagacaggggtctcttgttcttaaatgaattatgaaaataaggaaactttcaaattctttaagacagaggcaataaagcagatgggaattactgcgttgagaacataaataaattcccagtgcagaggactgaacaacagaatgtgagtaaaagatctattgatgtggtgtgggggcttttagctgaggctctctgtttaaatacgtagcccagtagactaagttaaagattccaaaatcccgggaattccggaccggtacc

SEQ ID NO: 441684 - DNA, 753 bp, Homo Sapiens
gcttaatcagtattgtcttatttttctatacctggcaaaatatcctgccatagcaggaactgaaacctgtctcagctgtgaggtgtctgctcctttgcgcagagaggaaaggcaccattttcctccctcctcagcacccattcagaagtgggaatgagtattcaggtaccaattttagggcccagaggggcttgtggccttggacccatggctcttcctacaagggagcacaatatttacaacatgaataacgggacggaaggtgggaagaacacactgcaccttcttcacaggcctcctggagctcaggcaataccacagtgaccctcacaggctcactgctcttagtcacgtcattccttcctcatcaggaaactacaacctcctcctgtctgcttcgcagccaccagaattggacagggccccaggacccctagggtcaagggcacggtcctccctgacataatgactgcacagtgggaacgggtagggtccgtgggaaagggtggcaatatcacacctgcttacatgcctccctcaacgtgcccccagaggtgggccttcctcggtgccatttctcacctgggcagatgcaaaccctcagcacatgtgctaagtagagtgtgagccccaatgaaactacagtttactgaccttgttggccaagagcccaagttccacactctccttcctagaaagtgctgcacctgtcttccatgggccaattctcaagcctaacagtgtgacggaaag

SEQ ID NO: 441685 - DNA, 749 bp, Homo Sapiens
  misc_feature (737)..(737): n is a, c, g, or t
gaaaaattgaggcgttttctttctctcaatggagaattccctggtaaattaggaccagtcaggggggcgtttgttgtaaaatctacaatatgctctttgaatatgattgcagggcctttcttcaaggtgtttgattcaagtagctctgccctgcgtattggctagctgcaaattgagagaggggggaacaattctctactttgatgcatcatctcaggcctctttttaccaggtgaattttctcttaataaaacaaataatatttttgtggattgcccatctcttttgactctgcagactctgtaaccaatttttgtatgttaatcaggccaatctgtggagtaggcttatactgcagcctgtgcaatatagcaagacctcgtctctgtaaaaagaaagaaagtaataaagactaattgagcccaaaatgtttcactatttcaaaaaagatatttaaattgttgctctttcattccataaaaaggatctgatctctctcccacttttctgacctgagttagagctttccaaacctgtcatgtatgggttttagccaatttcttttagatcactaaaaaaactcatccaatatgtcaaataattgatttatcatagccagtacatgttctcaaggcatgtttaaacatttatttgaagctattgatatttttttataaagaaatattcactggattttttcactgtgcaccggatggcatgttttaacaacagtatangaatgcttgggc

SEQ ID NO: 441686 - DNA, 718 bp, Homo Sapiens
  misc_feature (645)..(645): n is a, c, g, or t
ctgatccttcctatttctttgacctctggaaagaaaaaatgctacaggacacagaagacaaaaggaaagagaaaaggcgttaaaaggagcaaaagcgtatagatggcaccacccgtgaggtgaaaaaggttaggccagaaacaggcgccaggagtggaatatgatggcatatgacaaagagcttagacccgacaacaggatgtctcatagtgtgtaccacggagcgtcttccgagggatccctgaccctagatactaggtcacatgcatcggacgttacggattactcttacccggctactcctaaccattctctgctgaataatttcattacctctgcacatgcctgtcgaatatgaaattggaagggcccttttcatgctgggttccctgtgggcatatgcttagtaaatgcctgttgatggtttttgcaagagaatttagtagttcaacagtaatgaaagtgaagaacagagtccattttccttcctggggccattggggatgacactcaagatacttggcagtctctccagtgtgggcactagccgttcataacagatgcgagcagtccatgactttgggagctacaccgtttagctgggcagagcttcggcacatggtctgagctgctgacacctgtgtnctgagtgagcccgagagttcttagttcctaatgagccatatagcactttagatgcaccttttaccacttggtt

SEQ ID NO: 441687 - DNA, 741 bp, Homo Sapiens
acggatgaaaaagccagagtattgccgaatatcacccctagaggaaaaccaattagtgtttataacattgaaaatgatttatagattgctttagcatatctatcaattctaattggaatactttaaatcagctccatagaaaagcaacactgtgggatgatttctgaacttgtggaaactctgtctttcagatctagcatcttccagcacagagataggacagattgccatctgggaagaggcactctgttttctccagaagtttgcatttgattcagatgggtacattccaaggaacgtaggatccaggttcatctctcggaatcatttttgtgaacttgtcttcacaggccatcctaatcttctccggggtcagtggactattaagggtcaagggtccatgcaggcctctctcctgtcgtgctgcactcactgcgtcatggatagcgaaaaacacggaacaccccaggaacacccccgactctcccagacccttagatgaataaagagtatttgagttttgagaaggaggcaacaaagcaatgtgcaactccgtgggcatgtcacagatggcagggattttatattggtctggaccacgagtgtgcagaatgccctggggagaataattcagttcctctattgtataaagtcccatgccttgaataaatgcaccttcaatctggcctatgtcaatggctggatttatactcgtgccgaattcggcacgagctcgtaccg

SEQ ID NO: 441688 - DNA, 761 bp, Homo Sapiens
  misc_feature (520)..(521): n is a, c, g, or t
  misc_feature (542)..(542): n is a, c, g, or t
  misc_feature (550)..(550): n is a, c, g, or t
  misc_feature (592)..(592): n is a, c, g, or t
  misc_feature (594)..(594): n is a, c, g, or t
  misc_feature (617)..(617): n is a, c, g, or t
  misc_feature (628)..(628): n is a, c, g, or t
  misc_feature (661)..(661): n is a, c, g, or t
gctgcaggaattcggctttagctttttcccttcctgtattcctgtagtgtggacatcttttcctgtcggtacatgaggctctaaggcatctttcttccagtcctgggaaaaggaacatttggcttgaaggatcctcggaaggagggactgcccctcaggtgtgtacattctcacgaccggcctgatccctgtgctggagaaagaacacgacccccgagtgataaccgtctcctcaggaggaatgttggttcagaaactgaacaccaatgatctccagtccgaaagaacaccatttgatggaactatggtctatgcacaaaacaaggtcagtgagaggcagcaagtggttctgacggagcggtgggcccaagggcacccggccatccatttttcttccatgcatcctggctgggccgacaccccaggtgtgaggcaggcgatgccggggttccacgccaggttcggggacccgctgcgcttcgaggccccaggcgcggacaccatgctgtggctggccctnntctctgccgcaggccgacagnccagcggnccgttctttcaaaatcgaaagccagttctacacactttgctntnggttcaacggtcttcttaacggnccggagagganaaacctaattgaatcccggaaccactggcttanacctttaaaatagggcaacccagacacaattgcgtaccctgccttataagcccgaagggtcgggctaagggacaagggaataggaagacccactttcttc

SEQ ID NO: 441689 - DNA, 493 bp, Homo Sapiens
ttttttctcatttacaaggggatggtttattcccatgtcctttgggaaaactgtaaaaaagtgcaggtctttcaaatgtcaggatttggagtcatgaaatgtaattcaccaggatttggtctggggtcaaggagcaaaactggggcacacccagggcatataaacagaaaaagtggaggtgcaaagagtctcaaacagggccaccttcggaaggcacacagcagcgacaaggaaggcggagggtgctggcagccttacagacaatgtgggcgcccttgttttgtgcatagaccatagttccatcaaatggtgttctttcggactggagatcattggtgttcagtttctgaaccaacattcctcctgaggagacggttatcactcgggggtcgtgttctttctccagcacagggatcaggccggtcgtgagaatgtacacacccagagtattggcagcaaagtttttttcaagtccatcttctgtgagctctct

SEQ ID NO: 441690 - DNA, 992 bp, Homo Sapiens
agcggggtgtcgaatggcgctcccgcgaatctttccaggctcagtctgaggggcgcgcggagactgtctcttggaaccgaacgcctcgagttgcttgcgccaggggaggacgtcgccccagaagtctcagctctacagaacgtggttattggagattcgtggtcgatagtgatgaggtacttgtgatacacaatcgatgcatctctgtggagagatcgctcgattttcgcatcgtggagatgaagacttcttgtagcagaggtacagctgtgatgagaccacacgtctggcgattgtgtggcaggttgtcatctcgcctatttgattactcagacaagcagtagcgtagcacatgttcacctggtttgtcgagatcaagccccagcagaagatgccaggggtgagatcatccgggagggcggtaaccagaacatttttctgcacattgtggacttgtctgatccctaagcaaatctggtaaatttgttgaaaatttcaagcaggaacataaactccatgttctgatcaataatgcaggttgcatggtcaataaaagagagctcacagaagatggacttgaaaaaaactttgctgccaatactctgggtgtgtacattctcacgaccggcctgatccctgtgctggagaaagaacacgacccccgagtgataaccgtctcctcaggaggaatgttggttcagaaactgaacaccaatgatctccagtccgaaagaacaccatttgatggaactatggtctatgcacaaaacaagaggcagcaagtggttctgacggagcggtgggcccaagggcacccggccatccatttttcttccatgcatcctggctgggccgacaccccaggtgtgaggcaggcgatgccggggttccacgccaggttcggggaccgcctgcgctccgaggcccagggcgcggacaccatgctgtggctggccctctcctctgccgcagccgcacagcccagcggccgc

SEQ ID NO: 441691 - DNA, 330 bp, Homo Sapiens
  misc_feature (59)..(126): n is a, c, g, or t
ggactggagatcattgatgttcagtttctgaaccaacattcctcctgaggagacggttnnnnnnnnnnnnnnnnnnnnnnnnnnnnnnnnnnnnnnnnnnnnnnnnnnnnnnnnnnnnnnnnnnnncactcgggggtcgtgttctttctccagcacagggatcaggccggtcgtgagaatgtacacacccagagtattggcagcaaagtttttttcaagtccatcttctgtgagctctcttttattgaccatgcaacctgcattattgatcagaacatggagtttatgttcctgcttgaaattttccctcgtgccaagcttggcacgagg

SEQ ID NO: 441692 - DNA, 596 bp, Homo Sapiens
  misc_feature (566)..(566): n is a, c, g, or t
gtattttacgagtttaggggttcatcggttagccaggatggctcgatctctgacctcggatctgcccgctcggcctccaaaggctgagattacaggggtgagccaccgcgccttctattagcttttataatggagaggtaactgtcctagaaagtccatgtaaattccagttcagataatgaacaattacttattctatgaagacatttatatttcctggactgtacctttcacatctttccctatgtgaatgggttccctgaagaactttttctgcctgctgagcacttatttggaggtaagtctaacaatgagatgatatccaaacttatcactagactactgaacgatattctattttccctaatggataccaatgcttattccagaattatattctatagttttaaattttcatgctttcgtatctgacatttagctgtgaaattttctgctgccaaagaccttgtcatatgatccacggacagatacacagctaggctttttaaattttggattaattctgttattcaacacacatctaataaataactgctgtgatccangaacagcattagacaataggttttttttgt

SEQ ID NO: 441693 - DNA, 1228 bp, Homo Sapiens
tttttgcagacaaaaagtggtttatttagcacccactatgtaccaggcacttgggaggtattttctcacactttcgctttccatcctcacaatatcccttatgaggtagggactaccctcatttttacaggtgagggaactgaggcttagatgttgacagacccatccaaggtgacccagctggtaatggtagacttcatcctgctacacagtatttaaggggcctaaaccataaacaatttttaaaaatttgggaaagtcacacataaaggagatgtttcaataccttctctctccaggtatgaacagtattgagcaagacccacagggcagcaataatcatttatcctgatgaaaggttcctctgtgaaaggtaagggggttgggggagacctaaagccttctgcagacccacatttaaatgagctgacagtcccagcaggactacagaggaaccagctaggggaagctgccaggatcttagacgtgaaattaaaaggagatcatgcttcttacccaggaagtggggaattcagttgacccttgaaaaaactgaataaattaacatggggaaaggctaattaccatgcccagtgctggggtggagaaacagagtggccaaggttgtagcagcctgggcacctgctgaggccccattcagcgggagagccaccagttgggagtgtggacatgtatggccctaccagctctaagcaggagctggtaagggacttcccaaatgcaaacccttggtgaatattctagcagtgagaggaggtgagcaccagaccactggacaagagaggtcagagtcatacatagcaatctggacaggaaatggcatgaggagctgtgagtaatctgggggctatggctagaaaaacagggcacgagctggggctgagaagaggtgagcatccatcaagctgaaaggtgggactcaagccccctcagcactgtgacccctttcctgtacaccaagctctagttggtgaatgaggtccctggaccaagaggaagagaaaggcccagatgctttctcactgtctctgctatagcctaaaaacctgaacttttctatagttcccttcttgagccttggtgggttttatttttccttactgcctccagaagaagcttgagaaccaaaggatgtttcagtggatgtggggctcctttctctcatcagaagcttccccatggcagaggaatgactgccagggcatcc

SEQ ID NO: 441694 - DNA, 615 bp, Homo Sapiens
acataaatctgtgagctgaagtctcattcccctgttcctccctacccccaaagaggcacagagtgaagggacttggggggcacagctcagcaacccagtgggagttagcaccctttccccccttatgatgtgtgtggacctggccagtgcccctttgaacatatcattattagtgtaattatcatttattttgtgtatttgtcacattgtgtgcatgacagcctttgttaagggtgtctgaggagtatggagctgacaggggcattggaatgccaggaaagaacttcttcaactgagatcaaggcttcctggagggaaccactgcaaaaaggccatcaggcagttttcaagttatgtgacagagggcaaagacggccatagggtgctttgagttttgggatggtcacatgacacaatccagcacttgaacctggggtacatgctccctcattgcgaggcaggacgtaggcacatgactgtgcatttaggcatatatgtgaccaagaagaaggagagaaatggaaaacactggagaacagaaagtatcaggaacttttcatcaggcaatcccaaagcgctctgctcttttcctcttctttgcctctgtatcctctg

SEQ ID NO: 441695 - DNA, 1106 bp, Homo Sapiens
  misc_feature (157)..(197): n is a, c, g, or t
atttggggggggaattcccaagccctttaggtccaggcccggggattttccttgggaaaaccagttaaggcccatgttccctttccctacgtgggccccgcgcgcccaaaagaaaaggttttgaaaagcttcttgagggcccgaggccgcccgccannnnnnnnnnnnnnnnnnnnnnnnnnnnnnnnnnnnnnnnnattaacaagcaacataatcaaaaacaaaaacacaacaaccttaaagctgaaacagcaataagtcaaactgctgccgcagttcatggatgtacctggggtacatgctccctcattgcgaggcaggacgtaggcacatgactgtgcatttaggcatatatgtgaccaagaagaaggagagaaatggaaaacactggagaacagaaagtatcaggaacttttcatcaggcaatcccaaagcgctctgctcttttcctcttctttgcctctgtatcctctgtggttccagttccagctgaacttgtgacaatcccaaatcgctccttcctctttttcagtttctcatcatcttcagactttctggagattgaagagacattcaaaccaaatctttgagctctttccttcagcttatccaagttaaccataggtttgttatcagatgacagaccttttgttggaactgaagaaatcccaaacctagctgcccgagcagctttcttactctccaagctcacaggtacattgaatcgttcagccctcttctgcattctctcagtctgtggtatttcagatgtaattttcaccactttcttctctgctgccacatcaacagttttttcagggggttcttcctctttgacagggagctcaatgggctttgtttcttcttcctctgtttcatctcccagtacatcttcttcatttgcctcctcttcagcatgttcttcaagatatgcctggagtctgtggataagatcttgctttattcccttggtctccaaaccacgagcaagacattcttgctttagttcggcaagctttagcttatggagctccaccgtctcggtcgccatcttgttacccctcactccactaggcccccacccgcggcctccgcctccaggagct

SEQ ID NO: 441696 - DNA, 938 bp, Homo Sapiens
cgtttatgcaggagtttttattctttaaatcttccagtgttaaagcaacaagaaaacatttagaatgtcctttggtggaatcttattacacttgttatatatgtaaactgatattctttgatgccagcacgttcgttgcccttacagagaaatctctgcacagtgaaacaaaacagaacgaaagaggacaaaataaaatgtcagtctttgctgattcgaattagatacattaacagattgtctggtaacacaaattggcaataatacaaaaaatctacatattacagtagttcaagaataacttcatttgaatacggatagatacactttcttttttcctatagccactcttgtatagtgggtgtgtgctcgcactggactcagtgctgctaagatatacaggggtatgctggcttgcgcttttagagggggctgttacacatgtgcatcactaacatcagacaaagaaatctttcaaccaacaagggttacagagcaacgttcactaaagcacaggttggaagggattcagggacggaagcaggccaatatggcagcttgtaacagatttccttatgcccacaatgcacctgacagcaaagaatgctatttggttggtccacacactgggcggagtcgtactagggcgcaccacgctagagtagccaatgtttttaggtcggttgatttgtttgttttttgtctttcctgtttggggggctgtcgcagcctttccaatccacaatatgctctgcagctggcaatgtgatttgcagtgataatatcaacagctgccaactcctctggagtcagaaattaacagtcttgactcggatgtgctgtccacgggtgataaatatggcttagttcagttaggccgtcttagtttgtacactgtctgagtgggggtgtctgtatgtgtaagtttccctggtgcc

SEQ ID NO: 441697 - DNA, 814 bp, Homo Sapiens
  misc_feature (13)..(13): n is a, c, g, or t
  misc_feature (29)..(29): n is a, c, g, or t
tgaagcttcaaanctgctgaataatttcnctctcccattttgtgcctgcctagctatccagacagagcagctaccctcagctctagctgatactacagacagtacaacagattcactggatgaaagaaagataaaaggggtcattgagctcaggaagagcttactgtctgccttgagaacttatgaaccatatggatccctggttcaacaaatacgaattctgctgctgggtccaattggagctgggaagtccagctttttcaactcagtgaggtctgttttccaagggcatgtaacgcatcaggctttggtgggcactaatacaactgggatatctgagaagtataggacatactctattagagacgggaaagatggcaaatacctgccgtttattctgtgtgactcactggggctgagtgagaaagaaggcggcctgtgcagggatgacatattctatatcttgaacggtaacattcgtgatagataccagtttaatcccatggaatcaatcaaattaaatcatcatgactacattgattccccatcgctgaaggacagaattcattgtgtggcatttgtatttgatgccagctctattcaatacttctcctctcagatgatagtaaagatcaaaagaattcgaagggagttggtaaacgctggtgtggtacatgtggctttgctcactcatgtggatagcatggatttgattacaaaaggtgaccttatagaaatagagagaatgtgagcctgtgaggtccaagctagaggaagtcaaagaaaatggatttgtctttctgaatctcggtgg

SEQ ID NO: 441698 - DNA, 1107 bp, Homo Sapiens
  misc_feature (1057)..(1066): n is a, c, g, or t
agcggcattttgtgcctgcctagctatccagacagagcagctaccctcagctctagctgatactacagacagtacaacagatcaagaagtatggcagtgacaactcgtttgacatggttgcacgaaaagatcctgcaaaatcattttggagggaagcggcttagccttctctataagggtagtgtccatggattccgtaatggagttttgcttgacagatgttgtaatcaagggcctactctaacagtgatttatagtgaagatcatattattggagcatatgcagaagagagttaccaggaaggaaagtatgcttccatcatcctttttgcacttcaagatactaaaatttcagaatggaaactaggactatgtacaccagaaacactgttttgttgtgatgttacaaaatataactccccaactaatttccagatagatggaagaaatagaaaagtgattatggacttaaagacaatggaaaatcttggacttgctcaaaattgtactatctctattcaggattatgaagtttttcgatgcgaagattcactggatgaaacgaaagataaaaggggtcattgagctcaggaagagcttactgtctgccttgagaacttatgaaccatatggatccctggttcaacaaatacgaattctgctgctgggtccaattggagctgggaagtccagctttttcaactcggtgaggtctgttttccagggcatgtaacgcatcaggctttggtgggcactaatacaactgggatatctgaagaagtataagacatacttctatagagacgggaaagatggcaaatacctgccgtttaattctggggggacttacctgggggctgaaatgaagaaaaaaaggcgggcctgtggcggggaatgaacctatttccaaaatcctgggaacgggtaaactttccgggaataaaaacccacgttttaatcccccttgggaatccaatccaaatattaaatcccttccctggacctacacttggaatttcccaccatcccctttgaaaggaaaaagaaatttcctttnnnnnnnnnncaaattgtgtgaattttgggagggcccagactctctatatt

SEQ ID NO: 441699 - DNA, 731 bp, Homo Sapiens
  misc_feature (52)..(52): n is a, c, g, or t
atcggactcactatagggcgaagggtccgggccccccctcaagtattttatntagtcttttatggattttatttttcatattttctacaatgagcagttattattcaggaaagaaatccaatactcagtaatcacatattctaagaaccaggaataatgtttaagaaacattttgcatcatggcagcatcaatgaaaagagggcaaacacagccccagacattgagagctttgagagacagacacgagaatcacgtgtgtatgtcaactctggtggggttcttaaaaatctgcccccttagtctatcccacaccagctggaagatggcatggaaggcaaccctgctggtgtgcaccagctcttcctatctgcactgaaatcacctctcactcagaaacatcgtatttccctggaaagggctggctgtgtcccctgggatggatgtgtcccctgggatgggtaagtcccctgaagacagggaacattttcagaaaagcaacttcactttaactacaagaatcaaccaagtatcccccacaaaccacaccaaaggatgaccagagtgtatctcttaccactccttcccccagatatttgaaaaatcacttaacactcagcacataatccaggtgaagagagagtccattctaaatgcctctgggtgatgtacctgagttcattattctgaatttgacccaggtgggcatctttggagacctaagcagctcgtg

SEQ ID NO: 441700 - DNA, 442 bp, Homo Sapiens
  misc_feature (12)..(12): n is a, c, g, or t
  misc_feature (44)..(44): n is a, c, g, or t
  misc_feature (50)..(50): n is a, c, g, or t
  misc_feature (97)..(97): n is a, c, g, or t
gtcctcaactangttggccccaaagctggtcctggaaaaccccngggccnccaagaggaccctccccatcctgggccctccccgaaatgttggggantaacaggccgtgaaacccacggtgacctagctcaatcccaagcttttctgatttctgatgtaatcctaattcatggcactttaaatgttttggtgccttggtgtattaacatgtaacatgagaacaagatttatttacttacctcaagaagctagtacatgggttattgaatgcactcttaaactttgagcccctcagatgaaaagcactgtggaaacaattacagctgaagaaaacccttccaatgcctcagaatcctgacttactgtgccttgtgtctcaatggcacattgagaaacaatgtgcactagttagtggcatcacatcccttcatatatgttgttt

SEQ ID NO: 441701 - DNA, 1345 bp, Homo Sapiens
  misc_feature (850)..(901): n is a, c, g, or t
gaattacattttcagactagatcctaatattttattgagggcctatgtgctaaaaactatgcatatctatatattggccaattatctttaataatttaccttttgaaattgcatgtttatcatatatccttaagtggacacatacagtgccatgttgatgtgcctctcagttttattgaaaagctgccccacagcccatgtctcttgttctctgcaatgcctcaagggagtgagctctcaaccacagatagctgtggcttctcagaagcagctcattgccaaggccaggctgagaggggacctgcttgctgtggtggttgcctagcccagatgagcatttacctaccaccttcccacttgggctagctgtcctttggatatgtgctgttaactggggaaggcatctaactagtagcctgctactccatagtatgggctcaatagatgacacatcattttggacattattcaatagggagaaaaggaaaactaacccttcttctgattgtttggagccatagttgtctcagatgttctaattctctttgtatgcttggaaacagcatagatatgttgctgtggttttcagaattttctcttttaatcacaagaagccttttaaaaaatgacttacacatattctcaatgtacagtaaaacagacagaagtgagcttatctgtttgatgctgtggcagggtcccagtcactgggcatatcctccttctccttaaccagctcctcagtagcccctgagtcacctgcacaaggtgcttgggaactgctggttatgagcattcctggttttcttcagccaaataacaggtaatcactgtcaattggatttggtcnnnnnnnnnnnnnnnnnnnnnnnnnnnnnnnnnnnnnnnnnnnnnnnnnnnnttaaaatttaaaacatttaattcatgatcatgttcatcagtagatgctattattcataagaactgtgattccagcaaactagggtaattggtgcctttttacagttttgaataaaagcatttacaatttctaaattatcagttttcacagtttcagcactcaaccttatcatacgctgatttaatattgttttacattaaaatagtccttttccctgttgagccaccattcatttaagtgcttgtttgttcttaaaaatgccatttaaatgaaaaaattaccccataattgacttttcaccactcttaatataaattcggaatctaattaccaaattttataattcggaaagttgaccggtgccccacggaatagatggtaaattaatttctttaccaggaattcctgtcaaccagagggtttttataccccggcttttctggc

SEQ ID NO: 441702 - DNA, 638 bp, Homo Sapiens
  misc_feature (412)..(412): n is a, c, g, or t
gagtactttgggaacttgataaaatcttaaaatactctcataaacataagcatagcaataatgggaaccttagaattttcactttaattcatttgtatgtttatgttatgcagaaacattggttccatatttcaaattaagaaatcactgaagaatgaataactccctttcagtcataagcatcctcaacattatcaacccaaaataagatgcccttaattcttaagttatcctctagcctcctttcttccctccccttcacacataacgatgttttttagttttcagtgtagaagtcttgcacttcttttgctaaatgtgttcttaagcatttcattttggatgctattgttgtaaatggaattgttttcatttaaattttggattgtttcatttctagtgcataaaggcnagattgatttttgtatattgactgagtataccaaaccctttgctaaacttaccagctcttcattctaatgggttctttctggttgctttaggatcttatatgtgaaagataatttcaagtgcaaatagagctagttttacttctttccttctaattgagatgacttttatttctttttataaagtaatctgcctgcccacactttgctttagaagcattaatatat

SEQ ID NO: 441703 - DNA, 655 bp, Homo Sapiens
  misc_feature (635)..(635): n is a, c, g, or t
gcacgaggcagaagagagtgacgacatggaaaatgaatttaaccactttcttattgggttgtcttgctttcttacatgaacttgtttttttaatcactgaaaggaatttagtgtataatatgtgtttgtaactgtgattatgatagaggcctatctctgtttacatgcatagctttgagttaggctaaatacatcagaagtgttctactgaccacataagaagttagtattgccaatctttcactgcatgtgaaaatgtgaccaatttagcacaaattctctcttagttccagaaaaatcagtaaatgcacatgccctgttgattggagatcagtagtgtcatcttcataaagcaagacaacattatgacactttaaaacagtagcaaagaagtctatttattaacccacaaatgtagcatcaagccagactcacaggtagcaaaatgaattacacacctacttttactgactattcaacataaattgaatctttaacatgaccttaaaggctatttacaaagctgttttaaagtttttcaaacatgatagaaattttctaaattttagtaagagagaagcttttaaaacagtacattcctgaattttggcaaattttagaagcatttattgctntgtctttagtgtaacaagat

SEQ ID NO: 441704 - DNA, 875 bp, Homo Sapiens
ttttttttaaaatgtaagaggtttattctccttttatcaagcagtgtctacagacagagcatccacatggtgtaagctacaaaagaaggatgtatgcgacagacttacatgaaatcattaagtcacagacactttatatggttcatgttcacaaggaagaaaattgctaaaaagtaaagcagattcaataagtagaaccataagctgatttttgttgtttattaaatctacctcgcatgtttctgctaagaagaaatctactgtatcacacagctcaggatgctatatacacataagatattacacactataaaatttcaggtttctaagcagttttatacaatttaaacttgagtaaaatttgtatatttaaaaaagaccttattggattaccttaagtaaatggaggtcatttcaacagcccattaacatttttttgcaacaataaaaacaaaaataagtacaaggattttcaaaacatgtaagctattactttaagcctggataattatctgcttattttaataaaccagctctctagttttaatctacttctgctggccttctcatttcctcttaaaacaaaacagaagcaacaatttttacttttctacagtgtctcaagtaggaggattcgttaggtttcaaactacagcacatagtgagaagatgcttttaggattacaagaagatggataaaaggaatcatttgtggaaattttagaataaaggtttttgatacattatatttaaatagcaaaaacaatggagtactacatttttacttaccactgtcgggctacccctttattcccaacttatatcactaattcttctaagccactaatacctcatcaattctctctagagccgaa

SEQ ID NO: 441705 - DNA, 1579 bp, Homo Sapiens
  misc_feature (556)..(556): n is a, c, g, or t
  misc_feature (582)..(582): n is a, c, g, or t
  misc_feature (1426)..(1476): n is a, c, g, or t
  misc_feature (1481)..(1495): n is a, c, g, or t
gctgggggaaaggagatgtttattttcttcttcccatgctatggaaggacattgtattccgcagttttatttcctccctcaaggagaaaaaggacagcaggtctctgggcctcagggctaagctgcccctacttatatagagctaaccaagacagtacagaaagactggtgactgattccaaatctaccagctaacacatccaccaccactgcgggcaggcaagtgactagaaggcaagttgtggacttggcctcagggaccaagaatttaaagactacaaggtgatccaaatgtaaaggtaaacacctactgtgcatttgaccatgggaacccacctctctggtattctggccacttacagtaagtggcatctaaaagggctgcagcctcccagcctggtgcaagggtcagctctgtcctaagtctcctatcattctccttggccttgagtttcagacaaaagggcagagttctaacaaatcctctgacagaacacgttctcagccaagtcagtcccaaggaagtatcatggcagagagctctggacactcgcanttagtctgtcatttcacagaaccctncccacttcggggcctctccctgggtccttccatcctgaagctgattccccttcaagactatttgaactctcaacttgagtggagtgcagggagcacagtcagcaaatgtggaatatggacaggtggccgggacccaggagaccgtgggcctctgcaacgcttctttaaacttgagcttcaacatttatttaaataaaactttaaaagtcataaccaagcatgtaaagaaaaatactgtcatcttcagctcattttttaggaagggcaacagaggagaaccacaataaactctggaatttattaggtttaagataatgagtgcattttttaggtgttaggctacgtataaagtttgctaaccttgatggcacacacacaaaaatctctagatggagaagtagaagatgctgttacttcaggcaaaagtaagagttactgaacaggaaggcagagtagtggggaaagttactcatctttccccaaagatttaaaaaagggggcaggtgcagaatgttgtcctcttctatccaagaatctcaaagcaattgcctatgttccacactttatgatgaggaagatggcagcaaaaagaacggcttgcccagtcatggtcagcaaacccaccaggaccagcgctgagagttcacattgcttctggttctgaggacttcttaagaggttcttccttgtaaaatgacaaagttatggttttgtccaacagttaaaagagatgctctttaagaaggatgataaactcatttgccttccttaaatgacaattacactcaacttaaataacttgggactctttaaaatcttatcttttttaagctcttcttccaannnnnnnnnnnnnnnnnnnnnnnnnnnnnnnnnnnnnnnnnnnnnnnnnnntctcnnnnnnnnnnnnnnnggaattaccatattttaacatattagttgataagcactcgtacaatctagttaagctataatgtagtccattcaaaataagtca

SEQ ID NO: 441706 - DNA, 1445 bp, Homo Sapiens
  misc_feature (236)..(236): n is a, c, g, or t
  misc_feature (263)..(263): n is a, c, g, or t
  misc_feature (370)..(370): n is a, c, g, or t
  misc_feature (560)..(560): n is a, c, g, or t
  misc_feature (697)..(697): n is a, c, g, or t
  misc_feature (984)..(995): n is a, c, g, or t
agctaagcagatgtgggtatgcgcgtgtgtcgagtcgtgagcatcggtgagtgtcgtcacaggggtatcatatcggaggtacaactttcgcgatgtgcggtctattaatccagggccggtattgttcacgcgatgttggcgtgctgagtcgtcatatatcaggtcgtgctctaaggccgagcgtggttatacggcgcggacactcatatgtacggcatcggagaagcgtgtagagncatctgacgtctcgcgtatgtatcgtngatgtgatcatcgagttcgtaagtatagaattggaagccgtatgtagctgcggcgatacgctaagatattgtatatttcaagtggtatgcgtgtgtgagccaatgangtgcggtgtctgagtcggatatgtaggagcgtgctgagagtgtagtaatattgactcgtctgttgcgcatgagacgctcctgtagagcggcgaggagcgaaacagtgtgggcgagcgaatatacggaagcggcgcattccggacgtggctgtctagatgcagctgtggtcggcaacacgatatgcttttnacggctccgtgagacgcatgtcgctctctgtcctctcttgttatgtctgcggtggcgtgttgtgaggttgtgaatcttacgtcatgcgtgtggtgtagtcggtgaactggcgtcacaattggtgagcagtattgganacgtcggagccagcgggggggcatcgagggcgaggacgagcgttatggctatggtggggaaacggaatttttcggccgagggggttagcgtcgaggatatgcgcgggttacttcccggggtgagacctgtcgtgtggtcgcgagagtaaataataaaccgcttgttgtgatcgtccgtagcgcggggagggggtacgggtatgaattactgggggtatcgggttatgaggagtgggtgagagggacggtggagtgcaagcttgggcaacagggcaaaaactgtctcnnnnnnnnnnnnccccacacaaaaatctatggttttgacattttgatgcctcttgcctgtttcaaaggcatcttgatgtgcctgtggtttcactcccttctaggtcatcatacagcagatgcagagtatgtttctgattaaaaaggaacttaaaggtacaaaatttatgtattcatattcctcacagtcatatctacttctaggaaacaagaacagggaagacatgtatattagcccctggttaatcaggggtaccttggaaaagtacagtaagaatctaagaaaattattctaaaatgaaggaggtcaaaatggaggaagtcaagaatttttgtttctcttttccttgtattacaaagcagctaaagacctacatataaagtccctatacaccagcaataacccttttgagagcaagcctcaaaaatgagagatacattacacaaagtcagaatttccctc

SEQ ID NO: 441707 - DNA, 614 bp, Homo Sapiens
ccacagtgtctcacacatagctttgttattgtgtatataactattggctggtatttcttctcccatagagactgtgaacttctcacatagaggcatggtctattcatggctgccaacacctagcagagcctttagcacacagtagacacttggtattggttttgtgagtggaaattaatttctgccctccagagactgagagtgtaaggatgtgggaaatgttgataagacactcttttagtggaaagagtttctgaagaaaactaattattgtgacatattccaatatatgatagattgaaaggagatgaagatttggagactgaaagttctcacagctttctcacttcacaggctatgtgatcttggaaaagtctgagccttatttcacttattagtcaagagaatgaaatgagaggatgtgtcctggggccataaatgttagatcatttcaacaacatttaatgttagacacttaattaagtgaattctgttttctcagtgactttcattataattagataagtttttttcaggaagaaaaataaagatcctagagtaagtcacagtaaacattttgaatgttttctttaattcactggcccgtcgtttac

SEQ ID NO: 441708 - DNA, 544 bp, Homo Sapiens
  misc_feature (33)..(33): n is a, c, g, or t
gagaagggggggaaaccccaattgagcacccanaagtacccacaatatctttctccagatagccatttgttcatttattaacaccagaggcaataacaacgctaaaaataaacatgcatcaattgtacaataaatacttacaaaaacctctgtctgtcacaattagtgagtgcaaacagaacttctacccaaccttagtgcatttttattttcacaagtaaaacagaaaaggaaaatagtgaatttaatgctattcagcacctttagtaaagtcaaaagactcaacatctccatatatcaaaaacatttgcatctgtatcaccaaacatgtaaagttaattattttgttccatctttaacatgaattattttatttacattactttttagttcaataaattttaacaatatttaaaaattatctaaattcataaaagtatttcataaatttcaacatttaattattatgtacatataaggaagtccatgaaaaaagttaaaagaaaatgtagtcataaagttcaagcaacattaccaatttagc

SEQ ID NO: 441709 - DNA, 888 bp, Homo Sapiens
  misc_feature (58)..(58): n is a, c, g, or t
  misc_feature (838)..(838): n is a, c, g, or t
aagtataaaaaatattcatacaaaccaatagcaaaaatttaaacaatctgaaatccanatatttgaggtaaagtatggtccagctataattagactctgatgtaaacaatgaaactgaagatcatgcaaagaatattgtcctcaagaaatggttactccaaaatgtgaaaaatcaggatataattttacagtattttgtttttaaaattctatatatccacataaaaggactagaaatgaatacacattatcttttgttgtttgggggatgatgggataatgggtactttctattttagcattcttctgcatatttacattttccataataaatgtaatcaaatagtaaagtcgatcattttaaaaaatgaaaccaacctggagaaagttccagttcttgaaaacacactggattctggtgaggcaaaatttgaggctggagtattatgaaaagtcgttttcttcttaaaaatcaactctatgcaccatagaaaaaggattattaatgtctatatcccacaatcatatctgtacgcatcagtttatgatagtctataaaccattttaagaccatatacacaatgtaacatgttgtatatttttcagattaatattttatttccactcctttcacaccataacattcttcaagtaccaaagtccctagctagtctttttctcttctctaatgtttaagaattatttccagagtttttagctgtacttagtgggaagaataagaaaaaatatgtatgctccatttgtttagaaccagaagtctcttctctcaaatatcgcttcatatattttaatgctacgttattaggtataattggcnttggaattgatgtatcttcctgatcaatcaaatctttttttagcagggtc

SEQ ID NO: 441710 - DNA, 464 bp, Homo Sapiens
  misc_feature (44)..(60): n is a, c, g, or t
  misc_feature (353)..(353): n is a, c, g, or t
ttttacccttcctccaagtcttttattttttttttgagttattnnnnnnnnnnnnnnnnncacaacctaaagaactgacgagaggaagacaaagcctcgggatcagccagagtccgagcggctcgggatgaggcacaggtcaggcctagctggatctgtggagcaaggtggtgggaagtcccgaggcctttgggcatgtggggtctgtggaaggagaggaggtcacttaaaaaaatacatatactgtacacatctatatgaagcgtcctgtgttgggggagtggggtgaggtcatgggagctggtccactttctccttggaccagcctccccgcaggctcactggcttggccngcacagggacccctgaagctggctgtcttcttctgtggagcgagggaaggtaacaagttagttccaacccatggtgggcagaggtcggtggaggtcaaaggcatggggatg

SEQ ID NO: 441711 - DNA, 577 bp, Homo Sapiens
gcaaagtgaaataaccagtctggtctgtggaacatctccaccagagagaggaaaaatgcacaaagctcctcaagtgaatctccagctctttcttactctcatgggacagatggcataaaatgacagtctccctttcagttaagaaaaacacaacaataaaaggaaaaggaagataaataaatagtgtgtggatgtctttagatgagactttaaatgttctttaaataacttttgataatgtattttaaatcattacatacaactgccactgcagtgacaatattccagtaggggcagcattttgctaaatgtaaaagattgccatttaaaactcatacatatacatgtgtatatacagttatatcaacactatttatatacatatatatctggagagcaatatttcattgcctttgaatatctatatatctactcccacaatatatactagagacatactgtgtgagtacatacgaaagcatatgtacacatgctctgacatgtatatatacacttttgtctgtgtgtgcataagcggcacaggagagagagaactagttctctctctcaattgcct

SEQ ID NO: 441712 - DNA, 589 bp, Homo Sapiens
ggcccaaagtaaacatgtttattctcagttctgccttaggggtctctagttttgcaagcatgagtaaatggaatcaacaataatcctctccttaaatgtctggcattaaaatttgtcacttaagaagtttcctgttttgcctaaagagagtgtgatttgagggtgacctgaaacaaggcttgaggcttgtggacacatagggttaatcgccttatttcctgccaaatcgcagagcagtgaaaggccaaaggcaactataaatagcagcccggcagatctgtccttccaagagggaaagaacttagcaacaaagagagacacgaggggtgaagtgggcaaagaatcattagcccagtttctgcccatgccagggcatgtgacccttgggaatgctgcgaggcccagcagaggaagaagaggatcaaagctttcataacctccaactcagtgcatcccaaacccagacgggcctggaccgacctgtgcatttactcctgaatgccctcagtcagcagacacgggagccaacaggtgccaaaacgtgtcctccagagtgctcctttttaatgaggtctcgtgccgaattcct

SEQ ID NO: 441713 - DNA, 780 bp, Homo Sapiens
gcaatgcagtatgacaacctgtatactgaataaattcaaaaccaacctaagaatgacaacagtgatgttaaaatatatatttgacaattatattttgggacctatttaaacaataaatataatcacatctattttatggaaaaatatttattcatatagagtgaaaaatacctccaaacttagttatttgtagctgtcagatgagaagtatttcctaattacacccattcataaacactcattttatcacttcaaagagcaccagtgtattttttcaacaaaccagaaagtaagaaggtaggggcttatttcatgtaacagtgctattatgataaggcaccactaggtatatgaaaaagccaaagtatttccaaatcatgtgtttttgttactggtgtcttaaccattagacaggatggttagaaaaaagctgctaacattattaatgaaccacattatagcccctttcccaccattctgtgcttttagttttacttataacagaaatgaaaacaacaacgtagtacatgacctgttaaaacaaacatcttttcccaaccttccaagaaaataacctaaaaataaacaagaaacaaaaaatttatctgatatatttgcaaaagcctatccctgtagaagagtgtgaggagtgggagaaggcagggggacctactttctatggaatatattgaggcacataggttacaagtttctcaggcaaattcatggctagaacatatcagagagagagctcagacctgcagcccgggggatccacta

SEQ ID NO: 441714 - DNA, 2218 bp, Homo Sapiens
acttacaaaattaattttattttgcaaaactcaacaaatacatgttcagatctggtttctcttcaaaacatgtgtttgtttttttaacaaacatgcaagttaatttggcatgccaaacatctttctctctagctcgccttggaaaaatttttttcataacacaaacaagggtgcaaatattgtccaaacctatttacatttttaccctctagaattacatacattaatatttattgggaggaaagcaaaactgcaaaacatagtctttggcattcacatttgcttcagcagtataattaaaacccttatatttgttttaaaagataaacagtttgaaggaaatttaataaatcttgttttggctctgcaaaggagcccctatatcaaagcatttaactggagctgttgagttcctgctggtagaatattactttcagcctatttattagcttgtctttcggtggcccaatacatgcttttttccctctacactgaatgaaagttccaaaagaaaaccatttcttttctctttttcccccagcattatgcaaggcaaggcaacaccacaaattcaataactgaatttactttgattatactttagtttcttacacttaaaattattttgtattataatacttccttggttatctaaaatcaacattgttgattttaaacggttataaagccagactttaagaagcatttaaaacaattcatgaactctgtatgaaaggaaataattgcctccagcttattcttttgcatttgaagtaaaagaatttccagtatcatcagtttactagaaaataagacttagggggtccatataatttattcacatctttttatacatcgtaaacaaggataggatacttctgacagtagcctataaagattttttaaaattttatccttcagtatagaataagtgtcaagggagcactttaagcatgattctggtaggtctgttaggagtctattttccagaaaaattttgtaggaaattgttctgattttaaataaactaaattcatagatttgtgttgacagaatatgatttgtgaggtaaagtcactgtattatctccggtctaaagcacaatgtagcatgtgcaaaagaaactaaagagacatgtatttcaaactccaggcagaaaggcagaatataagagtgcatagagaagagagtgcttttcaggtcagatagtgaaggaagacacaatagttacctaaatcaataagctgtaagcaacatataaatatgcaatgccatttcactgaatgtgaacaggatcaattagaaattgtactgtgatatccacatatttttgagaaaaattcccaagccaggcgaatgtggattggaataaagacataggcagtgtataccaccatagcaataatggttagtaagatggtgttaaacatagatcgctcccagggctctaaaacagcacagcagctaatgatttggtattgatagtagagccaggagaaatattccttcacacgcctcaaatccatggttggctccttcaagctgcagtaagtttgtcctaagaaagtccaggtctggttcttcagccttgctccttcgcgaaatgatcctgtgtgggttagttctcctctctgggttgctgtttcctcatctcccagttgggtgtatctccctgcggcttaggtgagcgccgaggctttggctcctccccagctgctgcgagcttcccactgcgccgggcgcctgggagcctcccggagttaggtgttcggccccgccctcaggactcttgctaaaactcaaattctacctggctaattccggtgattaattattgacaaaaggaaaacactcctacgcaaacttgtgtccaaccgcactgctcccagcgactccttccagaagagaatgcctgctgcaacactcccctcccccccttgctgctatggtcccaacttctcatacgctgccactcttagtcctgggcgatcagactggtcctcggaggaatgcagcccaacgacttctacattttaaaatctggttttctgcagctcgttcgcagttctccagggaccagcctctcgagagggggcgctttcccggtgcaggggaagccggggctccgagagcaacagaggcggctgaggcgtcgctgtcacctccggctgctgcagtccgctctcgacgaattcgagctcggccgatttggcctgat

SEQ ID NO: 441715 - DNA, 773 bp, Homo Sapiens
atctgctcaggaatgacccctgcctacagaaatgcaccccgagggccttccctatgcttttggctaggcgggcaggctggaaaattaagaggcagggtcagtgtatgtggggagtttgtagtggtattgtggaagctaagctcatccctaatgacaccctgagacacttgatctattgtttcttattctattaaaggcttctccatagcctcagtcccaggggctccaaacttcagcctcatcttgagctttcattgcttctcttttgctttcacttaggtcggttgggttgggggggtctcaatagatgctgtctcttatgtggctcccatctgtctttaccgttcaaacccactgctttgctggtggtcagcttctcacttcaatgcttttgatgggttatcctgcatcctgctaaacctcatgccctgctcacctgctgctctacctaaagcagaattctgaatgtacattcactctcccatctgaaacccccatttgctccacactggcaactactcagccaagtataatttctccctttgaaaatcaaggccctctgtaactcttctaaccccacaccttccccacacttgctttgttctcctactgcagccgccagaggcaggatattggcacctacttatctgtgcaccctgagcagcccctagacagcaccttggatgtggaagagtctcagcacatgtatgtttccaataatttaatttggtgtaacgccctggcaagcagtggccccaggaacaagattctag

SEQ ID NO: 441716 - DNA, 1757 bp, Homo Sapiens
  misc_feature (1648)..(1649): n is a, c, g, or t
ggggggggatccaagccattattgaggaccgcggtttgcctggggaacagctatgggcgcttgttcactttccttatggggccggcacgccgaaggggaggggtctaaaaagtttctccagggccgggcggtccgacagggtgcgctcggaatgtgcgggggcgagtttaaaatgacaccataagatgaactttattttaaagctcataaaagtgttcacaatcagttacaacaggatcgacatttcttccattccacactttcacatgacaatatactgtatagtgagagagaaagtttaaagtttttgttctgcatgctgctaacacatttgactagcttttgttttactcattgaatttttaatatcaaagcaaaaagtcattttctcttggacagaaatggttttagaaagcccttatgaagtcagacttagtcttgtttataaacatccacacccacacacatgctgaatggagagcaaaatgcaagaaaactaccttggcaggaacaaatgcttaaagattttaatcacagccctcttgaacaagcagtacagttttttttctccaaaagacaaaagtcagtttcatcctcagtgatgcaaatggtgagactgcacagaaagcttagtatgaattcacaattccacaggaatctgaaagttaccaaggcaattttcccttttaggatcataaagactacagacttaagcttttttcctttttccatataatacacaaaatttctaaatatccttaaaaaagaaaatataaatagtttcagtatgttatgtagagtcacatactatggcaaaaatattttattaattgaaggaataggccaatttaaggttatctagtccaagtccatattaacagaatttttctcattagggtaacattcaccattctgatgtggaggttcagcaccaaaattgtttttgtcttctaaatcttcttcctttttatcaatatttgggccatttggagttctttccagtttgggtgattcaatttttggtttcggttgtgttacaacgggttcacatgtgttgttcaattccttgatttttgttttaatttcctgagcacgtacaactggatcctgatcaagactctttttagcctgagcattcatgacattattcatccattccatcacttcattaacagacttctccacttttttcatttcagactcatcaatatggttgtatttctcatccttatttctgaagtcagctgctatcttggcataatgctgcagcctctgtcctagttcttcaaacatttttggccgttcttcagcttcctgaaaccgaactttaacctggagtgccaattttcattaattctttcaacttgtcaacatattgcttgtttaggttggttctcttattaaaatctaggttaacttcctccctactgttcaatatggttgtatttctcatccttatttctgaagtcagctgctatcttggcataatgctgcagcctctgtcctagttcttcaaacatttttggccgttcttcagcttcctgaaaccgaactttaactggagtgccaattttcattaattcttccaacttgtcaacatatgcttgtttagcttggtcctctccttcttcatacagccagtcttcannttctgtgaggagtctcaaaaaattttgatgatccttaacacaaaatatgacaatattagtggcactcgtacttcagaatttttcacaacaaaacaaagaggtattctc

SEQ ID NO: 441717 - DNA, 1332 bp, Homo Sapiens
  misc_feature (1315)..(1315): n is a, c, g, or t
ggcggcgatgcggtggcgctcgcgtctcgggctgagcgctgcgcgtggggagtggctgcggtgccaccgatgtgggcgcctctgagaatggaggccataagagccggacgctgttttccttgtcggcggccgtggaaggcgacccggcggctgtggaggccacgctcagctcgccaggcggcgcagggtgcctcatctccagacatggagcccagctatgggggaggtctctttgacatggtaaaaggaggtgcagggaggctctttagtaacctaaaggacaacttgaaagacaccctcaaagacacatcttctagagtgatacaatctgtgaccagctacacaaagggagatttagacttcacttatgttacctccagaattattgtgatgtcctttcctctggacaatgttgacataggattcaggaatcaggttgatgacattcgaagctttttggattccagacatcttgaccactacacagtatacaatctgtcacctaagtcttatcgaactgccaagtttcacagccgggtctcagaatgcagttggcccattaggcaggctcccagtctgcacaacctttttgctgtgtgtcggaatatgtataactggctactgcagaatcccaaaaatgtctgtgttgtccactgcttggatggacgggcggcatcatcaattctggttggtgctatgttcattttctgtaatctctactctactcctggcccagccattcgattgctatatgcaaagcgaccaggaattggactttcaccatcccataggagatacctgggctatatgtgtgacctactggcagacaagccctaccgccctcacttcaagcctctcacaattaagtcgatcactgtcagtccaataccctttttcaacaaacagaggaatggatgtcgcccttactgtgatgtactcattggagaaaccaaaatatattcgacttgcacagattttgaacgaatgaaagaatatcgtgtccaagatggaaaaatcttcattcccttgaacatcactgtgcaaggagacgtggttgtttccatgtatcacttgaggtcaaccattgggagccggctacaggctaaggtgaccaacacacagatattccagcttcagtttcacactggattcataccacttgacacaacagttttaaagttcaccaagcctgagttagatgcatgtgatgtaccagaaaaatatcctcagctatttcaggtgacactggatgtagaactacagccccatgacaaagtaatagacttaactccaccatgggaacattactgcacanaagatgtcaatcccagc

SEQ ID NO: 441718 - DNA, 586 bp, Homo Sapiens
ataaccccgcacaccgacttgcatgcaattatcatagcccgagtgctcctccgttgagagacttcgcccccgagaccgctgactgtgaatgacaaatcaaaagtcagggttgcagaatcagccggactttcctgctcatttgcagcagagggaggaagcagagaatgaaagattctgaaaataaaggtgcctcatctccagacatggagcccagctatgggggaggtctctttgacatggtaaaaggaggtgcagggaggctctttagtaacctaaaggacaacttgaaagacaccctcaaagacacatcttctagagtgatacaatctgtgaccagctacacaaagggagatttagacttcacttatgttacctccagaattattgtgatgtcctttcctctggacaatgttgacataggattcaggaatcaggttgatgacattcgaagctttttggattccagacatcttgaccactacacagtatacaatctgtcacctaagtcttatcgaactgccaagtttcacagcccgggtctcagaatgcagttggcccattaggcaggctcccagtctgcacgagc

SEQ ID NO: 441719 - DNA, 1848 bp, Homo Sapiens
  misc_feature (47)..(47): n is a, c, g, or t
ccctcggggtgttctccccggaaaagtttcgccccacccccaattgnctgggtgttaacggttgtgttccaatgcgaagggcggttttgagccaagccccagtttttcccctggaaggcttccatcagaagggtttcgtcgtcattgcagttggtggcccagtgtccaaacatctcacagatttcacagtatgggcgttcctcaccccgactgccatggtgtgtggaatggggagggtcctctgacatctgtgcctgggtaggacaatcctctgtgtcgtggagatcaaagcagtcacaaatgtcacagaagaggcgaggtttcttcttggactgtttctcctgatcatcactgtcataattgtttaggtcatccccgttcccattcagggctgcttctgacatcatctccaccttcatcttgaggtcttgattcttcctttgaaggtccactattactgaatttaggaaatcaatcatttgctgactctcctgggctctttcatcctcgtctgcctgagtgtctgtattacctgaggagctgctgagctgcctcttgttttctttgagttgaagctccaagttctttaccttgagctcgagcttcaccttatcagactctagagtctgaacaactgaatgcaaggacttggcagaggcgttttctcccctgagcactgtgacctcatttctcagtttctccagctcggcatctttttctgtgagtaaggcactagttatactgatggatttctgcaaggaagctttctcttcatctgcgtcttttatgaacttggattctctttttttcatttctaacaactgattattgagcacagatctttcttcttccagcttttgatgacttgtgacttcgtccctgcttctccccagctcctcagcaagtttaacgttctcttcttgcaacgctgaaagctgctgggacttctgagctgctgcctgctttagggtttctatttctttcctaaattcttccattttttgattctctacagtcaggagttcttttgatttgttcagctcttccacatttttcaagttgttttctttaagtgtgtccaattcattctgtagttttgcatttgtttgcttggtgtcctccaaggaggccagagtctcagtcttctctttgggtcatctgttcccattatctgcatggcatcttccggctgtttgagcagctttggctttgtcggcttgcttttctcagctcctccagctcctgcagcaagccactgttctcctcccgtgcgcccttcagcttgtcctctgtgtccagcagcgtcttctggaggttctgtaggatttcttcatgcttggtttttgtctcagaagtggctctctcatacctggctttcagctcctgacactggttgtggcttgtttccattttcttttcccaggtccgacaatttcctctccaattctttcttttcttcctcatgctttttagctgcttcttgctggctctgttcagctttgacagtcatgtcctcaatacttttttgcagaaaacttgcattttcattagcctttgtaagttttagctgtaattcttctacatctctttctttcagacgtaattcatcgttcatttttgtcagctgagaagagttatctcctgacatcttcattatttctgcaatgtcattttccagtttttcctttgcctttatcagctgctcttctctctcatctttctctctaaattttgcctccatatctgctaagttttctctcagcttctccaagtcagaagacagcatgttaaactgttcctccttttggtgtaacttatttacagtttcttgcatacttctctgaaccc

SEQ ID NO: 441720 - DNA, 1350 bp, Homo Sapiens
  misc_feature (77)..(77): n is a, c, g, or t
  misc_feature (1275)..(1287): n is a, c, g, or t
ttcttttttcccgggggttttctttatttgttaccggtgtaccgtttcccacggattggaagtagctgggaaagganggtttctggtcttctggaccctggtttctgtgattaccagggctgccattctctttttgtatcttgaaggctccataggggaaatttgcggatttgaaaatgacttctcatttttcccagtgcataaaggggatgtgtcttattacactttgcagtcatgttgggtggagttaatatctcaatctgtgaaaagacgacaaacttatctgtgcaggggataccgaaggctgcgctcctgccccgcaccaggatgtgggaactttgagaaccgctggagagtcgagagatgtcatcgaaacgacacccgatacgtgttccctgagcatccgttttgtagtgaagacactcgtactgttgacgcctgttggcaacgttcaagtacaggtcgtactggacgtccgcgggggcccccgggcctaccgcccagctgcagctcaagaaatccacgtcatgaatccagcaggtcagattctccgcacctgcccaaggcttcccactgttctcagggaagaggatccacgtggagaatggtgggttggccactcggacggtgtagttggtcacttcacataaggaaattgctccaaactggcaatagctattgttcactgccggcatagaatagtcggcgtctttaacacactcgatatcggtcacatttctgttaaggtcccaggtcaactgctgagcctttgctttcatccttaggttcgtgattggtgggtttggatcttccttcgtttgcaggagacagggcagggcgatcaggagcagcgtgagccaaaggaggaccatcgggaacgcagctccggaacgcaggacagaggtgcctgcttaaatggagatcaaagtactgtgtggaagaaacagccttcgtggttccagttgagaagatctggggtgtcctgatcctaggatgtttctgatatcttcccgtgtgcgctgaaagcagctttccccgaagagcaaccgaaggttgtactccccgattgagctgttttataacctccagctggggccccacccctgaaactcagaccccataaggatctggcagtggggacggggtgggggctgtcagagacccccttctctcccacgggctgggatcctgggggtcagcagcttcgtaaccatgaacctgactttccttgaaagaagactctttctttgaaaattatcatgttcccgttctcannnnnnnnnnnnnctgcaagtgtttctgtttgctataattagaaattcttgctggctatacaggcagggttggcaa

SEQ ID NO: 441721 - DNA, 687 bp, Homo Sapiens
atatctcatcacagttttattttaaagaactatgatatccagtatttttccatgagagatattgatcgacttggtatccagaaggtcatggaacgaacatttgatctgctgattggcaagtaagtaactataactgatgtcagggcaaacccccaatgggcaacacacttttagcctgtttcttgaggacagcagctttacttttaaaatacaaagcaaaaacatacacataattttaaatagttcagaaaggcaaaatttgaaacacaggtcatattcttcctctggggtttttgggaggaggtttcctctaaatcattgcctagatcttctgtctcatgaatttttctttatctccatctttaatgcttatcttctgagatgacaagcatttattgtttcaactgtcccattcttcccagcctcacgattgtttcatctgagttttatattaagcaaatcttggcagtgtagaaagatggcagatgaatactaatcaaatggtaattttaagagcattttcccaataccaagtctttacttctgggtgattaatgtcagaattgttatctggtagtatgtcatttcataagctgttaagaaacttagttgttagcttcagcctttggacactggggctataatgaagttagaaatggaagatgttaaaactgcagacctaaaatt

SEQ ID NO: 441722 - DNA, 937 bp, Homo Sapiens
gggttagtcccccgacaacaggagttcctgtggctggagccagtgtagggtcaaatggcatcaatatcgaaactcaaatggattggtctttgtctcttggccaatcagcagatcaaatgttcgttccatgaccttctggagtaccaagtcgatcaatatctctcatggaaaaatactggatatcatagttcttgtaaaataaaatgttcaggagggtccacgtctctcagaccaatatacacaatacttgcagaagagatacaaggtttgatccaggaaaatcctgggagttgtggtaccttatcctgtagttctctgaggagaaatgaaactggctgtccatggagatttcctgatgaagtggtaaggggtgtgttgatgtcagcatgggcatcaacccagacaacacaaaggtctgggcagtgtcgggcatggccactaatggtaccgattgccaggctgtggtctcctcccagtgtgacacagctgtagccatctgacacagctctgctaaccacctcagccagttcctggttggcaagacccactgagcgtggattcactatcaggttgttgtagagatcatctttggggactggagtaaaactcaaatctccaaagtcttttaggtggcagcccaaactggagagccttttcatcaagccagcttctcttatggcagcgggaccatgctccactccttttcttttctgcccttgtgagaacggggctcctatcacagccacggagtggacggatttcttcaggatggaatgcactcgcgtctggaggagacgcgagaggctgccccttagggacatgatccgcagcactgagaatctccaaggcagaggctccgcgcggttggaagccgggagtgagcgccaccgcccgccgctgctcttacctacccgcgccagcgtccgcccgccccgtg

SEQ ID NO: 441723 - DNA, 849 bp, Homo Sapiens
ggaaaagtagccagtcttgataacgtggaattcatcttagtactctttccatcagccattctcatctaactgtatcccccttattagaaatcctttcaggctctagtacaagacctaccctacataaaggacccaagatattgtccagtttgcagatttcttcaagagatcagctttagctccaaattcacaactcccaatgaaccaatctcttagagtgcaaattacagccttgcactcttatcttatcttgccttcttatcttaatctgcctttagataactcaaagaactgcatcagtttgacaatttattcttgtatttaattgtttaaatatacaattttttactcattattaccttagtgtaatttggtaagagccatgtccaagcatgactctaaaggactatatcctttttattagcatggccatataatttttagctacaaaagtttaagcaaaaacaaactctgcaatgatgtggaatagcagaaaagatcctttgcaggcaagagactctagcatatttacctatgtagttaacaggctgcagaccctggttgctacatacctgtattgtgtatttcctcagcaatatacatgccttctcgataggttagtcccccgacaacaggagttcctgtggctggagccagtgtagggtcaaatgcatcaatatcaaaactcaaatggattggtctttgtctcctaaaaaggaagaggataaaataatacttaaaataatacttaactggttgtccttggacactcatccttcttatggttgcaactccttgattttgttgctattagtcctagtactttgttaataaagctgttaatacatt

SEQ ID NO: 441724 - DNA, 630 bp, Homo Sapiens
  misc_feature (490)..(516): n is a, c, g, or t
aacaaaagaaaactcttggatcagtcttcaggactgagtaatactgataaagaaatatcacttgaaaggagctgtcaaatgaagataaattaaaagggtaactaggatttgccacctgcaatactgatacctactagcacagaatcaaagctagagtataaaagaaaattctctataagtcactgggcaatttttaagaactcattttttggggggagcaagaaaagtagtcagacaaatcagtccaaggtgaggtatctttggaaaatttaatttggaccatattttcttcctctttctgaaaacatcaaatatccccatacagtttgggttccacagcttacaaaggggcagtgggtttcccgcagttacatactgtacccaactttctatagaaagataaaacattttccaaccttgcttttgagtatttcctaaaaaatgctttaaagtttccttacaataaatggcaagtaaaacaaagtaaggnnnnnnnnnnnnnnnnnnnnnnnnnnnatgtactgcatgttcgaggaataaggaaggaagactagttccatcagagtactagtaatcctagtaccctggggattactgctggatcctcccaggtatacccctattattgag

SEQ ID NO: 441725 - DNA, 548 bp, Homo Sapiens
tccccttggctgcaggaattcggcacgagattttggctacaatatgttttattgtaaaatagaggtgtttttgaggaggaaccacaacaggaggatagctacttaaaacagtgaaggacaattatttcaaatatttatgaaattcacttagtggttattcagggccagattctcaccctttatcactctatggggacattatgacatttatccaggatcctgagactaatttaggaaaaggaattcatgttttgtatgagcttttaaaaaattcaaaaactgacattttcttctaaagtgtttctcttttgaaactttcaataatgactttaggtaaaagggttattttttaaattagctattttctttttatgttggtcagaatatgctgtcctctggtccaaacaatatttatggctttgcttatacctatttgattatatgttttattatgataacataatttcattatgttatttctaacatttttcccacattggtacattagagtactatgctatatgttcccccctttttttaggcgttgg

SEQ ID NO: 441726 - DNA, 814 bp, Homo Sapiens
  misc_feature (550)..(732): n is a, c, g, or t
  misc_feature (749)..(749): n is a, c, g, or t
agcctgttcaagtaggctctcactagagttaccattcatatttgagaagaaaagaacatttaataaatgtatgtgtggggctgaggttctaaaggaattgaaaagagacgataaacattgaatgagggtgagggcatccctgctggggagaaacctctgtccctaggaagagtccgttcatgtcatgtggtttgggatgaaccaggggtctggccccatcgggtcacaggtgatggcaaatagaaaagaagcaaatggaggaaatagtcggataagtaggtgacgtgaaaggcaggacctggtcaccccagcaagtgctatggacagttcccggaaacggttgcccacttcacaggtccatgggtctgacccttggactctgccaggatcaactgcccagagtgccagagttttagccaaaggtgtacttacttccttatttatctgcaaaaggatggaaactgtgggagtcaaagcctattttgctgagtgttcccactggagtctctggtagaattagcaggtcatgctgtcaaaatcatggacaaannnnnnnnnnnnnnnnnnnnnnnnnnnnnnnnnnnnnnnnnnnnnnnnnnnnnnnnnnnnnnnnnnnnnnnnnnnnnnnnnnnnnnnnnnnnnnnnnnnnnnnnnnnnnnnnnnnnnnnnnnnnnnnnnnnnnnnnnnnnnnnnnnnnnnnnnnnnnnnnnnnnnnnnnnnnnnnnnnnnnnncgggagatcatttgagncagaagtgaggttgagtggcttagataccttactgtactcatcttggtgacagaaagaccctgtt

SEQ ID NO: 441727 - DNA, 321 bp, Homo Sapiens
aaagaaaccagatgatccagtaattccacttctggctaaatatccaaaagaaaaatatagccagggacttgaacagatattctcacacccatgttgatagcggcattcttcacaacagcccgaaggcagaaacagcctgaatacacaccaacagatgaacggataaacaaaatggggtgtataccacaatgttattcagcctttaaaaggaagggaattctgacacctgctgcaacatagatgaaccttgaggacgttatgctaagtgaaataaagcagtccaccaagggacaaatgctgggctggggtgcggtggttcat

SEQ ID NO: 441728 - DNA, 298 bp, Homo Sapiens
agtatatcctttagtgttttccccttgtttgctctactccagggcacaaggctcctctgttacatcagacacaccccctcccacgtcagtgccttgcacttgctgttccttttgcctgggatgctttccacacagctatctcatgagtcattcccgctcccctccctgtcacagtcagctccttcaggtcttttctcaaacacctctgcttagtgagtccttctctagccacctgattaaacttgcaacctacttcttaactcttttcaccaatgactttttatatatatttaaataa

SEQ ID NO: 441729 - DNA, 620 bp, Homo Sapiens
  misc_feature (232)..(245): n is a, c, g, or t
  misc_feature (248)..(248): n is a, c, g, or t
ggagctcggtaccttctttgtgatgtttgtatttctccgaccccaaatatattaataaaaacttttttctgagccctcttcggtgggggatagagtgagaagagaaatgggagagggcctgttaattttcaggtcatcttttaagttacagaacagtatatactgactagttatcttaaaaatactgagccaatgaattcgttcagctatgtaagattaaagaaagacagannnnnnnnnnnnnnacncgtaaaaacctgtaaaggagtggtcagtttttagatgaaaggtcataggaagaagagcattaaaagttgagatataaagaagagaaaaaacccaacatcgaggaattagaaaaataaggcgtgacagcatttccacattcatttcgaagtgaaaggaaagtcgaagggacattaagggaaaagggctccttgcgtagtttcccctcacagctctcgtcttaagaacgcttaagggtcggtgcggtcgttgactaaccacttcattaggctcgtcccaccttcaacctcaaggctttcgcctttttagacgcaacgccgccggttccaacagagacgcggccgctcactgaaatagagagccaaggagacaca

SEQ ID NO: 441730 - DNA, 832 bp, Homo Sapiens
tagaagtaaatgtattttttattaaatcagaaaaagaaagatacagtttacatgactgtcagtcaatcatatgctactttgaattacattttaatagactcagggtcctatttactcctttgtacaggtattaaaaacaactcaggtatttgagaagtcttctgtaaatttttattaactgaggttatggggagggttttatcagagcacatcctgagaacattaggaatgacagacacacttgagataagtgtcagacggaacagatgaagcgagcccctcagccatctgagaaacattaataatgtaagatagcagagaccaaatctttgttagggatacagtattacaggataaaaatggggaccttgccgcccccttgtgttgcaaaataaccgtgcaactgtccttatatatggtcatttctgatgaatgtttctctgtaaggttgataatctttggccgatggtcaactgagccgcaaaagcaataagttgttcccaaatcattttaaagccctccccggtcaatcagtgccctctcatcaataagttacaagggaccctatttgaaaacgccagcgcttattcaatccctttatgtagtacccccaacacattccgttctagagaaattggagacccaaccaaacacaggccgggataatcacctccttggatgtgaagtgtaagtcagatgcgaatccgagctgcctgagtgcaagcttagaggaaggaccgcgcgtttatacaacagctgatccctgcacgcagctgtactcctataatcatgccacggctaggtgagaagaacagacgtgcgacaggtgggg

SEQ ID NO: 441731 - DNA, 627 bp, Homo Sapiens
gcacgagctcgtgccgattttgcattctttgggtggaaagccggattggactgcagcagcctagtactcaaggagagggcacggcagggagaggagacagcagcggaaaggcctgagctgggacagtcgaagagctgtgagcggcttgctatggctgaaacgtagtttgagtgtgaccacaaaacatggcagactgtgaccacattgcaaggatctcggaggcttggtaaaagggttctcttccccggagatgtggcacagtgtccgatccccgtgcctttcctcatacagtgccctcccccctttctccgcatgtctacgttctgactctagtgccactttttccacagtctccctggtccccctcccacccaccatcaagatgggatctctccctcctgggagcacctactgcactttgctttcattcattcattttttaaaattaattaattaattggtttatttattttgacaaaaaaattacaattcactgcgccgcgtttaacaacgtcttgactgggaaaacccttgcgaaacccaacttaatccccttgccgaacattcccctttcgacaggttgggcgaataagcgagggcccgcccgatcggccctggcccgttggc

SEQ ID NO: 441732 - DNA, 765 bp, Homo Sapiens
  misc_feature (678)..(678): n is a, c, g, or t
  misc_feature (703)..(703): n is a, c, g, or t
acatgagtgatacaaattttatttttcatgctgaaatttttttacaaattttattgcgtcatacacaactacaagagtaacagttataactgaattaaaaaaatagcattttgggggcatttctatttgtttgctattatcataagcatgttttgttacatgaacagcaataataattacaattacagaactgctcaattcataaatgtagtaagtgtgtcatgatggaggctactacataatataaacagtaaatgcccaaacatattttcatattctatattatttattatataactagaatcaaggattagaatctaggtaataccatcattcaaatatctgaccaagtcaatcaagtgagcaagcacgtcaaatcattttccaaaatctgttatagtttagttctaaagaaaaatataagatgaaacacataaggcatggcttgttaataatttatgcctaaaaccattatataataaaaatctgcatattttgcaacttggcatttgtttcatctgacacaataataaaaaagatgaatagtactatcagcacttggaattacccaactacagctgatatagtacctcccagacttctagtttctaaaattctgggtgaagtgggacaatttgaactataacagtctacatggtagtaatattaccttttggncactggctcaatacttatccttttntgttttaatatataaatatgctgaaaatgatctcttcacatttcaataattggttccggggt

SEQ ID NO: 441733 - DNA, 704 bp, Homo Sapiens
  misc_feature (402)..(432): n is a, c, g, or t
  misc_feature (666)..(666): n is a, c, g, or t
atggagacaacttttaccggtgcgaatgtgccccgggtttagctggtcccgactgcagaataaacatcaatgaatgccagtcttcaccttgtgcctttggagcgacctgtgtggatgagatcaatggctaccggtgtgtctgccctccagggcacagtggtgccaagtgccaggaagtttcagggagaccttgcatcaccaggagcctgcccagccccctggtctttgagctcccacttctgccagatgtcctaatggtgatgcagtcttagatcatagttttatttatatttattgactcttgagttgattttgtatataggttttatgatgacgtacaagtagttctgtatttgaaagtgcctttgcagctcagaaccacagcaacgatcacaaatgacnnnnnnnnnnnnnnnnnnnnnnnnnnnnnnngatgatgggggaagggagactttgatgtcagcagttgctggtaaaatgaagaatttaaagaaaaaaatgtcaaaagtagaactttgtatagctatgtaaataattcttttttattaatcactgtgtatatttgatttattaacttaataatcaagagccttacatcattcctttttatttatatgtatgagtttagaattgaaggtttttgatagcatttgaagcgtatggctntatttttttgaacttttctcaatacttgttgccttgcc

SEQ ID NO: 441734 - DNA, 1100 bp, Homo Sapiens
  misc_feature (20)..(20): n is a, c, g, or t
  misc_feature (50)..(50): n is a, c, g, or t
  misc_feature (63)..(63): n is a, c, g, or t
tgcctaatcaatatcctccngaacctcagaattttaaaactccctttcantccaacgaagganttaagttccaattaaaggccttcccactgtctgcccaaattcctagaattctgtcctagagtgcttagcatgcttgatgaagagaaagcagttcagagccccaaagaggtgtcaggtattaggtaagttaatttggttttgtataaaaggcatggtaatctggcaacagagtacttatcctattagcagcacagtggtagccaagggtctctgtctgcaagacaggaaaatgaagctactgaagcccctgttgctcccacctgcctgcaggatggctactgattttacaaaggccttctgggagccaatccagggctcacctgggagagtgggtaacagaatggcaggaaccatgttcagcccccatgagaagtgcccgactgagggaagtcagcttcccataggtgagggggctgttgccattatgggctcagaatctaaatcttactgatccctagtagtaagacaattgccaagaaattgtcctagcaggtactacccaagtgttacaggctctgcataggtcctcaaacactttaaaggacacgaatccatcaaattcaaaagagtagtgtttgttctatcagttctgaatgtccacagggagaggcaactagatttatgtggaaaaagtgctgtttgaaggagctgtgttttatttcgaagtgaaatgactttgggaaccagaacatttctgcagatgtctgaatatcaagaacctatctctaaaaggcatttatcaggaaatgttcgctcactccaagtgctttttaaaaattcaacatatggcaatgttttaatttttgtgctttcaagaggtaactaaatcgataggaagctgagggaagatcattccattatggactttcttgtttgggtgcaagacactatccacagcattgaaatctataatctcataaaagattcttataaacatataccatatttctcctataagaaaaactgagaactgtaccatgaaggcaaaatttgtttgcctactctcagaattccttggaatggcaatgtctcgtgcc

SEQ ID NO: 441735 - DNA, 841 bp, Homo Sapiens
  misc_feature (143)..(143): n is a, c, g, or t
agggttcttgaggcatgggaatccatgtagccagcatcaaagggttggttctttaaacaattgggaaataaaaggtttgttttactaatgtatttcttgggtagtcatcactacaaaagttttcagtgttggttacctataangacaagtactagacagaagatcaagttacacagaaatatttcttctgtactgataagatacaaatattgagctctcaaagcacaagttactatgctttttcttgccttattgggcattctctaaaagcaaggctttgtgcaggaaaagttcatgtctacctaacaaagggtgatacatgttctattttcctacaagtgaacaattaacaaaaattcacattatcaattatttctggttgaatctgttagaagccaattacaaagggacagtagcacttggtgtcaaagccactttctggtcacacattcattccatggttgctagtcagtatctcaggagctcagaatttaaaactcctttcagtcaacgaaggagtaagttcaattaaaggcttccactgtctgccaaatttctagaattctgtctagagtgctagcatgcttgatgagagaaagcagttcagagcccaaagaggtgtcaggtattaggtaagttaatttggttttgtataaaaggcatggtaatctggcaacagagtacttatcctattagcagcacagtggtagccaagggtctctgtctgcaagacaggaaaatgaagctactgaagcccctgttgctcccacctgcctgcaggatggctactgattttacaaaggccttctgggagccaatccagggctcacctgggagagtg

SEQ ID NO: 441736 - DNA, 467 bp, Homo Sapiens
ttttttaacaatgagacatatgcagctttatttaataatctgtaaaaagtcatactctggcagagtgatgcattccttatctcagcagaaagcaaacagtctgtctgaaaagccccttcccaagatttggaactgtgtaaccctgagcttacatctcaatgctcccaagagctgggctcttgctatgtggtagttggtctccacaattctctcaccctccagcaatactctctgtctggctgtgactccctcacctaacagtagacatgaggctgaaaacaactttacctggacagggctacccctacagattggccctttctctcctacaaaagggagttcatagggattaacaatctttctaatgggctggggagcaatgacttcatgcctgttaatcccaggcactttggggagggtgagggcaggtgggatcacccgagggtcagggagttttgaggaccagc

SEQ ID NO: 441737 - DNA, 535 bp, Homo Sapiens
gaaggaaggggctggtccaggccatggcccaaaatgttgcctgtgccaaaggtatctcgtggtgctatccaccagaggggggcttaagtataagccattcctctgtaaaggacttggcgctgaatccctttgtaaattcaatctcatctgaagtgtcgagcaaggcggggcagttctatattcagcacgaagttgtccgaaggagtgaagtatattcttgtccagattagcaagttgttctcctgagcagacttgctttaaattatctggggcaactaccagacgattgcaaagagcatgcagagtatcagaaagatgtaataccattggaatcttgaagtctttggcccacttcctatattcggctacatcacaaattgccaacatgccacccatacgactgtaggaatattgttgaagatgctcatagataagtcgatgataacgtactccaagttccatcaaaactgtatccacattcttcccatccatggaatttttgatcttctccacgtgttttcttacgtaagcacag

SEQ ID NO: 441738 - DNA, 1463 bp, Homo Sapiens
  misc_feature (53)..(53): n is a, c, g, or t
  misc_feature (262)..(262): n is a, c, g, or t
  misc_feature (273)..(273): n is a, c, g, or t
  misc_feature (311)..(311): n is a, c, g, or t
  misc_feature (582)..(582): n is a, c, g, or t
  misc_feature (683)..(683): n is a, c, g, or t
  misc_feature (1231)..(1240): n is a, c, g, or t
cggtataggtctgtcgctctacgcgtggcgcagaggaggggggggatttacgnccttacagtgcgcaccttacctcttcgtgtattctagctttcggcgcggggaagtcgcttacagagggttaagtattttctcacgcgcctgcggtcctaatgcctgggtgtatttggctgtgaagtgaagcaaccggaggtgggtggaggtgtagggtgtgggctcgttggggtgtggcttctcgtgtttatacgctcgtatgttgtgntaggggcgatnagtggggggcgggggcggcgccgcgccagagcgggggnatagacgagggggtgctgtggtgcgccggaggcggcgcgggtttttcccgcagttggaggggaatcatcgcataagaatggttgcggatacacgagagtgggcggcaaagtgggttggtgttaagacaaggttaggagttgtgtttcgcagtattctgtataacgaggttctgaagagtgaagaaaagggtcagatgtgattcgtgggtggggtgaagatatggaaatcatgtgagaggacacgattcacaataatgcgtgacataagagnagcacccagcacgcgtcgcatgatgttcttagacaacgttaagtgcgtaaatattgtgtgtcgactctagtactacacgcgtcgaggaataattggcgcgnccccgctgaatgaacgtgtgttctcatggcgataggaaggggtcgcgatcctattctcacgaaccattgcctcttgttatttcttccgttgttcctgtgccaccattttcctcttcccaaaatttaagaagggtgggacaaaagagggcacaaggggtaaagaaaaaatagccgaaaaggaggcaaagccctgccttgaaaatccaataaatccgccccctaaaaccccccccaaaaaccaagggtaggtgcattttccccagggggaagggggaattttccactggacccgcttgggagcggaacgggagatcttccgggctacagaaacctgcaaagaaagacactcaaatcagaaaaagaaacacaaaagggaacaaaatagatcaccaggcaatctggaggggcagggagccggagaagaggggtggggtgggtggtagacctggctggacaggagcaggcaggaggggactgtgaaaggcgaggagaagacggagggaaggtaacaagcagaacagtttggtgtccttccagagccctgggtnnnnnnnnnncctcctaccacccacgcccacctacccttgagcagcccccaagggggtgaagtggggcagggaaacatgggcagcagcttgcgcagttgagacgtgtccatggcgaatccccagagtgaataagcagccccctgccccactccctgggccttcccctactccccaaagcaggtccctcctcagcagttagttatgggattctccccccttccaccagtatatc

SEQ ID NO: 441739 - DNA, 914 bp, Homo Sapiens
  misc_feature (412)..(475): n is a, c, g, or t
ggtttccaaattatatttccatacctggaaaatatctactttataaatagcacaaagttatagttttcaatgaatatgaaaaagttcttgcattaacatattttatgtatcttttatattgacatttgtgattgccactaaaatgtgtattttctaaatttcattgtgcttttacaagatacttttttctttgatgtccataactgctgaaaaggctcccctaaggagaattttaagactaagtaaggtttttagtgagcttaaattatacaattctgaggcattatttaaggtgcatactgtattttttgcttgaaacctgtcagcattttatttgtatggcaattaaatgactcagccattcatgtctcatgccagtctttttcaattgttatttttaacaaagaaaatnnnnnnnnnnnnnnnnnnnnnnnnnnnnnnnnnnnnnnnnnnnnnnnnnnnnnnnnnnnnnnnnaacttacagcaaaaatgtttaaaaatagcaaatagtttgagtatagttaaacctaataactgtacttttgtttctatgcctctgagacaagattactagacccttattcaaagtttctaaatataggaaatagaacattgggccatgctaaaaaaattgttcagattttcttttgaaagagaatagttatttttcctcctgacctctaatgaagatgctttatttgtcaaggtgttttccttagaaaattgacccagtgtcaactgtaaagaaaacatagaggatccttggatgattgaccaacttatccaaacacaggtttagtaaagagaggatataaagataaaatgtgaaatgacctctctgagtcacatttgttttcataatttcctagcaaacatccaacttcactgctaccctcagcaatgtttcttgaaac

SEQ ID NO: 441740 - DNA, 941 bp, Homo Sapiens
ttttttttacagtgagaacagacctttttattaatatattgagataaactacagagactgaaagacaaaaattcatatttcattcagaacattcattaaaaatcaaatgcatttgagttctcacagaaaattttatgtaagtctgatataacattaaatattttacaaatcagacatttcattttgaaatctaatttttaatcctgaatgcattatagacaaagtaagctctcctttaccaatttcatttaacttatacaaggcttccattataattccatcaaaccttaaaaattacctgcagcttttaaaaacacataaagtaaatggaaagaaagtcttatgtagcaatccaaaaactaaaactagaaattggcaagaagcatttcttaatacagataaactgcaaaatatcatttatgtgtgtttcttctcattggtttaatcatcctattaaaaataattttttgaaagtaataattacaatactccaatgtcactgaaaatctctatgatataatggtgtcattaaatggcaaagtaaatatcagactgaaatgtcagagtgttgtgctgaagtgaatgagacttgccatgccaggtgtcatctgctatgcagttacaagacatcttgcaaactagtcatcccagtttttactaacttactaaacaaggacatttcaagaaatacttcttacccctatgtatttccagatggctggatatagaaagatataattatgtttaaagcatggaccttataataggaatctctccattaaaatatgaaaaagagcaacaaataattcacaccaatgaaattgtgttgactgattttcaaagtcagacataaaaatatccactgctaatggaagccctgctctgtgcaaacatagtgtggtatatattaaacaatcacacatttgaggtaattagctggg

SEQ ID NO: 441741 - DNA, 685 bp, Homo Sapiens
attacaggcatgagccactgtgcctggcctaaagtccttgttttacatggaccacggtggtggttgatcatcaagttgcttaacctcatccgagcctatagtggtccttgtttccatagcatagaaaacccttgttatcactgtctcccctttagtttgacctgaaactgtaacaaatatctttctcatgcccactcagcatccaggcatcagatacaggctccacaattaatttttcagcatactgaaaaaacacttgccagtgaacgactgtggctagggtaagaatgatgaagtgagaaggcaaagggaagacttgcttgcaccttccaaaaaagaaggtggttctttttcaaaagtagatgttggcttcggctctgagcacacttcccaggctacctgagctccatgggcagctggaaacttgccctgccccaggggctggtggatacattaccttttcaagtttcccttgtgatttcctcccttccatcaccaccagttagttctaacttgttctataatttagaacttctaccaggttccagaaatctgtggtgaggcactgagacaatggaggttagaactcaaacacatggtggcttaaatgatcatctgatttgggtgtagtagctaagaagagttagctttggttttaaaaagtgggccaggcgcgttggctcat

SEQ ID NO: 441742 - DNA, 189 bp, Homo Sapiens
ttttttttttgagaactccaaagtcctgaaaattttggtggacaatgatttttaaaaaactaactttgtataacctaatatttgtattctctcatctatatttttttattcactataatcatgatactcttctaatagacttaaaagttaatcattgacaacgaaaaataaaatgttattttaaaagac

SEQ ID NO: 441743 - DNA, 991 bp, Homo Sapiens
  misc_feature (51)..(60): n is a, c, g, or t
  misc_feature (408)..(408): n is a, c, g, or t
  misc_feature (418)..(418): n is a, c, g, or t
gaccccccttttgggattaccaagggcgcttttttctgggagggagaaaannnnnnnnnntcggggggttgggaaaattggtttccccccacacaaaaaaacacccctcccggggggtttttgttagaattccaaattccttaaaaaattccgggtggaacccaattccccagtcccatggaaccaaagccatacctttccccttggaaaggggccaatttggaagcattcctttcctttggcccagtattgaggggcagccctgggggcaaggttgacttcgtttaccatccccatggagggtacagccataaatcatacccttatttcccagaagttttttacagtgtttggcagaggttattgtgtgacgatgaaagcagctgttgccctgtagctgtccatagnagcagcatgnatgtagttactgctctccccatcaatgtaaattaaaaaaggcagacatctgtcaggtggcagcatgtccatgaaacggttcttgtcatggttccttggcaggcacgctatactgcagtcttcagcttgtagtcgaggggtgactgaattcagagtctgaaattcatccttgagatgtgaagagttagtctgggagtctattctaatcatatcaaaatatgcagctttaaattcacagacaggtatggcagtttctccacataagcaggcttctaaaatggcatcatgaataaaaatgtactgttcctctgtctggaccatattaatacgccgagatcttaaggctttgacacaattgtaaatatcaacaacaccctctctttcagccatgtctagcatgatgtcaatcacaatgtagcagccagttcgtccagcaccagcactgcaatgtacaacgatggggccagcactgggagggtttgataacttgactcgccggataaaggaaagcagccctgtagcatggtagggcactccatggtcaggccagcccgtgtggaactgtttcttccgg

SEQ ID NO: 441744 - DNA, 750 bp, Homo Sapiens
ggtgacattttggtatctttcatctgaccatccatatccaatgttctcatttaaacattacccagcatcattgtttataatcagaaactctggtccttctgtctggtggcacttagagtcttttgtgccataatgcagcagtatggagggaggattttatggagaaatggggatagtcttcatgaccacaaataaataaaggaaaactaagctgcattgtgggttttgaaaaggttattatacttcttaacaattctttttttcagggacttttctagctgtatgactgttacttgaccttctttgaaaagcattcccaaaatgctctattttagatagattaacattaaccaacataattttttttagatcgagtcagcataaatttctaagtcagcctctagtcgtggttcatctctttcacctgcattttatttggtgtttgtctgaagaaaggaaagaggaaagcaaatacgaattgtactatttgtaccaaatctttgggattcattggcaaataatttcccgtgtggtgtattattaaatagcaacaaaaaactttgcttcctacgtttgaaagtcctaattgaaaccttttggaattttgatgcaccatttactgccctttccaaatgaaattgcctttcccaatacaatgaagaagcaacctgttccctcctttccttccttttaagttgtccaaacctgtgggcatgcctccacacgattcccggcctggaaatccagacc

SEQ ID NO: 441745 - DNA, 922 bp, Homo Sapiens
  misc_feature (20)..(20): n is a, c, g, or t
  misc_feature (63)..(63): n is a, c, g, or t
  misc_feature (194)..(194): n is a, c, g, or t
  misc_feature (533)..(533): n is a, c, g, or t
tttggtgtgtgtgtaccatnaccatcaaaaaacctactgtgtggaaacttggagaatggtccngatttaaaggattttcaatgtattatctaaaaaactaacctcaaatccgttgacccagcactttccccaggtatcattaccaatgcggctgaccccttcttctgcctttcactttacaaccccatcattgncacattatttgtgcaccaactagtgaggtctgtgcggctcatcatccccataaccaagtcggtctgtgttgagtcatatcattctgtgctggttttagaagtcaccataggaaacatgaagtcacatcctggtcaaaaaactgtccatttctcaaaaacagagaaaaacctgagatacgaggcagcaactagcgacacttacaggaagggaaagaacaatgacaacacccgcccagccccacccccaaaaagctgctgttgtgaattaaggcttcaaaagaggacccacattgtagctgataaaactcaagccaggaggatgtttgaaagccaatctgnactatcacttgttccagtgacctcctatgttcagctgccaggaccgattccatacagtgattgtaggttgaggactgaggacgccccgctctcgctccagatttgctttttccactgaagacacgccggccagcgtttccaaaaacagcttggccatggctttgcactctattcacaactgatcaaaactcaatggtcttctcagctttctcaaccgttttattctgaatattccttcctcactaaagcctctctcagccctactagtaaatgtgaaagtctgaggcaattatagaaacatcagccccatcgcatgccgaggggataaaagccactaaggaaacaggtttcctgcttctcctcagcaatttgtacctttcataaatctt

SEQ ID NO: 441746 - DNA, 719 bp, Homo Sapiens
aaaatatcctagattcatgagagaactggccggaggggacccactgtcatcacctgaatagaggaaagatcactcaccagggccaaagagagtgctcagcgggagatgcttcactgatgccttcttgctacctgtttgtgcctcttatgactttggaaaaacaaaagatattttgcttttgggggatagagggtgggtgggaaaagagttgtctgttaaagctgcacatataatttggtatctacattttatcacacaaaggaacctccccttttgacaacaactgggctaggcagctgttaatcacaacatttgtgcatcacttgtgccaagtgagaaaatgttctaaaatcacaagagagaacagtgccagaatgaaactgaccctaagtcccaggtgcccctgggcaggcagaaagagacactcccagcatggaggaggggttatcttttcatcctaggtcaggtctacaattgggggaagggtttattatagaactccaacagcccactaactcctgccaccacctgatggccttgccttcccatccaatctcaaatccttgtccaccttgtttacatttctaaacttttccaaatccaatgtccactcaacaaattttaataagggtttcctcctattttcaaaaatttttttacctttaactgaaccttttaaatccaccttcaatttaaattggattttggactttctgctt

SEQ ID NO: 441747 - DNA, 1328 bp, Homo Sapiens
  misc_feature (1065)..(1065): n is a, c, g, or t
agcgggcggcgcttcctcctggcgcgcggggcgcgggtggacgcccgggatggcgcgggggccacagcgctgggtctggcggccgccctaggccgctcccaggacattgaggtgctgctgggccacggggcagacccaggcatcagggacaggcatggccgctctgcgctgcacagggctgccgcccgaggacacctgcttgccgtccagttgctggtcacccagggggccgaggtggatgcgcgggacaccctgggcctcacacccctgcatcacgcctctcgggaaggccacgtggaggttgccggctgcctgctggacaggggtgcccaggtggatgctaccggctggctccgaaagacccccctacacctggctgcagagcgagggcatgggcctaccgtggggcttctgctgagccgaggggccagccccactctgcggacgcagtgggccgaggtggcccagatgcctgagggggacctgccccaggcgctgcctgaacttggagggggggagaaggagtgtgagggcatagagtccacgggctgagccagacagcaggctccaggctccaccgccccagtgatttccaggctctctggctgaggctgcctgcctgggaggggacatcagggaagaggcttccggaggaggggatgggagaaagtaggggatgtggcttgagctgcattcacaggccttggctggaccaggtatggcccccatctcccatgagggcccactgaccctacaactccaaccttctccatacttcaacaaataatgagttatggcaatgagggaagagagaccctctcatattattttatactcattacctgttttaataaaaaacaacaatgaattaaaaccaaatacaggcatgcaacctgacactaggcccaaaaccagacctacacctgcctagcctaaacccattatttaaaaatcaattcataacttataaacctatattattcatatattccacacattgtatacaataacatttcttaaactcgctaccatattctattgctctctaactcccaatacatacanccgctatcacttaccacctacttactcaaatcaactactatcctgtcatgttaaatcttcatattattatcccttacaaagtacataaattatcactttgcgaactacactttaatgcatcacttaccaatactcccacctaataaactcttgcttctacaaataacaaacacataacttcatgagggacccactacccaattcccctatactccttatacattcacttacctctttgcatctacttacctacgttcccactt

SEQ ID NO: 441748 - DNA, 2248 bp, Homo Sapiens
  misc_feature (709)..(753): n is a, c, g, or t
gttgttctgcggggagaacctgtgcggctggatggggggatctggtggtgcaggtggtccgggtgcaagtgcggggggttccgctgggggcagtggtggggtcgtgatgggtgtgtggaattatatttcctggctgtgtttgtaaatgcggctgggtggtgtgttgtatgttgggtaggtggttccggtcttattggaggagttgagggatgtggtgatgagaagttcttggtctcggttgccgctgcgtcgtcatgttcctgtggggcgaacattgtgggttgtgggagctacgtgtaggcttcctatgggtaccgcctcctgggctgtgtgattgattaacggctgaggtacgggtggggtgttgggaggggggggtccacgttggtcacaggtggcccgggaggtgcgaatacttatactgtggggggacgttggggtatctggagggtggatggggtggttggtaatcgggtaggctctcgattccctttctccgtggcggcgtttggaggggcctggtttgttggagcctcccccggagagccatgctcccttttcctgcctggccccaggtactggagacaggaagatgccctcagcaccagccccacccatcctgccccaggcccccaggatcccgctgccccaggccttgctggggcagagctgcttttccagatgcagacgcaccctagcagggattctnnnnnnnnnnnnnnnnnnnnnnnnnnnnnnnnnnnnnnnnnnnnnggcatctgtcccttccctggctccagacttgccccagccagtccccaagggttttcgtccctcccatgccagcgccaccctcttttccaggccacctgcctggagtccttggtgaatcttttgtcctgtccagcatttacagaaaggaaggccagaacctcaccctgccctcctccccagcctggaatcgggaggaggggccggcacccacccctgggtgggcttagccagctgggacaggagtgggtgagggggctgcccgagggtgggccccatggagagccctgtgaggccttccaggggcacatcggggtacatccaaggctgcgcttcctgggggaggtggcgtctgagcaactttcgtccacaagcatgttcctgcttgtcctccccaaccgcctggcctttgttccccaggagggcagccgaactggggccctgtgcagccagcaggggagggagtatgttggacagggggctgtgcccgaaggcagggccttcctaagtggctgagtaaacagcgtcaggtggcctcagcctggcccagggaccagctgtgttctcccaccccctgcaaggctgaagcttgccaccattcagcttttcagcagcagacacttccatcccaaagcctgcagaacgggatttctgtgaacgagggtcaccaggctgagcctcggccaagaacccgtctacagaggaccctcatgccagagcagaaagctcctgagccagctcccttgggtaacaagagccaagcccctctgaaggctaacgtggtaactggaatggggggctccagtttggcctgggacacggctgggggcaggccagaggcctccacagtggatgtaggatccctgctcccccccagatggcctcccagcaggcctgagcccagagaggaggaggaggaggaacaggaactgcggtggatggagctggactccgaagaggccctgggaaccaggacagaggggcctagtgttgtccagggctgggggcacctgctccaggccgtgtggaggggccctgcaggcctggtgacgcagctgctgcggcaaggtgccagcgtggaggagaggacattgaggtgctgctgggccacggggcagacccaggcatcagggacaggcatggccgctctgcgctgcacagggctgccgcccgaggacacctgcttgccgtccagttgctggtcacccagggggccgaggtggatgcgcgggacaccctgggcctcacacccctgcatcacgcctctcgggaaggccacgtggaggttgccggctgcctgctggacaggggtgcccaggtggatgctaccggctggctccgaaagacccccctaacctggctgcagagcgagggcatgggcctaccgtggggcttctgctgagcccgagggccaggcccactctgcggaccgcagtgggccgaaggtggcccagatgcctgaggggggacctgcccaggggctgctgaattggagcgg

SEQ ID NO: 441749 - DNA, 940 bp, Homo Sapiens
cccatccccttctttgcgggaagcttctccctggatgtccccttccaggccaggggcgctcagcccagagagccctggaaatcactggggccggtggagcctggagcctgctgtctggctcagccccgtgggactctatgcccttcccatttcctttttcccccccctccaagttcagcagcgcctggggcaggtccccctcaggcatctgggccacctcggcccactgcgtccgcagagtggggctggcccctcggctcagcagaagccccacggtaggcccatgccctcgctctgcagccaggtgtaggggggtctttcggagccagccggtagcatccacctgggcacccctgtccagcaggcagccggcaacctccacgtggccttcccgagaggcgtgatgcaggggtgtgaggcccagggtgtcccgcgcatccacctcggccccctgggtgaccagcaactggacggcaagcaggtgtcctcgggcggcagccctgtgcagcgcagagcggccatgcctgtccctgatgcctgggtctgccccgtggcccagcagcacctcaatgtcctctcctccacgctggcaccttgccgcagcagctgcgtcaccaggcctgcagggcccctccacacggcctggagcaggtgcccccagccctggacaacactaggcccctctgtcctggttcccagggcctcttcggagtccagctccatccaccgcagttcctgttcctcctcctcctcctctctgggctcaggcctctgggagtccatccaagggagctggctcaggagctttctgctctggctgagggtcctctgtagacgggttctggccgaggctcagcctggtgaccctcttcacaaaatcccttctgcaggctttggggtggagtgtctgctgctgaaaagatcccgagaattccggacc

SEQ ID NO: 441750 - DNA, 529 bp, Homo Sapiens
  misc_feature (100)..(100): n is a, c, g, or t
  misc_feature (367)..(457): n is a, c, g, or t
ttgccagagcaagacactcataaaccagaaaaggatacaaaggagtaagtaagagcctctccaataaatagtgcggggaaacttgaatatccacatgcanagcaatacagtggcactcataccatagtcaaaatgatctcaaactggaccaaagactttaatagctaaacctataaaattcttagaagaaaacaggagtacatctcttcagctttgtattaggcaatggtgtcttagatattacgctaaaagcacacttaacacacacactcaattagataaattggaccttatcaaaattaaaaacttttgtgcttcaaaagatatcatcaagaaagtgaaaagaggccgggcatggtagctcatnnnnnnnnnnnnnnnnnnnnnnnnnnnnnnnnnnnnnnnnnnnnnnnnnnnnnnnnnnnnnnnnnnnnnnnnnnnnnnnnnnnnnnnnnnnaattaccctatgtgggggctcacgcctgtggtctcagctactcaggaggttgaggctgtagaatcacttgaa

SEQ ID NO: 441751 - DNA, 639 bp, Homo Sapiens
aacccaaaagctgcgtcaagtaactgaatttaaacactgtataatgtttgcagagatatgcgatcacttgtaacttatattgaggcttccaaaatgtacagttctttaaagaataatcagtaactcaaatggttaattccttatacatgatcaggaaaactaactgtcaataaatgtaatccagattctttattagtgatctgaaaccaagccattacaatagaaagaagcataatgacatcctataggaattttaaagtaaaggataatgggggtctcttaagtttatgaagggaatacatggcatgagtttccctttattttattgtaaaaattaattagttaaaagtttaaaggacttagttcttaaaaagttaccaatccactctaacaaaatcatgtgttttgacatcttctagttattactaaatgcgtgtgcaccttcacataatgcaatcataatgcatcttcaagttttctgttgttctaatttcatccataaacatttttattttcagcttttcttccttcttaaaataacacaaatatatatttcaggtaaatatttgaaaatacatattatatctactataggaaaattcagaaattagcagaagtattaagaagaatatacgccgg

SEQ ID NO: 441752 - DNA, 1409 bp, Homo Sapiens
  misc_feature (218)..(226): n is a, c, g, or t
  misc_feature (298)..(347): n is a, c, g, or t
gaccaaaaagaaaaatgggttttaaaaagccaaaatgccatattaggttcccaaggggaagggaccatgacctgggttacttccaaaggaagttggggggtcataaagggaaccagcatattaggaggaaaaatagtttttcgggtgctgtctgcttgagtaatcaatctggagatgcaagttaacggaaggtgctctgccaagccatcagcgtgagnnnnnnnnnccaccagaagttgcctccagataacgatgtagtggcagcatgataactggcatcaactcacggtcttctcannnnnnnnnnnnnnnnnnnnnnnnnnnnnnnnnnnnnnnnnnnnnnnnnngaagatgttatttcggtaaaactgaagctctttgatgctttcactaatgtcatcaagtgccctatgagaagcagccttctttggtgcaaattcatattcttctggataccagcgtctgcacagttctttaacagtgctcacatcaattattctataatgaagatgtttcatgaactggggcatgtatttgtcaagaaacttcttatcttcatgaactgaatttcctgcaagtggacagagccctggaggagtctgctgtcgtacaaaggacagaaattcatactctgcctgctgcaatgtaattgtactctccttcactgccttggtaaggccagacttcccgtgatgctccttacaccaatctgacatgctgtccagcaactcatctggttgttttataatcaggttaggaccttcagccaaaatgttgagatcagagtcagttatcagacagcgcatctcaataatctggtccttctcaatgtccaatcctgtcatctggtgatctctaggtgtcttgataacaagcttgaatcgattagtagttcgcatttcagccaaattcagacaactctatcattttgaagagtccagttttaactccatgagaaattatgacatcaaactagagtaatcactgcttgtctctgaaaattttctggagaagagaaagatctctgaattatctgtgctgatgaagtcatgttatccatagtcctttcgtacctgctgctaggagatgtggaggtagggcttgaatttccaacatgatgttggggatatgacaactgacatcttgtggggcatgactacttcctgatctaaattgaattttgataggccttccataaagtttgattccattaagtagattcattgcataaggaacagacacttcatgtttgaaattcacaaacgcaaactgctttggtttaccatccttatcttttggaattttcacctttattactggcccagcctggtggaaagctcgaaaaggagctcctcggtcactttcgtttcaagttgcccacaagagagtgcgatccgcttccgccgccg

SEQ ID NO: 441753 - DNA, 1486 bp, Homo Sapiens
  misc_feature (147)..(147): n is a, c, g, or t
  misc_feature (462)..(462): n is a, c, g, or t
  misc_feature (1408)..(1444): n is a, c, g, or t
tccgccccaaaagctttttccccccatataacgccccttttgcgaaattacaaactgtttaggtaaaagtgggaatcccgctagaaaaaggttttccttttttgggagtttaaccgtaaaagttcccaggtaacccccttttgtggngcggtcaagcccggggaagggttttctggagttcactaagcaaggaatactcttggccagtccaaaaagggtaacgagtgaatttaaaagtacgggctttgtcaatacaaacttcccccccctcgtaaagtgtctaaaatgattagggaattgtggcactttctttggcataaaaccctgtcctcttcaaaaaaccctgaggggaaaggttattaatgtaataaaaccgcaattcattttgtattaaactgtagctttaaaaaaatgtataaagaaatgtgacaacttgtaaagctgctctgtacagtttttcangcaaaatatttcccatatcaacttagtcaaagggcttaaaatgaccctataaaaacaatgtccttttaacatgtgttagtgtcgagatgagcgccattttccatctctactactgtctcttctgttatcatagtcatggctccagtcatcatgattcctgtcttcatagaagaaatcatctctctttcctctgtaatgatggtcagacccatgatcagtgtaacgctgttcccggctataatgtctatctgctaggtagggataagaattcattctgactttacgctgtgatgatggtgtaccttggcgccactgggagcttgaagactgattgaaactatgactgtgtgattgaactgatggtgaaaatcctgattgatccagaggtgaagaaccaaattttccaccatatgacatttgtctcaaagcactgttcatcactgcttgtctctgaaaattttctggagaagagaaagatctctgaattatctgtgctgatgaagtcatgttatccatagtcctttcgtacctgctaggagatgtggaggtagggcttgaatttccaacatgatgttggggatatgacaaactgacatcttgtggggcatgactacttcctgatctaaattgaattttgataggccttccataaagtttgattccattaagtagattcattgcataaggaacagacacttcatgtttgaaattcacaaacgcaaactgctttggtttaccatccttatcttttggaattttcacctttattactggcccagcctggtggaaaagctcgaaaaggagctcctcggtcactttcgtttcaaggttgcccacaaagagagtgcgatccgcttccgccgccgccgcccccatctcagcgtcgccccctccctaacctggccccgctctcgacgaattcgagctcggccgatttggcctgatnnnnnnnnnnnnnnnnnnnnnnnnnnnnnnnnnnnnncgccgccaccgcgtaaactccaggcgccctatagtgaatcga

SEQ ID NO: 441754 - DNA, 1468 bp, Homo Sapiens
  misc_feature (135)..(150): n is a, c, g, or t
  misc_feature (164)..(166): n is a, c, g, or t
  misc_feature (168)..(292): n is a, c, g, or t
  misc_feature (533)..(542): n is a, c, g, or t
  misc_feature (1381)..(1417): n is a, c, g, or t
ggtgggggggatccccaccccttttttcttttcccgggggttttctttgggagacccattttgcccccgtttccctttctcttttggggggccccgccgcccccaaaaaaaagggttttgtgaaaattttttttnnnnnnnnnnnnnnnnccgcacaattttgnnntnnnnnnnnnnnnnnnnnnnnnnnnnnnnnnnnnnnnnnnnnnnnnnnnnnnnnnnnnnnnnnnnnnnnnnnnnnnnnnnnnnnnnnnnnnnnnnnnnnnnnnnnnnnnnnnnnnnnnnnnnnnnngcatttcaatagaactagctttatttacttatttatttatttaaacaaaagaaatggtttaaaagcaaatgcatatatgtaccaagggatggacatgacctggtacttacaaaggagctgctgtgtcataatggaaacagcatattaggagaaaaatagtatttcgtgtgctgtctgcttgagtaatcaatctggagatgcaagttaaccgaaggtgctctgccaagccatcagcgtgagnnnnnnnnnnccaccagaagttgcctccagataacgatgtagtggcagcatgataactggcatcaactcacggtcttctcatgttccccattttctataattttcctcttcttttcatctatttttttcttgaagatgttatttcggtaaaactgaagctctttgatgctttcactaatgtcatcaagtgccctatgagaagcagccttctttggtgcaaattcatattcttctggataccagcgtctgcacagttctttaacagtgctcacatcaattattctataatgaagatgtttcatgaactggggcatgtatttgtcaagaaacttcttatcttcatgaactgaatttcctgcaagtggacagagccctggaggagtctgctgtcgtacaaaggacagaaattcatactctgcctgctgcaatgtaattgtactctccttcactgccttggtaaggccagacttcccgtgatgctccttacaccaatctgacatgctgtccagcaactcatctggttgttttataatcaggttaggaccttcagccaaaatgttgagatcagagtcagttatcagacaggccatctcaataatctggtccttctcaatgtccaatcctgtcatctccaggtccacccagaccatccgctgagccatgctctcccctgccgccatggctgcgccaccttcgcggacacctcgggccccgaaccgtccgtgactcccacctacaccccgcaacagcctggagcccagggagccgcctagcatcacccgggaccagcagccacggccccagtctcccgctctcgacgaattcgagctcggccgatttggcctgatnnnnnnnnnnnnnnnnnnnnnnnnnnnnnnnnnnnnncggccgccaccgcggtgaagctccaagtcgccctatatgagtctatcagtc

SEQ ID NO: 441755 - DNA, 1012 bp, Homo Sapiens
tgcacgagcatacatctatttttctgtaaatatggttatcgagagagatactgctttaataatgtcctctggaggtgctcattctttcagcttgactacttcatacaaattaaatgaggtcattcacactgaattattgtgtttaatctgttttatagacatcttcaccactcatcatccaaaattcaagtatcagataacataaagatttgttttcagctcttttaaggaaatcttaaataaactattctttctcatttcacttgaaatatgcaaggtataactggcatttacatatattaaacaaataagatttagatgtaaagaaatcaaaggaatctgaatatgctttcttatatttattgaattaaacaatatagatacattgagaaaagcatagagggctctcaaggagttcgcctccttaaaataatagtagactaaatagtttttcatcattctttgtattttatttctctaggagacatgaaggatgggtacaagggaaggaatagtggcaagagaagtggtaatggaggtaaaaggagaataaagaaaagatagacagaaaaaaatggaactttatacatggaaaatgtttttctgatccattatactctttctttaaaaaggtaatattttcttcttaccaactcaaatttctagtatagtttctgttcatttacattctagtagttcttggcttttcgtgaaaaggggaaaggaaaaacccacattttttagcgcttaccactttacatatctgaacttccatatagtcttactctgcttctaccacttaccatagttaaggattattttaccttctactaacttctaaaacttgttttctgaagaaaaactaaatactgacattctgttattacaatgattaggagcatgctttgcactgattttaaaacacaaatcaatccttttgtggtcagtagaaattatgaaataccaatatattctcttggctactgctaatgagattcttgatgtataacat

SEQ ID NO: 441756 - DNA, 755 bp, Homo Sapiens
  misc_feature (737)..(737): n is a, c, g, or t
tgcagatatttttcacagtttttcatttgcgttttgactttgattatggtctattttttcatcagaaattaaatgttttaaatgttttgatgtgaaatttatcagtcttttcagagtctaggttttgtgtcataagaaaggcctttcctattttattattatttctaattcaaattaaatattcttgtgttttctccaggtacttctgtaattttatttttaagttaaatgcacttacccacacaaaatgtaagttaaataaagtgtcgaggtgggaatccaactatacttttcttccagatggctgcccagttatggcagtgtccttcatttagttcagctttgccctgctgattgaaatgttgtctataggtgtacttagttcctacagtttggggttattactggacttttattctgtttcattgatcagattacctatttatacctaatgactctattccttggttatcatcttccctcattctacttcccagagttttcctgggaagttttctttgtttatttttctatatggcttagaattagctaaccaaagtcttgctcctctgtcttgttggcatttttattgttattgtattatctttatagattaatttagagataattgacatcgttttgaggttccctggtctattatcaattcttatggtcaggaccgtatttgtggccggcatggggctcacgccttaatcccacactttggatcttagcangcggatccttgggccggc

SEQ ID NO: 441757 - DNA, 1029 bp, Homo Sapiens
ctgattattaaaccatttaattctcaaaccactcacatgcataatgttcttttacacagtgttaaaataaaggggaaaatgcatttttatacaaacagaatttcaagtatacattaatagacttttcagattactaaccaagttgctaagatttcattcacattgttcttaaagctgttcaacgagaaagcttttgctaaactgctttaaatatgtttatataaacccatattttcactctttctttgaactccctcccccaacccgagtctctgcccaccctcctgccctccccccttccccgacacgacaggggtcctggggctctaggagacatgcaaccccaccaagaactattggcttgtcatcaggggaaggacagaatcttacaggaggagagactgagaacacctgtcaaatgaagggagaacaaatctgatacttagaaatgacacaaatcaggatcgtgtcttagagtctttgtgttttcacttgatttttaatttaaaaaatctcagcctcccacaaaacaccaccaaagtttctgacaaattggtagctgtgaaaataatcttaggtagtttttccccagtgaaacttccaaaatcaggacaggtatttagaaccctttttcaatttggcggttctttttccctttggcatggagtgggggccacttaaaagtggatgttattacttgtgtgtttacattaagaaatttggttcatttcacagggtctggtaagagctctccctccttaactctcctcctgaagtaatctggtttcagggccaggaacagccactctccttaggaattaaagtgcattttttttcggtaaagggaaagagggggaggtggaggtttacacttaagtgataatgattaaagtagggttgggtgagagaaaatcctactcctatatataggtatttataattaaggtcataataaaaactgatattcttaggaaataagatgcacaaagccagtctagcaccctcagtggtgcaagagcactattctgg

SEQ ID NO: 441758 - DNA, 767 bp, Homo Sapiens
ggatggccatcaactactttcagctttttactgtggagaattccaaggcaactctcatgcttggaaatttctgaaccatctggatcactatacaagaatgtgaatacccggtggaaccctgtctgtaaacctgattaatttggtggagagggatagtaaacaccagcgcaagttttcgagcaacttctgaggcaatcatgtcttccaagtagattgcatgataaacatagggtgccccactgccattctcgcttgcactgcttgcagcttgctgctgcccttgcagcactgtgctgcttggctgctcccggcagacatagatggttaaacggggtctaaccgaccttgacttcagtgaattatagagccgaattccatcggctgcaccacaaatttgaactaaatcctcctttgtcagttttaataagtcggcacctgaaaaattagagaacagtcttgtgtaggaagagaatctgtttttgagcagccattgctgtgtttcctggatcgtagctgaaggctgaatttgttcaccagaggtctgtgaagctccatctccctgatgatttggggaagaagaattgctgtctgggacactgcaagtgctctgctgtggggaggtgaaagtgggcgctggggaagggctgttattcacataggctgtgggggcatcgggccacggagaacaactgcctcgctttgccagagaatcaccgtagtctgctggcaaagtccgcttgctggactttttctgctcatgttccgct

SEQ ID NO: 441759 - DNA, 991 bp, Homo Sapiens
  misc_feature (63)..(63): n is a, c, g, or t
  misc_feature (467)..(492): n is a, c, g, or t
  misc_feature (855)..(855): n is a, c, g, or t
cacctcccaaacgtgaatgataaatgatcaaaagtctagatgtctctgtagactcaacacagngattcagtgtcatttctgaaaggcaccgtgtctataccattctccttcaaatcctccattgtttacttaaattggattttgctattttttccatttagtgtatttgcaaaatatcttttagtatgaactctagtgttttctaagctatcatttttgaacaaatgttattccacatttatgagatttgttgggtttctctacaaattttctgaaagtttaagcaactgatgcaagtcttccatctagtataattgtaacatttttttcagaagaaatactcttgtgtgctctggagacttatatttcatgaaaggtctttcaatagtaattacatttatgataactttattaagtctgaactctgatgtaaagtgggatgcgagcagatactaacggctttgccnnnnnnnnnnnnnnnnnnnnnnnnnntcaagtatgaatgctttcatgtacagtcaggtgtgagaactgggtgaaggctttgccacacttttcacacttgtagggtttctctccagtatgaattctcttatgtacaataaggtttgaggactgggtaaagttttttccacattcgtcacatttgtagggtttctctccagtatgggttttcttatgtttggtaatgtctgagaaccacatgaagactctgccacattcttcacacttgtagggtttctctccagtatgaattctcttatgtacaataaggttggaggactgggtaaagttttttccacattcgtcacatttgtagggcttctctccagtatgggttttcttatgcttagntgaggtctgataactgcttaaagatgttgccacattcttcacaacgtgtaggggtttttcttcagaatgagttcttttatggttagaaaggcttgagcaagttctgaagaccttcccacattcttcacattggtag

SEQ ID NO: 441760 - DNA, 587 bp, Homo Sapiens
  misc_feature (23)..(23): n is a, c, g, or t
  misc_feature (176)..(176): n is a, c, g, or t
agaggatccccctttcacagggnaggatgagatgtaactagtatgctatgttgatcttttgctgatggacacatggaccattcagaaaacatattttcgctgtacatctactgtttacttttttcaaaagtgtacactgtaagaatgaaccggaaagttataaagttggttacccngcttcacagggatgagtcgctgagtcagacaaacccatgacatttgagttacacctatttgtatatttctttatttttgcaagaagggtgatcttcccagtagtccccccaaaaaatgaaattaatccaataaggatgatggaggagactaaaaaccaaaagaaaccaattctaacttatttcaaatcagtaacaaccacattgaaataaataatccaaggaacttttatactcagtagtcagtctagagaaaagtgactgcaaagaaatactaaactccaacagtttttttgtagtgatatgctgtaatgcttctgtaactatttaaatgtctaaaagggttgagcaaatgagtagataggttttgttaagagccagcattctgttgaaaaagacacaaatgtgaagtgt

SEQ ID NO: 441761 - DNA, 434 bp, Homo Sapiens
ggcgcaatcatggatcactgcagccgaccttcctgggctcaagtgatcctcccggctcacccccagtagctggaaccacaggcgcgcttccacaccggaaagcccactagaggcggaaaccgaagcgcccagtgggaaaggcgacccgccggggatgcggggtgctcaacgcgctgccacctggggcccaacgcgttgacctcgcggtcaggttgcttccgcggactacggttctggctcgctagctctggaagggagcaccgggagggaatggtggcaactcccaaggaggggacccagggatccgagaaaggaagacttggggtaggtggggttggatgactggagagaagaaagggtcaggagtgcagggcgggtacctggggagctgcgtggactcgcgcagacgggaagcactagtgccgaattcatgc

SEQ ID NO: 441762 - DNA, 1083 bp, Homo Sapiens
  misc_feature (82)..(86): n is a, c, g, or t
  misc_feature (88)..(89): n is a, c, g, or t
  misc_feature (94)..(95): n is a, c, g, or t
  misc_feature (99)..(99): n is a, c, g, or t
  misc_feature (102)..(104): n is a, c, g, or t
ccattgcctacggggcccgggggcccaaaaggaatgttttagaaaagcttctggagggccgaggccggccaacatgttgggnnnnntnntgttnntttnttnnngggtagcaatagtttctttttttattttaatatactttaggaaacaatatacaaagctgcgctttcctgctatttccagataacagcaggaagctccaattacacaaatttagcgttttgtgatggctaagaacagcagtcagcaccagacttgaacagttagctacaacacaaacatccttccaaatgaaatgtcataatagcaagacaggtaaaccagggtttaacaaatgacaaccacttgggaagtgacttaatcattcttgttgaatttcttatttcattaaatatctcatacacaatttcctgttaatacgttttaaacaaaacctcccttaaggaattatttcaattaagtataaatattcaacaagaacagttctgataaagaatccccaggtagttcaaatgctaatgtgcactgaccgaaggaaaagaaaaataacaatttttgtttgttttaacatgtttattacaacagatacaattcacatctgactagctctgtttcctctttcccctcccacaaccacgttcattgggccatttccttatatttgagcaatcaatgtactttgagcacacatgcctgtccagcagtacttttaagtccattcttacagggtgcaaatggatttcaataatttatacaaacaagtaggttatgctcaatcactgcaattttaagctactgtacacaggaatgaaaaggttatagaaaagtgccatagcaacagtgccttaagaaaggagataaagaggagccttaaaaaaatggataaaatcagaatttcagaaggaaatggaaacacacgggaaatgaaaaacatttctctgcaaaacaaatggagaagcactgctcttgatcaggtgcaagtgtggaaacagttgtttcatattttgtacactgcccatatggttcaaaatcgtatccttagacacaaatcgcctggcgcttgcactgaatttttgaaaatgc

SEQ ID NO: 441763 - DNA, 1018 bp, Homo Sapiens
agggaaacgccagggcccagtcacacggttaaaccgacggccagtgaattgttatcttttcacacaaaggttataatcttggattttatcaagattcaatataagaaatgaccatatgggaaataggaagcaatagtataatattttcaaagacaaatctaaatgtcatcataacaagagtgtgatttatttctgagatcttcttactctagatttatttataagttagttacgttaaaatcagtttttcccaaccagcatacataaggtgttgtacaagctccctcagctggttaagatatagaactaccaaaacacatgttccattaggttgactgcgtcatcctcttcagaaatttctgtaactgcagcctgagatcgaagaatagacgtgatgtcattagataatttgtcaaagccattctgtgaacatatatttgccacttcttgccacttttctatggagcaaaaggaatcatttatcataagactttctactgcatctatcccacctttattgatttcttgaagtagcttaatgccaacttttttcatgtctacagagaacagatgaagtatagcaagaccaaaagataaagatggttgtttctcattcaactctttagtgagacactgaattaattcaacttggggacatgacattaatagctgcaacaggtcatcggtagtaaagtccttcaactgctgtatgtactccatgaccctatgagtctgaccctgtttacacaagcaaagaatagctttcttgtgcaggccacattcactgtagataatctgagctaaagccaggcacttggccttgttataagtatcctgctccccataatcacaaatcacatccccagcctcctcagaaaatgtcagtccttaaatgtattcattgtaccaatgtttcgaagaattcgtctaggactgtttgctgcataacaagctgccttttcatattcaccaagtgagattaactcattaaacctgagtccctttctccaaacacccc

SEQ ID NO: 441764 - DNA, 2699 bp, Homo Sapiens
  misc_feature (288)..(288): n is a, c, g, or t
  misc_feature (707)..(777): n is a, c, g, or t
  misc_feature (1427)..(1427): n is a, c, g, or t
  misc_feature (2420)..(2420): n is a, c, g, or t
gaggcggattgttataatatcaagtggttgtggaaaggtaaggggattgaagtgatagcggttgaaacagaaagagtcacgtatgaacacgtatagttaagagttgtgacatgtgcgaactgggcaaaaatgtgcaaagtttgtagagttagaaggataggttgaagttaggtgtagatgcggggagattggtggacacagatgagaggggtaaaaaaaggtaagttgattgttgagcggtagagggaagatagaacgggtgagcgagaatctcgcagggcgagtcgnaatgatatgatgtttgtgttttggtagggaatggcacataaaaacgttatatttgagaatggcggtaaagcgcgaggcaatatgctaacaggtggagtaaacacgacgaaagagcaaatccggccgcgcatagaccttgggtttattttagtggggcacaccacgggcgtcacggggttagttgggggaggggagacgcaatatgggtccacaaacagtaatggaggagggcataatggttgtgagaaaactcttccaagagtctgtaggggggtttttgaagacgctatatttcctccagactgatagggcttctgcaaggaggaaaggtgggggataaaaagaagcggtgggcccaatacccccgggggtaaatttttaatgtttttaagtggggagcgggtttttcccctttttgnnnnnnnnnnnnnnnnnnnnnnnnnnnnnnnnnnnnnnnnnnnnnnnnnnnnnnnnnnnnnnnnnnnnnnnttcaggtaaaagccagcatacccggccagtactggttcttttaaaaacattatacaaattcacactattttaagtgaaaggtctaggttgggagtttatcctctgacaaattattcaataattaagtctttcttctctttcttctcagctggagtccactcaagctgacatttacatggcagaatcttcagttatcttttttctctgattgcttcttcctttcagcctccagtttttgttgttttgcctccaacctttttctttgatacattttcaccccagcaaatgtcaggcagagaattaatgtttttgctgccaagatatacagcagcaggggcacgtgctcaagaaccttccaattcatggtagactgtgaattcactcctgatcaacacaagcccccaacagacaagtacatgagaggcagctggaaggtctgattgctcccggcagcggaggctccagcgcctggccgcgcacaaaccacgacttctaccgtcctgccggggaaaactaggcctcggagggcgacgtcggtgcctgtgctcgctgtgcaaccctgggcgagtcgctgaacctctctgggcctcagctcctcctgggtaacctgggggctagttcagggtcctctccccatacccttcccccancactcagggagcaacacccgccctccccaccccccgacttcccccagagctgcggatgaggaccaggggctgtcatcgcttcccccaccattccaggggattgcttgtctccctagactctccggggaccaacaccgtaggcttgaaccaatcctgggccccgcccgggccacgtgccagccggaacacgctgctcaacgggttgacggcgcccgacggccaggtccagcaggggcgccccgcaggtggggcctggcggccttcaccttccggatccccgacccggcgcgaccgggagccggcagacttttgtctaggagggaaaacccgagcgcggggccggccgcgacatcgcagcatcccaaagagcttttggaatttgggtcactcccttctaccccgacgtcacacacttactgctcccggcagcggaggctccagcgcctggccgcgcacaaaccacgacttctaccgtcctgccggggaaaactacacgtcccgaaatgcaccgctacgtgctcaggcgcagtgggccggtgccgccgacgagagtgcactactccgtgcgcaggcgcagtgggcccgggcagaagacctggggcgcgctgctcactgcgcaggcgcagtgagcccaggcgggcagccctggccagcagctcttgtccctgtggctggaggctgaagtccacgtaggccccggcggggagccgctggggtgtaggccgggtgcctttgtccaagcctggcggtgcgttctcactctgaactcacctgagctggagggtgggttgttgcgggacccttccgccttccgctgtctcgaattccctgggtgtctcctcgctgctgtctgcagctgaggacacgtgggtgcccttaagaagttccagacgcagtgttcgtcatctctgacagcgtgcatgcattttcctttggggtaacgatatggtgccccggtactaggtttccagatttcttcgtcaatatgcttanaaacgcgtacagagtttgagcccactcagtgctagcgccatgtgagggcaccaactgggccacccaataccaggaaaagaaaggaaggggcagggagttacccacaggtgctctgctccccttctaaggatgaggaaactggagccaggggaaaataaagggggctggcaataaaaacaccgcccaatggcaatgggcggaaatggaaattcgaacccagggaagggaaattcaaatcccctcaggactccttggggggaatggttaaaaggttcgggg

SEQ ID NO: 441765 - DNA, 786 bp, Homo Sapiens
  misc_feature (444)..(456): n is a, c, g, or t
agcggggtagaagtcgtggtttgtgcgcggccaggcgctggagcctccgctgccgggagcaatcagaccttccagctgcctctcatgtacttgtctgttgggggcttgtgttgatcaggagtgaattcacagtctaccatgaattggaaggtcctaactgggaccacctactccccttggagggtccggatggagtttcccctctgcggctgcctctcactcatcctccaccactttgccgacaaggaaggaaggacaatcgggaggagggagtcttgcttggcgaccatctggacaatatctcgcccatggcaagctggatccctgtggattactttgagctaaagacatttcataaaatgggcatgaaggattccttcaaatgaagacgtggacaaaatgattggtcaggtcctttgctctactgttgaactggaggaggannnnnnnnnnnnncccctcacacgggggtttcctgggagctcaagttgggatgaccccagacggtaagataatctcatcagggtaaagttaatatgacatatggggtctccaaagagcctctcccaaaggccaggactcagcaggttggaggggcatactgggctgggggccatttcctcataggatttcctttaagtaggggaaacggttttccaaatcaatttgtggatgccaactatgtgggacacacgaagtggggctgctctggtggaattgggcaagggtagtcctagaagtctcctgtcagccacaccctttgtctccccttaccagggacctgtg

SEQ ID NO: 441766 - DNA, 318 bp, Homo Sapiens
taacaaacaccaggagaggtcattcataaccccgagcttccccagaagcctccctgcattttggcaggtagctcacactcccatttgacagactgggaaactgatgttcagagttgagagtgggttttataccaacagctagacagtggcagacagtgtgtgtctgttcttggggtaaagcgctcaacccagttcctggactcgttgatggcattgccctctccctctttcctacgtgggaaggtctgagccacctcagcagccggatccctggtggtgagagtgggtccccacactgggcttctggacaggtggctg

SEQ ID NO: 441767 - DNA, 628 bp, Homo Sapiens
cctcactgagagattagttatttgtggattttaaataaccattacaagaaagtctcccagagataaccactgtttaacatttcagggaatgctgtaggtactctctgggctggtacagatgtgtgttatgcatatatataattttacttagaatttgattatttttcacccaacaggaagttggaaatagcttttcgtgtcaaatctacatctgtatctttttaagtggctacaagctgttttattgcgaataattatttatttaaccaatccccttttggtggacacttagattatttcctgtttttcgcaactaaaaacatttctgtgatacatcttttagtattcatctttgtatagttgtccagcaatgagttctgcttctgattgacataacagagaatgtatcctcattaaaaaccaaacaagggaattcttcccctctcttggcaaccctttttatgtttaacagccattagaaatgtttttttatcttacctaaatctcactaagctttttaaggctgggagagactgggctcccattttggtcaggtttaagcgttaattagtcagattggtgggcttacaagcttcttccctcctccctttaaccatttttccttggt

SEQ ID NO: 441768 - DNA, 521 bp, Homo Sapiens
atttggaaataattataaattatcagaaagttgcaaacaaagcccagtcaggtcccatgtaccagtttcactgccaccatctttaaaggaggattagacgaatctgactgctaaaagtggcccagggattctggagaaaatccaacaggtttgctatcaggaaagcaatttcacttacaattcaggtttgactgcaagtgaaagtggttgaaacaagtgagaagttgattgcttcctcatataatagtctaaatgtaggtgtccaagcctggaatagaggtcctggtcctctaagttctcaggaacacaggcttcttttagccactccacatctctagggtgttgtcctcatggtccaaaatggtgactggaattccagccatcacatctgctttccaggcagcaaaatggaagaaggggcacagaagaacagagatgacaataggtataaacaagctctctttttaaaggagattcccaggagctgctacatgacacttactgttgactagagtttagtc

SEQ ID NO: 441769 - DNA, 768 bp, Homo Sapiens
tctcacccactattcacatcttcaatgactaacagccattaactgcacaactacagtgtcaaacatttattttactagtctcctgtagtgtaaccattaactacctgcattttgacttttcaaagagcttcattagctgctggaatctttctgagacctgatttggatttttatccaacttggcggctaaatatgcaaatgttttaaatgatggccctcttttctgacactccaataaaatttcccggtcatcatttcttgtccataaaatgataatttctcccttctttttaataacattttttgcagaaagacttgtagaagtggcaagtgctgctgatgaatccttaatccctggggttgcctttaatgatgagggatctttagtcacaggaggggccttcttcttactggctttcttttggtgagcttcagtattctcacaagaatcttgggtaggtttcttggtcttttccttattagttaagtctgtttcctttctttgttttttatgaggatgatttagatcagaaatgtttcttctctttttgtgagaattatgcaaagtcccaggcaactccgagttatcacaatttgatcctggctctgattttaactcatctttttttacttcacatgaactgggagattctgtggtcaagtcgatataggtttcctcaacaatgcattttaaaggcctgtttgccacttgtgccttttcttccttacaattatcttcatctacctgtatcaccccacatcccagtc

SEQ ID NO: 441770 - DNA, 1320 bp, Homo Sapiens
  misc_feature (858)..(860): n is a, c, g, or t
tcctcaaaagtttttattctttttcatctttttaaactggcacactgcctggtatacaccgccaggtaggcattcagaaaagtttcttttttttaaatacacaatttataatactgggaagatttcatttcagtgtttcccaaaacattattcctggaaagggtgtactctcccatgactctggataatagaagttttgttctgattttttaagtcacctcagacagacactggaacacgttagatctaacacttaagtgctttgaaagggcagtaaaaaatccccaaggaattcaagaattgtaataattgctgggaagactgtggtttctgtagcccagggtggcttcacagttgtcagaggtcacagattctatgtccctctccgaccagggacctccaggacagcttccctggttggttctcgagtctttcagcagaaggcagaccaacagagaagggttgtgaccttctccaaccagcccaggcctcacgccgctgcatcgcagacccagtatcagcagcagagctacggagcacgtcatcctgggagtggatcctccgtgggtcacaccaagcagcgcagcagggaaccagaatgaggttcagggccaccatcaaaagagtgacctcccctctccttccaattagttacctgtattcaatgtgcagtgtaaacgagcagaagttttacaaattaaattactttcttaaaaatcaatacaacatcgttacatacaattctctttgagaagtctttccaattcaattcttaagtttcatttacaaaatggtgtgcaaaaagtgtttttgacttcaaagttaaataggtgagctgcagttggaagtatctgcaannnggatggtgtttttaaattaaaagttaaaaacatgagctgcacttcaaagtatctgcaggatggagaaatacatcaagaaggctgtcaaaaacagctctcagagttagagttgcattttcaactgaggttttctgtgttcaaaattcacgatcaatgcctccactgagatctttcaccactccctctttgaccagctttaagaggaacttggtttccgttgtcacattatgcatggtctgaaagttcatagcagccatgcattgactgtcgaagtagtgcaaaggtgttctgggttgattgaggtcatatccaaaacccgccaaactgacttcatcgcacagatgtgtggctaagacaacggcaatgacaccgattgtggggacgttcttatctcggccccagaaccttgactgaggctctgagtactgaaggatgtcaaaggcagtctctttgatgatcc

SEQ ID NO: 441771 - DNA, 303 bp, Homo Sapiens
aaatttttttccttttattttgttttcaacataaaaatgtgttaactgtctgattccacctattatggagagcacttgtttgttcagctaaaaaggaactcttgtcaggcccccttgctccgctctgtttctggtttgtgcaacaggggctcagaggcccatcaagcgtgcacacccattcactgtggttacacagacagaagcaagcggatgttgtttgcttaggggacgagaagagggcgagggaaaggaaaggccgggaagggtgttgttggttctgtgggtagaagggagacttaggga

SEQ ID NO: 441772 - DNA, 740 bp, Homo Sapiens
gctgtagactgctaaaaagggcagaagagaggaaaacatagattagaggaaagaataacatgagcaatgaggtctacaagaaaattgctgagcagaagtgggcacctctaattacatttcaaatacatgcatcatgcttttgcttaatgtcaaggacatgactctccttcatacttattctcatcttctttcctaaaaggggagacacaaactcccctcagtcaccgtattcagttctgtatgatgttaattcctcttctatttcaggcacagtcctggatagtctgtccctggagactctgaggttaatcaccacccactttccttatgtaaaatagctgattgtggaggtttgagggacaaaactgagcttgtcctgttcagtgctcccttaggatccccgcgcagcacttccggcttgctctccgccatgttggatctcaggcttgcacacccattcctgcccgggggcttttgtcctcgctgttccctctgcctggaatgctcttcctcgtgcatctccgtggcctcctccacttcattcgggcttcactaaacttcataggggccagaatacattttcctcattatcacattggctggttgttcctaatagaaaaataggtcagcagcctcgctggagggaactgggcagccgtgagtcaggggaagagcatgtgtctgccacagctcggctctcactgctgctgtagagcctctgcctccaggcccagctgcag

SEQ ID NO: 441773 - DNA, 1398 bp, Homo Sapiens
  misc_feature (367)..(367): n is a, c, g, or t
ttcattgcctagaggagttatagtaagtggtgaggctgaagcctgattttcagcccccacacacctggattttttccatgttttcatgtttgtctgttctttctgtatttcaagtctcttcaaatcccgactgctgccttctgccttcaccacttgtgtgcactgttcaacctgtcttatgctttgcttccagggagtctccccaaccacttctttgagcacttacttgctcttgttcaatcttgggtaactctccgttaccatcagggcacatctgggattccttaacatcatgggagccctaggctaatttcttcgaggcaaacagttcttggctcctctatttattttccacccttgcgctttngggtgttaaatctcccatcctcgtggaaagttcttgatgttcctttccaccagtcctagggccaggctttaatcccattgatctcccactatctttaaagcctctgctgaccaccataccccactccagcctcactgagcatttttgtgtaaggttagtggtgcagttcatttagcaataaatactgttttaccttttgcagtagacaactattaactttcatccttgattctcagttttttccaaaatacaagtgaatacctggtttccccagcaacattgtaagattgagagtaggaattcattgagattttaatgaattccatggattgtcttaagagctatctaaactttgaagaaaaataacttccagagcatctaaaattgaaaataaaagatcagaagcaaatgaaagatcaattccacacagcttttcctctcttagacgtccctcttctgccatatcctgtaaacatctgaagtgttctgagtacattttgagagaatatttcatgatcacactgtgattagacatgagtagtccttgccagtgggatgttcctgttctttgcattttaaccacatgttctgtgctctctgtggtaaagataatctaacagtaataaaaacttatggagaaaattacccagagctcctttatcattacgatttttaatactctcttctaatccttatgcacatgtgtatggatttatgtactgcaaatcattgttttgtaatacattctcaaaaatgtgctttaggtttttacaactaccataatattttgtaattttccttcattactgtaatttgctaaaccatttctgttttggtagataattaggtagtttccagttctgctttttagaagatactacagagaacttctttgtgcatatttccttagaacaagttccagtagaagacttactcgcaaaagcagtggaattttttcttagtattttctgttacaggtacagaagagtgcatacaacacacagttttgtcgaatagttacgaagtgacaa

SEQ ID NO: 441774 - DNA, 1205 bp, Homo Sapiens
taaagtttttaataaacttttattttatattcaagataaagcatatacacaattcaatgtggaaataaattactagaaatactctggaaacttttccatttccctctcaaactcacttttttttaagctcataagtctttttacttgattttaagaaacatggcaactataatactaagaaagaactacagctttgtacagaaacatagagccttgtcttgactataaggtttagttggtgttttaataacaacaaaaaagcacaaaagacacaaacactcttcaacaggtttactcaaacagcttcgctcaagaagaaaaaggcacagatttaaagggatgacaataatcattaagaatgaagtaaatggagactcagtcaaaaaatgatacttcatgaattaagtcaagaaaaacaaaagtctttcaaattatctgtcttccttaaaatgaatttttaaattaaattgtataaacatatgatataaagttggtactttaggaagcgtctttgtatattttttatgtacaaatctttgtatacaatttcgatgttccttatatattccctatatagcaaaccgagccaggacctcccaactgcatgcctcaagtccctgtggagcactctggcagctggatggccctacttgctttctgacaaaatagctggaaaggaggagggaccaattaaatgtagtcatcttcaactggctctccattgacatcacaatagtggataaaaattgccactactcgctgaaatacacccttcttcatctgacgcatctctgaaatttcctctcctattgtttccatacagatgtctgcagacagctgtcctttccttctaggagcatagatagtgctttcttcatcgtcttcaaagtcgtatcgagcgaagctgttgggctctgcagctcgtaatgacctcagccaagggaagtcagaaatcatggaatatggagctccatccacaacaccttctaaagtatagatttctctcccccaggggtacttggggtatttctttaagtcttcttcacttcgagtggcttcagggaagaattcatatttaatgtagctcttgattgatgtttgctatagtgtccatccagctgcgaatgcgcaccttattccggacattgggagggttactgaattcatggataatacagattgtgataggggcagggaccgactcg

SEQ ID NO: 441775 - DNA, 946 bp, Homo Sapiens
  misc_feature (31)..(31): n is a, c, g, or t
  misc_feature (62)..(62): n is a, c, g, or t
  misc_feature (598)..(606): n is a, c, g, or t
  misc_feature (640)..(696): n is a, c, g, or t
  misc_feature (868)..(868): n is a, c, g, or t
cggacagtgagaaggcaggtgagggcggcancgagctccccttgtcccgccctgttcatcgnccattccaccgcccccacacactcacacgcacacttacgcacagatcattgcagcggatgagatggggctatgacagaagcctcaggctcgtttccttctccctcctccagccccctcccggcttccagcccattctctttgcagctggggttcctaccttaccctactcccagctccttttccccgcggatggagagatggactctgctgcttacccacccactcccctgcagggggtggaggactgattcagctactgtatccccactgctgtgactggaaatgggggtggggagtgactggtcttttcaaccctggggagttgaggaaaatgtctgctttcacttcagctttcatttgaatactgtgatctggtttttattttgaaatgtataaaaagcaaacccagctacaaaggccttttcacccttccactttgtaactaatcccagtctcttctcatcactcctcctcttacagtactctgctattcatgctcatttcatgttcttaatcttctttcctgtttaaaaannnnnnnnnggaatttgaaatcatggtccttttttctgctgannnnnnnnnnnnnnnnnnnnnnnnnnnnnnnnnnnnnnnnnnnnnnnnnnnnnnnnngtctggctacctcgttttagtttactttttttctgaagccctggaattctacaagagagatattttgagactgaaacatgtttgtgcctagactggaaagatgcccttgggtttgtccgtctttttgtgttggcttcttcccagcctccatccgtccagtgtgccccacttncacattctggctataatttcctttttctccttgttcattgggatttgaggacctatttctaaatctttctatagcact

SEQ ID NO: 441776 - DNA, 689 bp, Homo Sapiens
ggtcagatccttgagcatatatcttccacaatgtaggaattttctttgcaagatacattcacagaggtatagtttggtttgcacacagtcagaaagtaaggtgcttgatatcctgtggacagctgtatgatatctgtaatgagagctgtagagcataatccaaatacatgaacaccaacgaatctgacagctcgtctgaggaaggaattgaagttgcagcctccagcattaatgttgggctctagtccgaccccatttcttcttttggagaggcaacagtagagaattccttctcctaccataatcgtaattgcaggtccagcaaaagccaagctaagcaacatgaggaatggaattgcctcctgggttggttcaatgtacggcatgctaagactccggtcatagcagctaaatccagagtgcacaggtttgaagacatctgtgagttcgaggaaatagaggctaaccaccgatgatgccaatataggcaactcgacgaaataaaagcagggcaggagggtgacgctgtccttgatcactttgccctttggcctctccttcgccgacatccctgccgcctgcccgggtctgcgtcctcccccgggcgaggtgtgcacagcgcagctgaggcgagctgcctcctccagccccaagcgcccggcgccgctgatgtcacattcccccacgct

SEQ ID NO: 441777 - DNA, 1008 bp, Homo Sapiens
  misc_feature (379)..(434): n is a, c, g, or t
tttttttaaccaaaccaatttttgggatggaaaacgcggaaccatttgaacccaaaaaattgccagtgaaattttgaaagtttcgatgtaagaagcgggacagtttatttaaaaaggacccgggagccaaaacaggattgaaacattaccccaaagttccccgaccttaggtaacattaaggtagttcaaccacaggcataattttaagtattagatgtaatgaaaaaaagaacctggaccgaaaaaaatatttaaagaaatgttcgccggaaaatttttccaagtttgataaaagctactaactaggagatccgctaagctcaacaaatccaactgggtgaagcccaaagaaaaccaaagcaaggaacattacagtcnnnnnnnnnnnnnnnnnnnnnnnnnnnnnnnnnnnnnnnnnnnnnnnnnnnnnnnnatgctatataaacatctgacttcccaacataaatagtggaaattatccgacactggaatgataattcaaagtgctgaagatgaaaaatcaagaattctatatttaatgaaactatctttttaaaatggaggccaaaaatacatttttcagatcaacaaaatctaagataatttgttggtaacagatttatacttcaagatggacaagaagttctatcagctgatgagaaatgatgccagatggtaactctgatatacaagaaatactgaaatgcgctggaagaggtaaatatgtggatattaatcactatacgtttttcttctctgaaaatctttaaaagacattatttaaggcaaaagtgataccattatattttttagtttatgacagaaattaaatatacatgacaatagcacaaaaattgagtaaaccgtggaaatgtacgatttactagaaataacccaatttaaatggtaagtaaatcatgatatgttaaagatgcttgttgtcatccctatcaaaaccactcaaaaaataaattaaacagtggggaaagagcataatggcaagccta

SEQ ID NO: 441778 - DNA, 806 bp, Homo Sapiens
  misc_feature (64)..(64): n is a, c, g, or t
aaaggtaaatccaatatttgatcattcaatgctacataaagtgcattgaatatcgaaaataaancaagcgccaattttatcattaattaataacacatttattatcttgaaaccaaactggcccaagttactttttgtctttttgagtcagctctgtataaactcatttctctcaagcttcctgggaaataaaaaccaagatatttcatttattctttgcagttaacaagagatggcagcgggctcaaggtaggtatgttcttgataattcagagtcagaaagtacttcttcttgagcagaaggttcataatctcctacattttcagccaactcaatatctaactcatcattactttctgcactgtaatcaacttcttcaaggaatcgaggttcatcttcatccaagacataagtggtagggctagttactttgcagcttgattcaattaaatcattttcaaagtcaagcaggctggaaggcagattatactccaatggagaggtcagtcttttcaaacgtaaaagaccaacacaaaattttgctcccatctcttccagttctcgggtaccaatctgtaaacccttgtattttccctgatcacagccacataaagtactctccatggtataacttctttgtactcctatttccctccaaactacaacacgtgctgtggattctttagatttttccactacgaagctacagctgctcatgcaaaatgctggggcgatatggctcagtatcttaggcaatgtcctgtatcccgtatcctccacaacatcacatgaagttgcattatca

SEQ ID NO: 441779 - DNA, 1512 bp, Homo Sapiens
ttttagacctgtacagtttttattacataaaatatcacaaaattcacaagtacaacactgcttattttcttgcttgaagatcagatctctggtttatttaatatcaacattcaccacagctgaaggaaattaaactgaacctttaaaaggtaccgcatacggacctggttggggttatatacaatatattcattgtagttgagggtataaccatctggattcagaattcctgtgtcacttgctggtcctaatggcactgtactcccattcagggtgacgaagtgggcagaactgggagccatcttgcccagccccttggtgctatgtttaccttgaagcaatccttcggccttaggattggcctctagtagttcattacactgacctagagctacctctgataagagcagcagtcctgtattctttaggcgagaggcaaagcagtaattggcactcttggaagacatgtcagcaaagtagattcctttcccaaacatgtcacctgtgatgggagcttcaggtggggcaattcgaagcccatggctcaagattcccacccagttactcatcctggaaccatgccatagaagcatcctgttatgcaggtcctctctgaaggcttctttctcaccatccttctccacttcaaacaaatccagcaaggtcatggtatagtcgctgtgtgtgggagcatgggtagattgtaggtactgggaaatcactttgaactcataactttcatggtcaagggggcgcaaggcacaatgtaggtttctatagtgttggtccaatgggtgttctgggctttgtagctctgttttcaccagcttaatagcaatttcaatgtctcccaaagcctctagtaattgtattttttctgacagttccttctgtgtccggattagtggaggagtacggagtctaagaacagagatataacccataatgagctttctgacatgtggctaaaaggcgcatgactaaaaatagaaaatgacagataggtcctttagaaaacaggtatgagaaacaggttttccatttgagagagaaagagatctgtaaagagatcttaacttccaaatatataaaataatattaaatatatactcggtataagatgaactatgtggattttgacttttgagactagagttaaaattattttttataaaatcatttaaaaataagttatattgatatcaacagggaacagttggatacagttctatctagaagcacaggtagacctgttgaccactcagggttatttctaggtcacggggctctataaagcaataaaagaaatagaaatcggatgtaaaccagaaaacagaatcaacaaatgtaaaatgttattttgtctatctaatatcacttgagttcacagaaatggtgtttgtgtggttttagttactcaaataggaaaagggggtgatatgcctgaaggtgttttacttgggtggttggatagctagacccattctctcttgggttggtaacttccacttt

SEQ ID NO: 441780 - DNA, 491 bp, Homo Sapiens
agtctacatcagcctttttgtcttatttttcacaggtgatttcccagtacctacaatctacccatgctcccacacacagcgactataccatgaccttgctggatttgtttgaagtggagaaggatggtgagaaagaagccttcagagaggaccttcataacaggtctgagtctagctttgcgttttggaaagacactccttgcccgaaagtacagctgtagaacttataagagggagtcagaggaaggtgttggcttttttatgcttatggcctatctgtgcagaacaacagagtacaataatattggcttttccttaggatgcttctatgggcatggttccaggatgagtaactgggtggggaatcttgagccatggctttcgaatttgccccacctgaagctcccatcacaggttacatggtgagtgaaattgaactctgggaggagcacaggggaaagggatacagtaatgttctcagtgcttttttt

SEQ ID NO: 441781 - DNA, 471 bp, Homo Sapiens
tagacctgtacagtttttattacataaaatatcacaaaattcacaagtacaacactgcttattttcttgcttgaagatcagatctctggtttatttaatatcaacattcaccacagctgaaggaaattaaactgaacctttaaaaggtaccgcatacggacctggttggggttatatacaatatattcattgtagttgagggtataaccatctggattcagaattcctgtgtcacttgctggtcctaatggcactgtactcccattcctgccaaatggaaaaaaagtgtgtcaacatcagtctctggttcagaagctgcaatagagaacgtagtcttatctggccaaaaggagtcttctagtcctcctggttctgagtacttacagggtgacgaagtggggcagaactggggagccatcttgcccagccccctggtggctatgtttaccctgaagccatccttcgggccct

SEQ ID NO: 441782 - DNA, 953 bp, Homo Sapiens
  misc_feature (137)..(214): n is a, c, g, or t
  misc_feature (882)..(882): n is a, c, g, or t
  misc_feature (895)..(895): n is a, c, g, or t
  misc_feature (938)..(938): n is a, c, g, or t
ccctgctattgaggaagtattttgccttccctactcactgagaagtattgacttcgtggtacacattttaaagcatttctgatttgaatatttttgtacatttttatcaattattaaaccttctcttctagtgtgtnnnnnnnnnnnnnnnnnnnnnnnnnnnnnnnnnnnnnnnnnnnnnnnnnnnnnnnnnnnnnnnnnnnnnnnnnnnnnntctacttaaagacaactgaggacacatgtaatgttcatcaacttcaggatggatggtgaactgtaagaaagatccgatatattatctaattcaaatcactctataggcaatgcaaagaccatcactcttggccaaccaccaatcctttatgtccttcatggagatttggaaatgttagttccacacgttttgtgagttttcttgatgacagtgtgttgctgtggtgtgatgtgcacactctacttggcagtcttgttttgtgtctgtttgccattatgtttttctctgtgttttatgtctccaaatataatcacatcactaaaatagaattaaatgtcctccagctaccttaatccttgtccaaaatccaaactaaaccacaaaacaaaccaaaacaagaacaaccttgtgggcaaagattgcagtccattgcaatggattcgcttggaagtgaaatgttgagtagctgaggcatggtggtggccaactgtttgggtctggattatgatatatcggtattatctaatgcctcgacttaaatctcattcgcttggttcgattcttcgcttgaagaagtgacaattgttgagagcttgctcctccacccctgtgccttgttcactcaccctctcttttggcatagggttaaaatccaagtggatggcttnaccaaaaaagccnggggggcaattattcagggacgggattggttggcccagccagnctggttcgtgttagt

SEQ ID NO: 441783 - DNA, 973 bp, Homo Sapiens
ttttttttcgtacaaacataaatatatttaaattttttaactgtaagtaaattcaaacaaactgttataaaacagaatacacagttgtctgcatagatcataaaaaacataaaaaccagaatgctgggtaggtgctggtggtgaaaactgcagggctaaaacttgctcaacaatgaactagggaccactatggcttaatgaacatggcccacccctcctactaatggttttgtcaacttttggaccctagaaattcagaattttctccttcttcctctgccagctttggtccgtgtccgactacctggctggacagtaacttgctttttaaagtccactaagcaatctgtggcttctgaaatggaaacaaaagacttgacgggagattcatttaagtcacgacgtgtgaaagaactctgcatctctctgctgcagcctgcctcttccatccctggtgaaggcaccctgaaggctcctgtttctgaagacttgatgtctgcatctgaagtcttgtgctcagactgttccaagaaactaaggagtcggccttcactgtggcctttttcctttgggttcttcagcctctgctgccacttcccctccacagttgaacatgctcttccactcccttcaggtccatctccttggtcagcctttgcaagctggagacaggagtccacatgacactgatactctctaaatgggaccagggatttacagaggtaacacttctcattcttgtcaatgtctagagaagtctgggcagctgtcccactgtcactcttggtcttggcctctttttgtctccgagtcaatactgtatcttcctccatcagaccattgcagtacatggcatgtcgttcaatctttgtgggtggaaagcattggtcacatagcgggcaggatacctggttactggatgagaaggtagaaatagctacttccttccctcgtgccgaattcgccacccagg

SEQ ID NO: 441784 - DNA, 574 bp, Homo Sapiens
cttattgatgaagtggtttaaaaagttaccctgagccttttttctttgcttttaagctggaaagatcgcttgattacttatgaaatgaaaaaaagttttcctaaatgaatgtaacagtttaaatcatactgttacgaaaacaacactgtcaagaaaagaaattctgctccttttagtaataaacaatgtcgtgtgacactttggaacgcttctctcgttacaaaccagcgtctttactgaaggtccttccgctgcagagctgcgcaatggatgtgtggacagagctagtcggcacgtggaggctctcctggttttcgagcaggaaacgtgctgtgagcaggaatcgcgagtgagttccatggcgtccccgggtcagcgcgcgtgcaggaatcgcgagtgagttccatggcgtccccgggtcagcgcgcgtggggtcctgtctcgctggctcaccactggtggccagggcatgtcttccccagccctgagtcttcgcagtggtgaccagggcatgttctcccagccctgagtctcccggagtggaggcagcgtgggcacagggtttgtcacgcct

SEQ ID NO: 441785 - DNA, 868 bp, Homo Sapiens
aacacattctttgaggccaaagcaaatctgactgattttcaatgtggaagtaaaatataaaaactgtttttgaagttttatttctaaacagacctaatatcagaatcatctgaatcatctgagctatttattttagaaaaattggattcatcacatgagtctttggccatcaactgtttaatgatgttaacatcacgcataggaatgctccgttttctaggctctgacattttcagtgatcaagaattactatattttgtaaatggaactccctccactaaaaccagaatgctatatatagaatgatgtcttttgtttccaatgtcaatatgctagagaaatgcaaaagtaataataaaagcaaggtctttcctggcagaggtatctttgggtaaacgctgcagctggaagtgctgccggctagtgttctcagggcaaatggtaaaagggttaaaggttaaattagacagcatcccagatttgaggtttgaaaggaagctagcctaactggccttgagacgttgggcctggagtgtccttaaacggaagtataaggtcaatggtgggcattcaatgcatttcctggtttgcagtctgaatatttttggtgacggcatagacatcagagaggtctgtggaaacatatgcacatcaatcacttctgactgcacaatcccaagtgccctgtgggaagctaggatcatgtcctatgccagccaattgttgtgggccactcactggatttctttaattctctggtgatgatgttagtgtctttggtaagactgtccacagttctggttgtttcctgaatcagagcatggagaatgtgggagcctgggtgaactaactgagtggcccactacag

SEQ ID NO: 441786 - DNA, 443 bp, Homo Sapiens
aagattccactttattttatttattattgttattgttatttttacaaacaatagatttgctgcaacatgctctggctcatattactgaattaaaaaatttaacacatttcaaaaatatcaaaaatacactataatgagtcttaagactacaatacgacaatgattgcacaaaaccgtaagatatgagcccactgtctggatgacatccattggcaacagtgagagaaaaccctatagcatctgggagaagtgcatgaaatttagaatacaaggaacttatgtgtgactgactgatcaccaaatgaggcaaacagagcaggattgactgtagctgctttttctcaatctagggaagtgtttaccccaactatgggggcaaaagtcactaactggaaagattaacttgccttcatgattgggagtcggaaagcctccacccagaa

SEQ ID NO: 441787 - DNA, 640 bp, Homo Sapiens
gcttggacattcatagttacttgggacaacagttttagcaggctctctttctcctttcctgatctctctgttaagctgcctggctcatttgatatcacatccaaattatcagctgagtgctctatggttatggacaatgccctgaagcataccaaaatgtgtctggaataggtgggttcttggtcttactgactttaagaatgaagttgcggactttgcggtgatccaccctaccacatattgtctcctaatggccgtccagtttatcctggagcccttgcatgacacaggcctatcgaagcataggagatgccaatattttacctcttgggtactttctgtgtagaagattcataacaagaacaatacttattctgcaattctttatataaagtaagaagaaagcccaaagacaaaaccagaggcaactggctgctgcatcgcccacctagtggcagtagtgtgagctatggacgatctaagtctccaggacgagttgtgcagctgctcattttcctgttgacttctgtctaagacttggagatgtttgtaagattgggacctacctacagagctccagagggaagtgagaaggatgttcacttgctggtgagagggagctggttccatccattatgcg

SEQ ID NO: 441788 - DNA, 421 bp, Homo Sapiens
  misc_feature (38)..(38): n is a, c, g, or t
aatggatggaaccagctcccttctcctcacccagcaantgaaacatccttcctcacttcccctctggagctctgtaggtaggtccccaatcttacaaacatctcccaagtcttagacagaagtcaacaggaaaatgaagcagctgcacaactctttgtccctggagacttagatcttttgtccatagctcacactactgccactaggtgggcgatgcagcagccagttgcctctggttttgtctttgggctttcttcttacgcaaaagtccgcaacttcattcttaaagtcagtaagaccaagaacccaccaattccagacacattttggtatgcttcagggcattgtccaaaacaatagagcaatcagctgataatttggatgtgatatcaaatgagccaggcagcttaacagagagaat

SEQ ID NO: 441789 - DNA, 1576 bp, Homo Sapiens
aaattggcactgtggctgtgtgtgtgtcctgtcaggcagcagcattactgggatcgggcagtgcaagcaattttagaaacactttcttgggcttttaaaacagagccaattttgcaaagccaaaataagcatattgggaagtcttcttctctttgcacaaaataccatggaacgtcttggctttgtggtatgaaagggattgtttgcagagctgtttacaccatcagccagaattcaagtattccagggccacctcgtagcagaacttgtactgatccaggaggtcgaccatgttgggcttgttgttcctcagtgtcttcacagcgtgaaagacatccacggttctctggtgccggagcatctcacatacgatgctgatggcgcagaacgtcccactgcggcctcccccgttcaagcagtgcacaacggtgcggccttccccgccattgtattcctcttgccacttgtccacctggcgaatgagcttcaagaaggagcgcttagacactggtgtgtccctgtacatcggccagcccaggaactggaattgctgcaccatccgatatccatcttggggtctggcggcattgtaaatgcggaatatcctgctgatgatgtcctcttccaggtcagcagagacaaattccacctggatggggccgtgtctgtgtactccgttttctggccagtactgtggacacaactgggcaggatccacatcatttagcataactacggatgtgcagtgataatccaggaccagtctccaaaagtctttcactgtgtttggcaaaggatgctgggtgactataaaagctgaaggctgtttatagctgtccatgagggcagcattgatgtagttgctgctctccccatcgatggtgatgaggaagggcaggcagcggtctgggggcaggatgtccatgcaccggtttttctcatggttccggggcaacagtgcgatgctgcagtcctctactcgcagcgttggtgtcaccatgtttagcgtccggaattcctctttaatctggcttgagtttgtctgtggatccagtttgttcatgtcataatacagagacctaacttgggaagcaggcacagaggtgtccccacaaagacaggcttccaggatcgcatcgtggataaacacatactgctcctctgtttgcaccatgttcaccctccgtgaccgcagctccctgacgcagttgtagatgtctacgaccctttccctttcggccatgtccaacatgatatcaatgacgatgaaacagccagtcctccctgcaccagcactgcagtgcaccaccagtgggcctgcactgggcgggctcttggacttgacttgccgcacgaatcccagcaggccggtggcatggtaggggaccccagtgatccggccagccagtgaagtgaaactgtctgatctctcggatttcatgcacacctctctgtgacacttctctggatggactgcagtttgcttcacctccggcccctcccttttcaacagcaaatgttcttatcacatattctgccagtagttctgtttctattagggtaactttaatgtctt

SEQ ID NO: 441790 - DNA, 581 bp, Homo Sapiens
  misc_feature (565)..(565): n is a, c, g, or t
gcacgagcccgttattcttcactttcacttgacattgttcttcactcaaggttaggtcctcgctagtgccagagaagcccctgggtccccagtgccctcagccccgcagcgtagggagcagccggcccgggagataaggaggccacagccatggaggccccaggcccggagtccccgcgccgtcgggttttgagccgcgcggctgtccaggaccgccggctccttctctgtcccggtcctccgcttcgcagccccgcagaggtgacggtacctggaggctggaagcgacggtttcctcgggccggtggagggaaacatgtcagggtcacagcgaaggaaaccgagacccacaggggtccccgggcgtccgggacgcgtcgctggttttgctcctagaaggaaaggcctttccgcttttgttccaccggctcaccaggtcctcccttcctggccaactctaacctcagctttgtgcgtgtcgacccggccccgggataatcggatcctcccagacccgggaatccatcagaagcgctacccgtacttggcgccctgaaagttcccngaagcgcagcggtcgc

SEQ ID NO: 441791 - DNA, 884 bp, Homo Sapiens
  misc_feature (17)..(17): n is a, c, g, or t
  misc_feature (27)..(27): n is a, c, g, or t
  misc_feature (39)..(39): n is a, c, g, or t
  misc_feature (74)..(74): n is a, c, g, or t
  misc_feature (90)..(90): n is a, c, g, or t
  misc_feature (627)..(751): n is a, c, g, or t
gaaatgttgccgccccnagtgggcagncccatgacaaancccactgctggtccaccataatggtcaagtctcanggtgggtttattgaanaaacgtttgccttaattttagatcaaagcagtactttccttctcccctctcctacttaaaagggtaccctgggcccacggtgaagcggtccttttatcctgtggtctgcagtggaaatggcagcattactggagaagagctgtaaaaacatgcacagtgaagttctgccgcatcctgatggcccaagagagggaaggaggaggagatgagaagggttgaatcggttctctgacatgccagagagataaaggggtgtctcccaaagctctgagggcttttaaaaactggatgtccactgatatttcaaaacagtgctgggtatccataattacaaaggcaggtcacaggggtccagagttgaaatctctgcttttggatgccacagatgagccttctcagcaggcttggcaaacatcttcacagccaccatgacacgtgataggattcggggacacaaaagaattcacattttggaagagcacttagaaactgagaagacacagtaaacacactagaggccaggtgtggtggctcatnnnnnnnnnnnnnnnnnnnnnnnnnnnnnnnnnnnnnnnnnnnnnnnnnnnnnnnnnnnnnnnnnnnnnnnnnnnnnnnnnnnnnnnnnnnnnnnnnnnnnnnnnnnnnnnnnnnnnnnnnnnnnaaaagttattttaaagtagagaagttcttggcactgttccgtactctgacagtcctggcacaggcccggtctccagtgatatttatgactcctcatctggtactcattcttctgtatgcccggccgaatacga

SEQ ID NO: 441792 - DNA, 816 bp, Homo Sapiens
attcattttataaataagcaactgagaattttgctccaagtggctgctagtgtagcccatttcataaatggcattctccgaagcataaggcacaatatgatacgaatgcagctcttcataatagagagactgagaacagcattcctgtaccataaacttcagccgttttcttgtatcagaatatgcagtcttataacagggagcttctttaaagtattcatagctctctttctccgtctctagatgtatcttcctcagcaaattgttaattaacacagaccttcttaagtaggtttctgggtcttcaagaaacctgagcttctccagagaaagtttgagaatgcaagttctgtcctcaggtaatatcaggtgttttggaaaatacccatggtaatcttgatgtaaatcttcttcttctgcatattttctcttaaagtaggctactttcgacgttgttaatgtatatgttaatacttttgttggataagctggtaatgctgaatcaatccgaaaagtgtatttctagaacagtttcagaaaatctggtgagagttcccctttgcacagcgagcatttctcacagcctcaggctcatgaatggttacctgagatcttgtgagctgggtccactcaccagatcggcgcatgcacctgttaggtagaagcgcggggttcggtgctcactcctgcttttgcggctgtcactcttcagtcgggcgctgacagcggcagtagcggcaactgcagctcggcgggcagccctggctcctgcaggtccgtccctccagtctctgaagcgcctctcactccgggttc

SEQ ID NO: 441793 - DNA, 1102 bp, Homo Sapiens
  misc_feature (186)..(205): n is a, c, g, or t
gtgaaagaaaataaacaccaactttattaatataatagcaacagaaagagtttccaatttctcaaaaggaaaataatatgagactagtgggctatgatgatgcctgtgaatagccagctactgtaccccactgtagctggacaagtgttaaacaagtaaatgcctttcaagagggcagagccctgnnnnnnnnnnnnnnnnnnnnaaaaaaacgggaaatgcctacatttcttgttctgatagcttcccaccacacaccaaaggttcctcaaggacagctgccaccagagctgctgcaagaacatgtttttcactgggcgtcgcttcacagtcagttcctcaagcagaagactaaaatattatttctttttagaagatcttggttgagggagaacataccaatatggagaacagatctatgcttctcgaattcaagaaaaaccattaactaatctatcaagttttctccgatatggtgtgccagagtgctctgtgaagaatccttttccatccctaccacgtgtctgggtgaagggagaggagggggtggcaagctgccagtacactagcaggcactcctggtgatgctctgggctctgctccctttctgctggtagtagtaggcatgttttctggcagctgcagcagactgatgttggggggaggaaggggccacccaccaatcacctcttcttgaagccgtattttttgcgttcatagaagaggtctgtcttagagctccccagattgacaatctttgggcagccatctctgtccttctcctggatggtgcactccttacaataataggcatcagagaccccaggtcctccacagatcacacagcgcccctggtaagatccatagttacactcatcacatatgcgcaccagagtgcagggacgcacataggagtcacaaatcacacacttgccatcacatttttcacacagtcttccgatggcaacaccagcctgcttgcggcaaaagatcaaatcaggatgatgtttagccatagctcctcactaagccggccaccggaagcttccctcgtgccgaattcgccacccagcctcgctaccttataccgctgtagtactgc

SEQ ID NO: 441794 - DNA, 995 bp, Homo Sapiens
gtttcttggagtcacagagctctcagcatattgcgaaggctactttctcaaaaacatgatggtcctcattgaaaacgaagcattcaagcagctcctgtatgacaaaaatggtgaagggaccggccaggatgtgctccaggacttacagaggacgttggccatcagaattcagtccatccacttgtcgtcttccaaaggttccgtggtatgaaacgcctagtgcagggaatgcttcccgggaactttccagttctcctgccgcattggctttacacaaacacagacaaattccacctggcacctgtttttggctgggccaaggagctgcctctactgctcccacgtgttcctgttgaaaaacaaaggactttccactggtctgcagatcagatcagctgggtccagagtttaatgggcaactggacaaccaagttaaccccaattgaaagcacccctaggaccattgaacacccactgccggggaccactgtccagtgaatggattgaggccttttaaaggtcactcaggttccaggttgacagttggaggacttcaccgtaccaaccctgaagagattgtattacacattaaggaccttggtagctgtgcttcagcaaacgtcaaccatggtagcaaattggtgaggctgtgaccaataatgaggaaataatctggcaattttttaggggtgggaacttttttaaatgttcatttagttcgttttcaactaaattgtgtttagggatctgtgtttgagatttttctttatttcttttttttttttaaatagtaagtcacaggtccacactgtgtaaacatgcatctgataagatactgctgatattctaaacaagttgaaataatcttgccttagtgatcatgattacacacaagaggtgcactgccaataagtatctctaattccaatagttggaaagcaacctgcatgctaatcgtgttttcggggtgagaaattcacccccacatctgcttg

SEQ ID NO: 441795 - DNA, 662 bp, Homo Sapiens
tccactgattacattttaatgtttgtgaatacacatataaaacacacattaaccttaacaattggtggggaagattggcagcacaggactatgcacaacaaattagcaggcactaaggcagaatatcttttacagcagaaagaccaaatctgtccctttctgatgcacatcttcagttttgggtcatgagctagtggtggaggtcaaggccaaggtcaacctaagaagtctacaatagcatgcatcaatggaaatgctgcagaacaaacatggaggaaaaagtaaaaatgctcttgtaaccatcaacacctgcaaatatgccacttactctttttctcttgtgagtgcagtgagcatgactaaacacagtagctctctgggaagagcaagaataaaggagtcttcagaatgagttgtaagatatgtatgatgcttacaaagtggagttcacaattgtcctgtttaatgtcagtctccttattttaagaatgcttcaggtgacaaaggcctgtgtcagcagtatggatcatgatgagattcctggaaggctgaacctctgctggtacaggcataaaactcctccagaaatggcttctttttattaactaaagaaactgaaaatgcctttctcctctcaattttaatgtaagtggttaagaagc

SEQ ID NO: 441796 - DNA, 1846 bp, Homo Sapiens
  misc_feature (1804)..(1804): n is a, c, g, or t
tttccttttcatgttcaagttttattacaaagtatgatgggcagaaaatacggtacttcttatacaggaggctgaaacagaatgaaagggtgaaaattaggtttaatttacttaggaaacaagaaatagaaagtcatagctataacactccactttcaggtgcccatgaagtagccttcaatggagattccccatagttgtttcacagcacagtgttaaaattttattacaagccctgtgtacaatcagtcctgtgaaaatatttataaaagaaaaatattacagtacagttctgcaaggggcagcttcctctacacctgaccgtggatgccacaaaacctataatatagagggaaagtttaaatatataacaagaatggaagttcagacatactaggctaaaggacacagaaatggatcagttagagcttaacatttcagagcaagaaatctccattttctacatagaggtttatacaatcatgctacaaattcactctgggtggggtggggaaggaaggtcactgacaagaggggtagtaaaatacacaggaaccaaagcaagtgagtcagactcaactaaatcgattcaaagcttcagctcaacaattttcataacacatggtataccacaatcaacccaaggtgagaacatttcttttaaatagtagatatcacatgttcataatcactgggttgtcccaaaggtgggtgcctataaactttccagctgttacatagactgtcaacatctttcttcttgagtttaaactttctttagcttatttgtttctcgttggatataccagtccaagcctctttgggaaggcacctgcatgtttccatattttaaaaatgacatccagaaagtagcctgagaggacctggcccatcccatgtggccacacatttgactttgaccattagcagcagtgacactgtgagagggggagaaggtgcaggtgggtgaagtgggcaagggtctgcaacacgagacgctctcaggagctggcccagccagggcctggcccagggttcacagtgactttgctctgctccgccctcttccctgggaaaaccaatctaagtatcaagcatgatcttccttcttcgtcctggagtacacacagtaaagggaaaagtctgctttgaggcttctacttcaatggtctcccctaccccaagccaggaatgaaaggggctgccatattctcaaagtggggaaggcagagggacagtactgggctgccctcccacgtgtggtaaaccctgcagctgctacatgtcttcacagcccaggaattcaaggcccaggtggcagcaggaagaaacagtggaaaagcaaggggaagagaaaagagaaaaaggagggggaaagtctgcataactgtcataacctctgcttctcctgctctgtaacaaacccacaaccaggaagagtcatggtctggaacaatcatgggaccccaaacgcctgtaggttttttaccaccaaacatcacccatggctgctctaagctgtcattttgttcccacagttacctagcatcacggatgcccaatttatggcccaggaaggctgacccaggctaagggcagtctcactccacagccatgcaatggacagtctgaatgtttccctaccccagaccttcactgacctctactatttcctcctctgatataaagaaaacactttaattttctcctgcatcctacatctcctcctaaaattttggccctaattgtcatcaaaaccttgtaggattctgaattttttgtttcttcctgaatcttagccagntctctcagagccaatcctggatttataaggaattttcaccta

SEQ ID NO: 441797 - DNA, 606 bp, Homo Sapiens
acatgttcaagttttattacaaagtatgatgggcacgaaaatacggtacttcttatacaggaggtttgggggtggggcaaaggcaggaaatacaaaagcccctgcctcgtgggcacagcgccaccaacactacactctgagtatctccaggcagttgttgtatcaaatggcgatccagtcgggctgagttgatgcccactgcacattgttgatctctccttgagctgtgtaggccaggatagggtcctcaatggctcggggcatttgctggatgtcccagatgaaatcctggtggtcatccgctggggtgcagatgtggcaggatgaatgtggggcccaagcaatgccattgacacatgctcgatggttgtttaacctggcgacaggtgtgcagggaacccggacatctagaatcaccacctccattccatccatggccatggtggccaggtagttagggtcctgcttgttccaacacatgcgaatcagtgggtgatgctgtgggtcttcgtaaatgatggtgctgtgatctacatggcggaagtcaaacatgcgggccgatccatcatcacccacagaggcagacatgtagctgccaccccccgc

SEQ ID NO: 441798 - DNA, 1065 bp, Homo Sapiens
  misc_feature (491)..(569): n is a, c, g, or t
  misc_feature (590)..(657): n is a, c, g, or t
tgcgccccgccgcttttctcccaccctggggggagaaaataatttttcgcgacaagcgggcgaaaaaaagggggtatattacggggcggtgggatgtacacggggtttctccaaccgcgcagtttggggagagagcgttttccaacgtcgccgcgcgcaaatttttttataatagaagtttccacaacactttttttgcgcaaagtaatgttcccgggggggcgagggcgtaatatatttatttaaatgaggcctcgcgtttggggccccctctcttgtgaaaggaccccggtagagggcccctccggaaaccccccctttggggagtttttttcagaagaaccgctggggtttgcccccgcgggggggtttttatttattgggggggaaatcccacccccttttttcttgggccccgggtttttctttgggaaaaacccgatataggccccgtttcctcttttccccttgggggggccccggcgcccccnnnnnnnnnnnnnnnnnnnnnnnnnnnnnnnnnnnnnnnnnnnnnnnnnnnnnnnnnnnnnnnnnnnnnnnnnnnnnnntgatagagaagttggtggggnnnnnnnnnnnnnnnnnnnnnnnnnnnnnnnnnnnnnnnnnnnnnnnnnnnnnnnnnnnnnnnnnnnngttacatgttcaagttttattacaaagtatgatgggcagaaaatacggtacttcttatacaggaggctgaaacagaatgaaagggtgaaaattaggtttaatttacttaggaaacaagaaatagaaagtcatagctataacactccactttcaggtgcccatgaagtagccttcaatggagattccccatagttgtttcacagcacagtgttaaaattttattacaagccctgtgtacaatcagtcctgtgaaaatatttataaaagaaaaatattacagtacagttctgcaaggggcagcttcctctacacctgaccgtgggatgccccaaaacctattaatatagggggggaagttttaaattttttaaccagggttgggagttcaggcattcttgggcttaaggg

SEQ ID NO: 441799 - DNA, 653 bp, Homo Sapiens
aatagtatctatactttattcagctattgggaagattaaaaagaaaaatatacacattgggtacatagtaaacactcaatggtcagtaacctgtcttttgaagctttaccttcaaggtccaagttaaagtatcaattcttcaaatacaattttttatattcggtccagccaaaattaatctttcccttattcatacactggtggcatgtttttagagctctattatagaaatcagtgcctttaagttgttcatatataggtctcttctaataaatttgatggcagggattaggtttttagtttgcatcctgtacaagatctttaccacaacaggttcaaatcatgtgttcataatatagttcttatgttctgggattttttctttttaaaaagtaacagaaaacttgttaaatttgtccacctaaaattaataggctctgaaagcatgaagtatttaccaaagtgaaatctcattagtgtaataatctaccactactctgttaaagaacagatttttgttgaagtatatattttcatgcaaataatctgttctcatttacatgaaacacgacagatgaaatctttcaataaatctaacttaaactatgcaatatccgtaagtatcattttatttcaattaaggtagtagctac

SEQ ID NO: 441800 - DNA, 625 bp, Homo Sapiens
ggcgcgggccagctgctcgatgtgcatactccaggagcgcgctgtggggccgtaggacaggcagcacctcttcgtcctagtcttcatagtagctgcatgtgctcatcctgcgcgcctcttcaacagtgatgatctcccagctcttggttgttggctcactgaagaagttgtcaatcatgttcagttcttccttctccaccaccacaaagccttgctcctttggcatcttttccatagacatcgggagaccactgaacaaagaatgtgtacaaatgatccaccctctcccgaggaacagcaaaccagtactctggctgctttctccgtttgccgtactgctggaccatggctgcagtgtgagtggcaaaggattttctcattaggttttcccactattgatgcacaggaacatgggtggggtcttgcttttttcttcttttgaaggaagtatatcttcaatgggtacctgaattctctttaacagccacaactgaacttcagatttattatccatttgtgcaccttgacagctgttgtccagagtagattccaaagaggagtctagagcctctttaatcacatttgcttctgtagaagagttcagttttaccgggaggggctctcc

SEQ ID NO: 441801 - DNA, 779 bp, Homo Sapiens
  misc_feature (652)..(652): n is a, c, g, or t
  misc_feature (656)..(656): n is a, c, g, or t
  misc_feature (724)..(724): n is a, c, g, or t
  misc_feature (736)..(736): n is a, c, g, or t
  misc_feature (739)..(740): n is a, c, g, or t
ccagcacgacggtaaatcgtcggccagtgaattgtaatccgactcactataggcgaattgggtacgggccccactcgagtggtagtaagaacattagacaagtgtgtagctcagaaatgaagtacttttgcaaagatcccacagattctaaggtttaagtcaaaattctatgatgaaatgcaataaatcaaaacatctatgttagaaatcaaaagtattttgtgccatttatttatatttatctagatttataatgttatctaaagtcttccgtatgtttctaatcaatgtcattgaacatctttagttgaattagacatttgaagactgaaataattcaggaaacggattgtcttctttgcaacattccattttaggatacgttgttttagacacatataagatgaattttagctgaaggacaaatgaatcatatgtgatagttgtttcaaatgttcagcatagactccacttattgtcttataaaaaaggacttcaattttgaggaatttggaatcccagagcttagaagatcaccttagtcctctaaactcaagcattcctgtgatgaaaatgggcatgttttaagaagtagaaagagagaacagggaaaaaagaaagacagggaggtagaagaaaacagggttacacnaganaggtaagggggataatgattattttctcaatacctcgtgccgaattcctgcaacccgggggtcactangtctagagcggncgnncaccgcgtggagcttcagctttttgtcctttagtgaggg

SEQ ID NO: 441802 - DNA, 1025 bp, Homo Sapiens
  misc_feature (720)..(720): n is a, c, g, or t
ttttttggctggtacaacctttattgcttctccagcattttccagaagaatggtgtcattagagggccacaggggatgggggagtaaaaaataacataaacgaactgaacagaaatgcaggagggtggcaagaggggccgagattgggtgttcagggcagagaggtggaagaccaggggcagtcagtgcttcttagctttcagccaccagagtggagaattcgtcaaccccaattttgccgtccccatctttgtctccagcagccatcagcatcttggtttctttagcagacaggtctctggcatctggggagaagccttttaggatgaatcccagctcatcctcctcgatgaagccacttttgtccttgtccagcatgtgaaacaccttcttcacatcatccgcactctttttcttcaggccgaccatttggaagaactttttgtggtcgaaggagtcggtagcgctaaaggctcccaccgccttcttgatgtcctcagcgttcagcaagtctgtcatcgacatcctgcaactgtatgagcgggcagagcaagtgcgaaaagattaaagagtgcttttctcatcatttctgctcatatgaccagcgctgcagtgctgcgcgccgggcgcacgcccgccgggcctggcatggcgccaggggcccggactctgagcgcagcgggagcggctcagtccagccgcgccgctgagcagcgccgnccgccggcaagaaggcgcgcggacctgctaccactcctgcaccgccaggccaggggtccgcgggatcccaggggctgcggccagggcacgagggaaggggccacctctgggatttagggggcactggcgtcaccagctgggtctggaaagtccacctgccgtcaaggacacgcaggaggtgcgccgtctcagatctgggaaccttggcggatgtcctgccgcgtgggggaagatcctgaaccttcagcggccagcctgcacctcaggacctcctaggccctgctccctttctctctccactccct

SEQ ID NO: 441803 - DNA, 1002 bp, Homo Sapiens
  misc_feature (772)..(772): n is a, c, g, or t
ggaacgcagagcggagcgtggagagcggagcgaagctggataacaggagaccgatgatgtggcgaccatcagttctgctgcttctgttgctactgaggcacggggcccagggaagccatccccagacgcaggccctcatggccaggggagggtgcaccaggcggcccccctgagcgacgctccccatgatgacgcccacgggaacttccagtacgaccatgaggctttcctgggacgggaagtggccaaggaattcgaccaactcaccccagaggaaagccaggcccgtctggggcggatcgtggaccgcatggaccgcgcgggggacggcgacggctgggtgtcgctggccgagcttcgcgcgtggatcgcgcacacgcagcagcggcacatacgggactcggtgagcgcggcctgggacacgtacgacacggaccgcgacgggcgtgtgggttgggaggagctgcgcaacgccacctatggccactacgcgcccggtgaagaatttcatgacgtggaggatgcagagacctacaaaaagatgctggctcgggacgagcggcgtttccgggtggccgaccaggatggggactcgatggccactcgagaggagctgacagccttcctgcaccccgaggagttccctcacatgcgggacatcgtgattgctgaaaccctggaggacctggacagaaacaaagatggctatgtccagggtggaggagtacatcgcggatctgtactcagccgaagcctggggaggaggagccgngcgtgggtgcagaacggagaggcagcagttccgggacttccgggatctgaacaaggatgggcacctggatgggagtgaggtgggccactgggtgctgccccctgcccaggaccagcccctggtggaagcaagcacctgctgcacgagagcgacacggacaaggatgggcggctgagcaaaagcggaaatcctgggtacttggaacatgtcagtgggcagcaaggccacca

SEQ ID NO: 441804 - DNA, 1113 bp, Homo Sapiens
  misc_feature (162)..(162): n is a, c, g, or t
caaacgaactctttataagacattgatctattagatgatcaaaataaagtatttttatataatattaaaagaaaaattatccttacatacaattcaataaatttttatatcattgggaactttcactatttccatgaaaattgagtaccaaaattccttttntaatactttttaggtctgtggtctgactagatgattcaggagttactactttttgacatggaattaaacaattgtcaactaaattcctgttgagtccaatgattctgaaacaaattctaaatttgcattcacttgagaaacaccaccaaagttttcaccattgacagagcagaagtagagggcattgtaaaattgtattcagaggactatctcagacatgcagttaaggaatattacttacattagcattaactgtcactttgtttcataagtcttttcaaattagttaataataacattcaggacaaaggccaacaactccatcactacaaaagggatggcctaacaagaccagaaaaaaatctaggcattgagattcattgaagtatatccagaaattcagatagaagacaaacaaagaaagcagaaagttttccctttttattttggactggccacaaaccctaaaacatatcttcttatcatctaagagaaaagaaaaggaataaatctcttatccagaatatactatgtcattctatagtttgtttaatgaaaacttaggaatgagcatagtattaaaaaatttcatatctgctcaagtatgtgcctaaaactatatgccaaagattacctttgggaccagggaagacctgggaagaccaatgcttgaaataccagggctcacctttgtcgcctttctgttccagggtaatcctggggagccgggttgtccgggaactccagaaggtccgggagggcccttccacaccctgagggcctgggaaaacccatattcaccgatggttcctttaagtccaggaggtcctataagacctggctgtccagggagaccagggttacctttgggacctggtggtcctggtaatccaggttgtccactcagtccaggttgccctgggtctccaggcaaaccctgataaccttttg

SEQ ID NO: 441805 - DNA, 396 bp, Homo Sapiens
  misc_feature (360)..(360): n is a, c, g, or t
ttttttttgaatattaaaaatttattaacatttcccagaaaggtagtgtcagaattaagccattcgcaaaagacgaatttgccataaacaaacattcacttttgcctgatgacagcaacactgtgatggggtggcactgtgccccacggacaggtccacaactgaacacatggctctatctctccttttgggcttaaagtttagtgttattttattttacaaatatttacagtcattttgtaaaaaggcagtttttagtagcagaaaattcttctgttttatagtatggtatcacagttactagcgtatctccaatgtcaaaccaagataaacagcatcacaagatgtcacaggcttatnccaccttccctttgggccgggggggaaaggtcctgg

SEQ ID NO: 441806 - DNA, 672 bp, Homo Sapiens
aggacctccgggaaaggacaaaaggcccttttaaaagtaggaatggataggctatcggtttcccaatatccctggataaaaggggtaggaggattccagatttcccttggaaaagatctttgccatacaggacgaggaaaattggcaaagccggtaaccaaaaaccagcccaaagggagcattcccgggaattatccatcacaaggcgttggtgcagtggagtatgtataactaaagaggcggtcaataattctcaaggggaacaccacctcttctgtctgaaatctaaaacaatcaatcaagtcatcaaagccacacattaaaatcaatgtgcatttgtctaaataaaaatggctttccttcatttaacaatcacctggcatatatgactgttatctattgcaaaaagcagacagctttattactattgaccctatttaattctctcaagagacaccctaaaggaaatcagagaatggttaccttaatggtaaggtcttcttttcccaagtcatcaataacctctattggtgtaagggaaggctgattttcctggtgttcaactgttgcccgcattgcattcttaaatagttcaaagagcatatgatggaggtgagaaggaacatactcgatgtgaattggttggtctggaaattttccattcacttgtgt

SEQ ID NO: 441807 - DNA, 844 bp, Homo Sapiens
  misc_feature (159)..(159): n is a, c, g, or t
  misc_feature (167)..(167): n is a, c, g, or t
  misc_feature (171)..(171): n is a, c, g, or t
  misc_feature (176)..(176): n is a, c, g, or t
gggggggaactccaaagccccttttcacttgcccgcggtttttcctttggaaaccagttattgagccctttttccctttccttaatggggccccggccccccaaaggaagggttttgaaaagtttttccaggggccgagggcggcccgccaagaatctntcttctcnttcncattntgtggtgtgccaaaatcagaaacttacagtttattgtgaataaaccactcaactttgagcagatgacattgcctcaattaactttttcgttgaagaaaaacaaagatatatggtaaattcatgaaaatactgtgtcctttctcttccaccctttgtagggcagaaaaattctgcctgacctttcccatcttcctgatgatgttaacaaacgacagccactgagggcacaggagggggctctacacaggccaagagctacaggctacagtctgagcacagaaaaccctccagctccagcatccagggccacagctggacacaagtacagaacctggcagccctgcagcccagacaatgcccagggtgtgatttagggtgcagagctgcaactcagatcctgtgccatggcagtatcacaggaaggacttgacggagaggtgaaggctccagacgccaggatatttattccctgtgccaatacagcattcacacctgacctccaggtcctgcagcaggtactctcctcattcacagttagctccccactgttccattctgggttcatttgctatactcctaatctgttctcccaatccaccccacagtctctcccttgctggggacaacacaggaagagacaaaacctgaggaaggaaaaagggaacccc

SEQ ID NO: 441808 - DNA, 1214 bp, Homo Sapiens
  misc_feature (96)..(97): n is a, c, g, or t
  misc_feature (99)..(99): n is a, c, g, or t
  misc_feature (102)..(105): n is a, c, g, or t
cggcgtatggtaataaggttccccggggcgggtaaaaggttatacgtctggttttttgacttacgtacggattggccacgtctctgccacgtgttnntnttnnnnaccagaggaagcagcttttattgatgggttatctccagaaaccagaaagactatatgtactcactttcagttacccccgtgcctccagaatcgcatgttgctccacctgggggcggatataaattacctctagattgtccaaagcccagtctttcccttccctgtgcagccttagaaactaagtagcagtactgtttggtgtgtgtttgtttcttccccagcaatgcctactgcagctacttagtaacaactagaggtggagggtgtccggggaagcagttagatgagttaagtgtgatgcacaggaaaatagtatcgtagcctatcaaaggtccctctgccctgcctcagtggcttgattcttcattggttgcatttctctttgtgttggatgacgcccttctgaatcagatcagggatttccactgccagccatggacccagccccagagccatgagatgagctagtccaaatttgggcacattcctggcccacaaaggtttgaaatgatccgtcaggcatattttgccacccctgtacatctttgctgtctttccatccagctcaggaactgcaatttctggggcagtagtaggatatgtgataggaatgtcaaactcgatgtcaaactcatatttcaggaggtcatggatataccagcattttccaaaccaccgagttccttccttgttggactccagtcggaaccaatcgttgtcagcattcttgttgttctccacataccggataagggactgatattcctccttcagtcgctgcacccacaactcacgatctcggggtccggcgttagtcttcagcaccgggatctcagacacaacacgtcgcgtggcttcatccgccatcttggaccagggcgcaagagaaacgcggaagtggtgttgcctgtagcttacctcaaggcgccgtcatctttactatgggaagatgagacgttgggttgctgtaagacctcttttgaataagatctttgttttcttgtcacctagttacccgcttgtgagtgcatcgagaagaacagaatgtaaacagattactccgtcctatatatgacacctatcattaaaatcaccgcataaggcacccc

SEQ ID NO: 441809 - DNA, 995 bp, Homo Sapiens
cgttcgacaaacagctttatttgaaagacgggggacagccaagtccccctgaccttgcggtcctggcaacgtcggtctcaggcgtaggaggaccagtgtcagcaacccaacgtctcatcttcccatagtaaagatgacggcgccttgaggtaagctacaggcaacaccacttccgcgtttctcttgcgccctggtccaagatggcggatgaagccacgcgacgtgttgtgtctgagatcccggtgctgaagactaacgccggaccccgagatcgtgagttgtgggtgcagcgactgaaggaggaatatcagtcccttatccggtatgtggagaacaacaataatgctgacaacgattggttccgattggagtccaacaaggaaggaactcggtggtttggaaaatgctggtatatccatgacctcctgaaatatgagtttgacatcgagtttgacattcctatcacatatcctactactgccccagaaattgcagttcctgagctggatggaaagacagcaaagatgtacaggggtggcaaaatatgcctgacggatcattttcaaacctttgttggcccaggaatgtgccccaaaatttggactaacctcatcctcatgggcctccttggggctggggttcccatgggctgtggcaagttggaaaatcccctggaatcttggattccaaaaggggcccggtcctttccctaccccgaaaaggaaggaaattgccaaccccaattggaaggaaaattcacaggcccaaccttgaagggcccaggggccaaaaaaagggacacccctttttggaattaggggcttaaccaaaaacctaatttttttcccgtggggcccttccaaccacctttaaactctccatccttaaacttgggcttttccccccgggaaaaacccccctctcccacccttcctaagttgtgtttacccaaaaatttaacccctgcacatatagggccattttcccctgggggg

SEQ ID NO: 441810 - DNA, 456 bp, Homo Sapiens
  misc_feature (413)..(413): n is a, c, g, or t
  misc_feature (427)..(427): n is a, c, g, or t
ggcggatgaagccacgcgagcgtgttgtgtctgagatcccggtgctgaagactaacgccggaccccgagatcgtgagttgtgggtgcagcgactgaaggaggaatatcagtcccttatccggtatgtggagaacaacaagaatgctgacaacgattggttccgactggagtccaacaaggaaggaactcggtggtttggaaaatgctggtatatccatgacctcctgaaatatgagtttgacatcgagtttgacattcctatcacatatcctactactgccccagaaattgcagttcctgagctggatgggaaagacagcaaagatgtacaggggtgggcaaaatatgcctggacggattcattttcaaacctttgtggggccagggattgttgcccaaatttgggattaggntcatcttcatgggntcttggggctgggtccctgggttggcaaa

SEQ ID NO: 441811 - DNA, 1437 bp, Homo Sapiens
  misc_feature (351)..(351): n is a, c, g, or t
  misc_feature (370)..(370): n is a, c, g, or t
  misc_feature (1339)..(1375): n is a, c, g, or t
ataaactattattattttgaaaaaaatgagtaactacatgacaacttcataatgaacatacctaatatctcctatcaaagtgtgtttagccttctgttttttcagtaactcagtgagataattccctactctcttggcatttccttgaaggtcttcattttcaattatatccaggacagccaaaccaacagcacaagatactggatttcctccatacgtattaaaatattccatcccagagctgctgaaggcttctgcaatttctttggttgttaccacacatgccaccgggtggccgttgccccatcggttttccccattgtgacgatgtctggaacaaagtcttcaccnataacatctggaagctccnagaaatgtttcccaactctgccaaagcccacttgaacttcatcagctataaacacaccccctgcaccgtgtacatattctgccactttctggaagtagcctgctggaggaattatttgtccgccacaactctgcatggattcagcaataaaggcagcaatcttccttccactgttatgagcatcttcaatgattttcttcacttcatctgcataagcactggctgagtctgcatggtcttctctatattttcctctgtaagtatctggagttggtgccacatgtacaaattcttttttgacatcttttcctttctgaaacttatatgggctaatctcaattaaggatgataggtgaccatggtaagcatggtcaagagtgatcacatcctggtggcctctgaactgccgagccatgcgtaaggctaagtcgttggcttcggatcctgaatttgtaaaataacaaacagagagtttctctggcagagttgctgaaaggcgtttggcatactcaacaatgttgtcgtggaggaatcgagaatttgtatttagcagttccatctgtttcagggcagctttgaccactcctgggtgacagtgtcccacatgggcaacattgttgatgcagtccaagtactgttcaccgttctcatcaaacatgtactgcctctgggctctcactattttgatgggatccgatgcaaagaaaactttgcatgagggcccgatgtgcttcttcctcagccccagagtgtcccgcttactgtacagctcgcacatggtggcggggtgcagggcgctgcgaaggtgcaaggtgcaaggtctgcgcgcctcctacgcgagcctgggactgccttggcggccccggccggccttcctcccgttatccctcctggcgttctcttgcccggggcgtcggaggtcaccgctccgctctcgacgaattcgagctcggccgatttggcctgatnnnnnnnnnnnnnnnnnnnnnnnnnnnnnnnnnnnnncgccgccaccgcgtgagctccagtcgcccattaaggtaaggttccataatatttttttcccg

SEQ ID NO: 441812 - DNA, 788 bp, Homo Sapiens
ggtcttcttaatttttttaaagattaaaaacaaagaaatcttgttccgggaccctaatgaaaaaaaatttcaaatcttttcagtttgtccatgaccaaagagttgctttaataggaaaaaatctgttcttatccctgtcagatttatggttaatgggtttgcaacggcaaggaggcaaggaatggttctatttctgacagagcagcctgcatctgctttatgctgtctggagggaagtggtctgaggcaggctcacccgtggaagtgctcacgtattctgtattatttttctacactggagctgagattcttctcttcacagccttgcagagtaagtcagtgtctacaagtgtaagaaggagctgtaatcttcatgaggatggttatacttcagtattcttaaagagaacatgaacatttttgagctgtatgttcttagggacaactgtgcttcgatgtggtcagtctcgtcacttgtgagtagctgtgaaatctttagtgtgcatgtgtttgcacctctgtggtctgtcaacgtggctgtcactgaaggagcaagagaccatcttttaggaaccctgccaccaaataataatatatccagggcttagactttggattaatgttaaatgtacatttttttggttcagtacctgaagaagaatacttgaaacttgaatctataaattcctatggaccctttttatattaaacacaccaaattaaaagttgttataggtaaaataagttcagatatagtggtggtattttaatattgctggtgcagattg

SEQ ID NO: 441813 - DNA, 687 bp, Homo Sapiens
  misc_feature (139)..(139): n is a, c, g, or t
ggggcaacacactgtaagcccagactgacaaagcaaaacagagatgttgcctttgttgggtcctggaaatgatgctgctgcttggccaggcaggaggaagttttataatccatcaagcttcccagacagtcaaggccgnaggtcgctcctgtcctgtggtctgaccctcagccaggccatattactggaagaaagatactaagatttgcttgccaataataatttaagtttttaaataaatatttaagtgccatgtttagcatctatttgtcctggcaacacagcacttgttgccccaggacccagcttcttcagcgcatgaagccacagattcagtcaattcggtttccacaaattgtgaacctgtctatctctaacaaatctttctttgaggatctgtgttttaattcagaattgtcctgcgttatgtccttctcgtcaccatctggagttgtcaaaaactgatcagaattgcttgtcacaagtaatggtatgatattttccttttgatgaataggttgtttggtgatggaggcagacaggttttcttctgtggaaaggccttgagagggtttacatttgttctgtgatttactggacggcttgcctggagtgcaggttgcgggaggattcgacagcttctcttccattttggcttccttcacatactggcacgatttcccgtgc

SEQ ID NO: 441814 - DNA, 1880 bp, Homo Sapiens
gcacgggcagtgtgggcccaggcaaccacccccacggccctgatgcctctgccgagggcctcaacccctacggcctcgttgccccccgtttccagcgaaagttcaaggccaagcagctcaccccacggatcctggaagcccaccagaatgtggcccagttgtcgctggcagaggcccagctgcgcttcatccaggcctggcagtccctgcccgacttcggcatctcctatgtcatggtcaggttcaagggcagcaggaaagacgagatcctgggcatcgccaacaaccgactgatccgcatcgacttggccgtgggcgacgtggtcaagacctggcgtttcagcaacatgcgccagtggaatgtcaactgggacatccggcaagtggccatcgagtttgatgaacacatcaatgtggccttcagctgcgtgtctgccagctgccgaattgtacacgagtatatcgggggctacattttcctgtcgacgcgggagcgggcccgtggggaggagctggatggacctcttcctgcagctcaccgggggccatgaggccttctgagggctgtctgattgccccttgcctgctcaccaccctgtcacagccactcccaagcccacacccacaggggctcactgccccacacccgctccaggcaggcacccagctgggcatttcacctgctgtcactgactttgtgcaggccaaggacctggcagggccagacgctgtaccatcacccaggccagggatgggggtgggggtccctgagctcatgtggtgccccctttccttgtctgagtggctgaggctgatacccctgacctatctgcagtcccccagcacacaaggaagaccagatgtagctacaggatgatgaaacatggtttcaaacgagttctttcttgttactttttaaaatttcttttttataaattaatattttattgttggatcctcctcctttctctggagctgtgcttggggctactctgacactctgtctcttcatcaccagccaaggaaaggggctttcgggtagggcgtagctgcagggcctccttgaagtacttgggaaggaggaagccatcagtattccctggagtcagaatcaccccattggcagagcggaagaagggtattccatctgccagagccaggggtccatcgatgaacacagctatttcacaatgggaccgcatgccactgatgataccggggtctccaggcagtcctggggccaggtgaatgtgcgtccttccctggcaggacaggcctttgagtaggatggatggccagtgcttccagaatgtaccatggactagcatcgggggcagggcctgcggtgtctccaggggcatcagctccaacttaggtacctgcagggaatggccctggttggcccggatgagaaggccagtgctgggatcccccagctgcagggcgaaccgctgcttcctattggtgtccaccacgcgctgcacatcttcagcagagaagccgcggaactggggcaactgcaggagggtgcccaggggcacgaagccatcagctcccatgggaagccccagcttcaaggccccatggcgcagggcataggacagagccttggacagctgcacgtctcggtcctgttctcggggtctgggagcccttctacccctggaccctgctgcttcctgcctccctcctccagagaagttcatggttaagacccaaggtcacaccgtcagccaggagcgcagggaggccgagccccgcaccccagatcgctggtgcgccccgcagggtggtccgggaggcagggccgacgtgccgacggaccgggcggaagcgtcggggcggcggggacaaacctccagatcctcgaccgcggcgac

SEQ ID NO: 441815 - DNA, 949 bp, Homo Sapiens
ggaatcccccagcttcaggcggaccgctgctttcctattggtgtcctaccactgcgctgcacatcttcagcagagaagcctcggtactggggcaactgcaggaggttgcccagggcaccgaagccatctgtgggcagccagggtgctcaaggagctaaccttgctctggactgggccagggcttaacaggtatgccacaggctaccgatacaagttcctgggcttggagatcgcttgggcatcctctgtgggacctttagaaagtctcccctttctgggccgcagttttttcaacttacatataaagaggatctgcctcacggaggggcagggaggtgagtgcccagcatagcgctggcccggagtgcacactcacaccaccagctgcaccgtaccctccagggctcgccctcggggtaagtgctgatctggctgcttggctggagggggcggtcaccaggcctggcccagacaagaactctcctcagtctgctgtggacatgacaggggctctaggccttgctctcctctgtgcatggggaggaagtgcactctgtgccttcctcagggagcggtggaggcagccatcagggaggagtcgcagacaggctcacgtttctctctgggctcaagccccagcctccaaggcccctacttaccagctcccatgggaagccccagcttcaaggccccatggcgcagggcataggacagagccttggacagctgcacgtctcggtcctgttctcggggtctgggagcccttctactcgtggaccctgctgcttcctgcctccctcctccagagaagttcatggttaagacccaaggtcacaccgtcagccaggagcgcagggaggccgagccccgcaccccagatcgctggtgcgccccgcagggtggtccgggaggcagggccgacgtgccgacggaccgggcggaagcgtcg

SEQ ID NO: 441816 - DNA, 806 bp, Homo Sapiens
gtctcatttgtttaagtcataagtaattagccctttccaaacaacgctgaaaaataattaataacggattcaaggcccacaatctaagccaatagtgagtaacagtgagagggcatgcctcataaactcttggtgtcagctgtggtgactctcaggtttcacagctcccaagttctaacacagaatacattttactcttcattgtgaagagtcacagtatgttactttccagcagagtgaacagtcacacggcttactgggtaatatatccagcacactccatgacgaatgttatctttatactgccccttgaagatcagtctcccatctgtgtcatattcctgggctggaccgttcagctctccgtctacatacgtgccctggagaactcccccatcttcgtaagtgtaaactccctggccctgcaaggcatcatccacataatacccctccagggtgctgccatcaaagaagaagaacttcccccgtccgttcttttctccgtgaacaaagttcccctcaaatctgtctgtggaggagtaggtgactgtgcagaacccgtgcggtaatccgtcatcgtccaggtgcccttattggtgtcttcccaatcattctggtgagctgattttgcagaggtgggtgaaaatgaaggcagtagttattctactggctttttcttggggtaataaccttccaccgcctcctccaccatctcgtcgtcgctatccatggcggctcgggacactgcccagctcggggctgcgcggctgcctcccgtccctctgggtgctcccggcggctccgct

SEQ ID NO: 441817 - DNA, 627 bp, Homo Sapiens
tccccgtacgcccaaggctgatgggaagggatgggggtctgttgggcatgctaggacccaccagcgtggagagtgctgcaggctccctcaccagcagaggcctctactctgggtttctgccataattctatctccactgctggccttcctgctctgactgtaatgtggtgcagagccatgaaagccagacaactaatggcataaaatgaggccaaatacaccttggctcgataacagacagggagaacaataaagtgcttgggctttggagagtgattttggttggacaggctttctggcttgcttctaggtatgtgactgagagaatggaggcagacggaaaagtctggatggaataggagatagtagctttacttggatcgaaatccccttagactaccagagatttctctgcatccaagaattggtatgaaaagtaattactctggcagaatgcatgaaacacaataaagtaggaatagaagcatgccttcaatcagagaacatttctttagaggggtgactgtgaaagttaaagacttttgaagaaaacacagctcttcccaggctgcagtggatgtctagattcacactgcgttctcagagcacaggaacctccactatgcc

SEQ ID NO: 441818 - DNA, 880 bp, Homo Sapiens
ttttcttctgaaatgtagataactgctttttgacaaagagagccttccctctcccccacccctgtgttcttgggtaggaatgggaaaaggggcaacctacaaagattgttggggcaagggaagtcacaagctttcggatgggcggtggcttttcacaaaacatttagctcatcttattctctctttgtcctctctcccctcctgcccgcccgcaccctggaattgccactcagttcctctgggtgtgcacatatgtttggagaaatagaggagagaaaagagggccacgtaactgagagcttacagtgccaatgccgtttgtgttctggccagagtggagtgcgcagccctgactcccaggcgctgagattgttgcctggttacccaggaagctgctgttccggctgcccagcctttctctgagccagcggatgcacagtccgtggccttcttcaggcttattgatgatgctttttgcaaatgttgaatcatggttctgtttctaagttggatcttttttgttttctccttgccaccctaatttgacatcaaaattctctcttgtgcattgggccctgggtcattcaaacccaggtcacctcattccccttctctgttcacacctaatgtcttgaagagtaggtagcagcagtgtgggctgaacctaggccagcttgcttagcgggtcaccctgctgtgaagtcctggcaggtgttggtaatgtgtggaaatgcagtcagcaagtttgctggggagtttgataaaagtataaaaccaaacaaaaaaagccctcggtataattttgttcccacgactttccttctgtagcttttccacccaaaagggaaaggaatggggcctaccagccagggtagttggc

SEQ ID NO: 441819 - DNA, 968 bp, Homo Sapiens
  misc_feature (402)..(404): n is a, c, g, or t
  misc_feature (406)..(408): n is a, c, g, or t
  misc_feature (412)..(453): n is a, c, g, or t
  misc_feature (459)..(463): n is a, c, g, or t
  misc_feature (476)..(476): n is a, c, g, or t
  misc_feature (496)..(496): n is a, c, g, or t
  misc_feature (517)..(528): n is a, c, g, or t
  misc_feature (544)..(575): n is a, c, g, or t
  misc_feature (599)..(651): n is a, c, g, or t
  misc_feature (882)..(921): n is a, c, g, or t
ggagaggaaactaaaaggactgatttaacccaagatgatttccacttgaaaatcttaaaggatattttatgtgaatttctttctaatatttttcaggcattaacaaaggagacggtggctcagggagtaaaggaaggccagttgagcaaacagaagtgttcctctgcatttcaaaaccttcttcctttctatagccctgtggtggaagattttattaaaatcctacgtgaagttgataaggcgcttgctgatgacttggaaaaaaacttcccaagtttgaaggttcagacttaaaacctgaattggaattacttctgtataagaaataaactttatttttctcactgacagttgaaattgacttattggaaatattaactaaagcccatattagaccataannnannnaaannnnnnnnnnnnnnnnnnnnnnnnnnnnnnnnnnnnnnnnnntttttnnnnnccccccacaccancccaaaaaatacccccccanactccctttcgcccattgtgnnnnnnnnnnnnaacctaacaacaggannnnnnnnnnnnnnnnnnnnnnnnnnnnnnnngggccggcgcccacaagcgttgtnnnnnnnnnnnnnnnnnnnnnnnnnnnnnnnnnnnnnnnnnnnnnnnnnnnnntagaagaaattccactcccgccccctaataaagaagctttcccgggccccatacccagggggggtttttcaaaaaaccccccgctggggtgtttttttgtaaagggccgcgccctcggggccctttcccccccaaggcaaccgcagggggaccctccccacaaaaccatattggcgccccccggcgatggcccctttcttacacggccgctcggtttagtaattttatctnnnnnnnnnnnnnnnnnnnnnnnnnnnnnnnnnnnnnnnnaagggggaattattttgaacccccggaccgggaaaacggggtgggtc

SEQ ID NO: 441820 - DNA, 1331 bp, Homo Sapiens
cagtgagaaaaataaagtttatttcttgtacagaagtaattccaattcaggttttaagtctgaaccttcaaacttgggaagtttttttccaagtcatcagcaagcgccttatcaacttcacgtaggattttaataaaatcttccaccccagggctatagaaaggaagaaggttttgaaatgcagaaggaacacttctgtttgctcacgtggccttcctttactccctgagccaccgtctcctttttctatctttagatactcttgctcagtctgtgaggcatagatggcagacaacactgaaaaaacagaggctagcactgttttctgttcttgaagaatgatgggtggatcatcagactggcagaattcatggcagaccaggtcaaaaagtaaattccaaatgtcttttccagtgtcaggacaatgtacaattgcttgaattccatcatccactgtagtaagcagttgtaaaatgtgcatgtaaacatcaagccattctggattttcagaacgtacttgtttggcagcttcaagtatacagggcacaagccgaaacactggctgctcttcagactcttcctggggttggtccagaggctgagcagccccatttctgacccattctaacattagtttctcatccagatcaaagagcttgtccacaaccttcccccaccttcaccagcaagtcaacatttgttgaacttgacataatgaagcaaatgctatcataaatagctggatgttcctggatcctttcaacccaaacactggccacttctgcctgggaaaggcaagtaagcaacaacctgcttgtttccagcagagtaggtgggtctgaatcatacaaacagtgcaataacacctgcccaagatttttatcactgctgatggacacacatatctcctggaaacaggccatattacctaaaattcccacacagatttctcttaatcgaggacacttggacttggccagtactcccatgaatatatcaggagcattaaattcttggagaaataaagccacgtcctcatccattgacatatcccatactctgcaaatttcattctccatttcttcatcaagctccgtcagctgctcctcatcatctgagctagatttggtgttttcagggctaacaatctggatgagtccgctgaggacgccgaagagccagtgtttgctgtagaccgtgctccctatgcagtctccaccggccacctcctcctcctcctccttgtcgcgacccggcggcggcggcgaggggttgcggtccatgactttgtcgcgtcccgcgcttgaaggccgttgccggaagctccgctt

SEQ ID NO: 441821 - DNA, 219 bp, Homo Sapiens
agtctcaataaaagcaaccttagaaacagaggcttttgagctgaacaagaccctactgctgtcttattcatccattttccaaaccagttttccaaggcaggttttggtagttctgcaaatgttagtgtcaaatttcatttaaaaatattttaaactgtaattttaagatgtatgcttggatgtattgggcagcagcttctaaggtgttgaagattacta

SEQ ID NO: 441822 - DNA, 585 bp, Homo Sapiens
gacacagctttttgcaaaaaggccatagccacttggtaggatgagtcagaagttcctcaaatctcctgacacaactcaggggcatagagaaagggacatgcatacaggcccagcaggggctgtctagccatgacataagaagccagcacatatctttagaggagcgttcagctccgaatcccaacctgcttcacaaacacctggggcaaactccagagatggcatttccactggcaatgacaggaatcgggccaaactccacacatccccctggacactcttgacgttcaatacattcacagaagcttccttgaccactcctgggccctgtgaccctatcaggccaaggagctggttcacagaaagtgaaagattctgacaagcagagtattttccctctgagcaggtgtggttcctcactgaaacaggaatcctctttattccacaagcgagacacagatcaatcagtgccccaggccggagaactgaggccagacctgcttcccaggtgaccccggtgtccacaaaataaatgcccctgtaggatggggatcatccgcctgcctctttgaacacactagtctc

SEQ ID NO: 441823 - DNA, 977 bp, Homo Sapiens
gaggaattctggatattagtgggaagttgaaatgttgcaaactttcaggttggataatggtccaactgtttgctataggactatgatttagaacatgtgctaaatatgttatcagggcaagaatttataaatgcccatccagaatatcatagcgtgtaccgccgtattagaaaaagggaaaaggtcaaagaaacctgcagtcagttccgaagatcaagatcagtcgtatgtggaatctgtgaatccttataagaaatgtttattgttcaagaaagaagcctcctctggtggttgataagcaattctccacggcagagaaagtgctaatgttttgttcttatgtcttgattgatgctttcactacttagttcttcaggttggtctggtgtttagatcctttcagatgggcatgatactgttctattgagtttagggagacactgcagatggtacatctgtaattgcgcctcagacctgtggtctttaatggggtcttctctcctagcaagagttttaacctcttggcgtggattttgccttgataatgggaatcggccaccaccgctgaagtgaatgacatgttgcagagtgtgcagcacttgttcttatccaccatgtcggcatcacttccattttctgaccggagcctcttggcaggacaccctccatccctggggtgaagcatgtaatacagtcggactttgcttgcatgttttcgactctcgtagtgggccacacgctgcgattcggagatcagctgtgcactgcacaccttgcagtaactgtctgtgaataaatcctgatcaatatcggaggacttcatcaggcttttccgcgaggcagaggggccgccggtgcccagaggccagctgccctgccgagcagtagagcgaagctgtgggctggagcacgctgaggattacacgttcctgtctctgcgaccagacctttcggcagctcggaccaactgtgctagc

SEQ ID NO: 441824 - DNA, 2156 bp, Homo Sapiens
  misc_feature (271)..(271): n is a, c, g, or t
tgctcacctgagtattttgctttattcaatctaataaacattttatttatgtaaaagacaaacaatgcatagaataaaaataagtgcttgagacttttgatataaaaagagtatatagcattcacattcctattttaatacatgagtacagctgaagtgttccataaaagaataaaactttccctttatgtatagtagtgaaaaaagtcagtatttttaggaactacagaatgttattccttggtcttttttcttgaataagggaaaaaanacataaacaaaacaagccacagtatcctctgacactacattccagtttatgctgataacccagaagtgagaatactcttgaatcttgaatatctcatgaatggaccagtattctagaaactcaccactagaggtcaatgggcaacagctattgggatggtatcagcatgccctacggtgcaagtggaatttctaggcgcctctatgctactgcagccacactgtctttaactctcagcccacccacactgaggagggtgcctagaggttctatttccaaacctttgcatgtatcttaaaaatctcaataaaatgagaccttccaccatccaaacagagctgatattctcactaccagtccctctctaatattcctatttggctgaaaataagtagcttcaaaaagttttaaaaaagagattacttgcagcattaacacttctttgttgattaacaagtttcctatggagttttaaagctcatactttgttcttgtccttgtggacacaaattttctaactgcaaatgggacctttgtgtcccacattcaaatcctctctagtaatttctgcaaaggttgagaaggctggcatgatggagagaacggtaaccatgaggaaagcttcttggagtaaagcactcctctctccaatgcagagggtaaaactattaacatataagcaaaagaaacttgggctaactgagacccttaaaggagttcccctttagtccaataaaaggccaacttcaaatcttaacaccagataaggtagtcaaaatcatattatatacccagagaatgactgcttgaatggacatttcttacaagggaccttggttaggtgcagatttaattcctagactggggtccaggtaggcagtggaaagagctaatgtttacagtgagaagtgaggcagctttgtaagtgtctccacaccttcacattttgtgaacgtggactggagataactgaaaaccatctgctatccttacctggggatccagattttcctgcaaaatctccaaatatttataaagtggcttcactttttgaaacgctgtgctgaccaaacaaaacatatgtttagagtgcctgaggtcatagtcctgacaatgatagtattgtgtagttgaaatcctcttcatcaggccaaactgtgcttgagcaatcaggagcccagaaagatggaacccattggtgtttgtatagaaaactagaaaatcaagtcaagtgtaatgaaaaagtaaacacgataaagcctagagtgagaatttgctcctttttagaaaaggatgaaggctgggagcagagaatagtaacataagtgcaggggaaagatgaaaaaaagaacaatttttcattagtagatggtggggcaatcgcatggatggggacatctgttctgatttttctgcaacccatgaaggtaaaaagtggggttcaaaacattcaaggtattaaagatggggtagagtttctaaactaggttgagggagagtttctaaactagccccccagatttggggcttggagcttaaatgaaaagtctcaggagaaataagggcacacaggaaccccgggaacactggtcctcaaacagtgccactgtacttagttccatggccagaagagaagtgctaggcagggaatgattattttgcaaaagcaagtgcaatgtggtcatagctggctgtgagacatggagcctctttcctcatgcaaagttcactgttttacagtcagagaaccactgcatgtgtgattgtcaaatgctaatgctgtcatgggtcccttccttctctgcttggttctggagttctcccaataaaaccaatgtgatgggaatatttgagttttctcatttgagaatccggaccggtccag

SEQ ID NO: 441825 - DNA, 670 bp, Homo Sapiens
  misc_feature (656)..(656): n is a, c, g, or t
ttaatcacaattaagtttttattgtatctgctgagatactttccatacacacgtaagcatatacatatatacacacacacacattattgtacacttaatttatgtccttaatacattctgaagcactttccatatcagcacgttgagatctagctcattggtttaaacatctgcatgtttcattttatgattatacaaaaaaatttttcagcagttccctattgatggatatttacatatttttgttttgtctgacatgacaaacattgcaaatgtacatcctttgtctcatgatgaatcatgccttgagtctcactcatatctgatttagatgagactttggactttgactttaaagttgatgctggaacaagttaagactttttaggggctattgggatggaatgaatttattttgcatgtgaggacatgaatctggggagcccaaggtgtggaatgctatgttttgaatgtgttgtctccacaattcatgtgttggcttaatcccaatgcaacagggttgggaggctgagccttctgggagatgattaggtcacatggactcttgcctcatatttgattgagccattatagggtttgcggtagcatgttcagctctccttgcccttccatcttctgccatgggaggacagtangtgcccttcccagt

SEQ ID NO: 441826 - DNA, 876 bp, Homo Sapiens
  misc_feature (648)..(659): n is a, c, g, or t
  misc_feature (662)..(704): n is a, c, g, or t
  misc_feature (847)..(847): n is a, c, g, or t
cgccgtgataaaagccattgttgtaatatttccttcttaatttttagtgaaggaattgcctatttttccctttcctcttgcttctaattttgatgcttctttctggtcccttgaatgctaagagcagcatcttcttttccgcgttcctttctcaggtgcattcgtctcctagtgctctttcattgttagcttgggcctcagtaggttctcctgtggtcagttccccatgatcttgaggctgttgtcatgctgtttccttactgttgctctgctgccttgtaactcctcctgctcatgtctatgaatgtcagttccacctttggtttttgctccaatcccccttcttctataggagttaaatgtggccattaagcttcaatattttttggattcgcaagagtcattttataattttttcatctattttttaatatgatatttgattttctgataggtattatagaaagatgtcatctatatttaaaataaaatttccttctcatgtcgcatacctctcctgcagttggctttgtgcacccagttatcattttaatggaagtactttttccagctccattgtgtcctagtaatccctaatcttcacctggaagatagagtcaccatccatatttgaattttcaaggttgnnnnnnnnnnnncannnnnnnnnnnnnnnnnnnnnnnnnnnnnnnnnnnnnnnnnnntaccgtattcctgcagcccggggctccactgttctagatatcctcctcgcgtgttccatagcgatcatggtggggtcggcatggggagtcgaatgggggtgtgtctgtgtgattcatgtctactctgcactcgctagtgtgtntagtgagtatttatatatgcgcgtgttca

SEQ ID NO: 441827 - DNA, 804 bp, Homo Sapiens
aagctgttcagttgtcatctgtactgcagcatgcactggcatactatagcttggtccagctcttcagaagccccaaccactttccaaattgaatcctaaagtggtgcaggacccaatttaaatccatgtttcttcaactgatctgaaaccgcttttctattttcttcttttccccaaaaagtcatatgcagaggcatggtaaaagcattgtttgcaccaaaaggaactaccccttcaatttgtgccaatttgttgtccatgatataggccaaagcacctgcaagctctttctttaaatggccaacttgatttccattcacattgtttactttaattgcattcttatcataagggttattaggatctcgttgtaatgcaaccatttcattattattaactactcccgtgtaatagcgtagtccaaccacatgacctctcaaacttccaaataaaacggaatctacttcttcatcactagttagaaagtcatctggagggataacatcttggaattcaaaacgtggaaagaaagttggatatgagaggcgtggaaaatttccatgaactccatactggacagtctgcaagtacttccaaactggatccctcttgaacatccaggacatggcgctgagtgggatgacaagaggagcgcctcggctccctggatcgttttcgagccgcctcgatacgcctccttccaggccccgcagccctgaagccggggacaaattccgagcgccggatcaggagcgcacgactgaaaggtaagtcgccgcgagtccagtcagacgtcgccccgct

SEQ ID NO: 441828 - DNA, 457 bp, Homo Sapiens
aacaagtgacatagaagagcatgaatagcagcatctggggaatcctggcatctcccagctgtctgggatatcttgggcaggttacttctgagctgagagcttggaataaaaatagtagtaaagaataaagaaattgaacccagaaaatgccgattataaaatcagccttgcagtattgtgaaagttaaacaaaacacatatttaaatgtgcctgacctgtaactctttattaacaaatgataatattaataattgttatttgtcttgtattatttataaatcagttgataattatttatatggaagcaagtcgatagtaagtttcattaggcagaatatcgggaaagtgtgacaagtgttagcaaatatccagctaaagagattcagattaggaaggaaattggctatagcagaggataaacccggttattggagatagactcgtcccaaattcatg

SEQ ID NO: 441829 - DNA, 1862 bp, Homo Sapiens
  misc_feature (54)..(452): n is a, c, g, or t
gataggggtaatagttcacgtagatgggccatcggcctaataaccggtcgccannnnnnnnnnnnnnnnnnnnnnnnnnnnnnnnnnnnnnnnnnnnnnnnnnnnnnnnnnnnnnnnnnnnnnnnnnnnnnnnnnnnnnnnnnnnnnnnnnnnnnnnnnnnnnnnnnnnnnnnnnnnnnnnnnnnnnnnnnnnnnnnnnnnnnnnnnnnnnnnnnnnnnnnnnnnnnnnnnnnnnnnnnnnnnnnnnnnnnnnnnnnnnnnnnnnnnnnnnnnnnnnnnnnnnnnnnnnnnnnnnnnnnnnnnnnnnnnnnnnnnnnnnnnnnnnnnnnnnnnnnnnnnnnnnnnnnnnnnnnnnnnnnnnnnnnnnnnnnnnnnnnnnnnnnnnnnnnnnnnnnnnnnnnnnnnnnnnnnnnnnnnnnnnnnnnnnnnnnnnnnnnnnnnnnnnnnnnnnnccagttcactctttatttcctcatatcagctttaaacggctctggaggaagcaccgggtttcttggcctgtctattgtgaatcttctccaggtttgctctggaaaggcctggggtggccgcgtcctgtcctgccccatcctccttcactggggcagttccaggacgatcttgcctatgttcttgttggcctccatgtacttatgggcctcctggatttcggtcactgggtagattctgtccagaaccggcagcagacgctgggggccctccgtggagaagtgaggcagaatttgctccgtgaaagcattcaccagcatttgcttgtacttattgtccctagacctcagcaaactggtgatcagacttcctcgcttaaaaagtagctttgaaaacaggggcccattgatgtcacctcctcccatcagaccatagagaacccatcgaccatcaagagccaggcagttgacgttcttctcccagtaggatccgcctatgcagtctagaataagattaactccagcacctttggtgaatttcagcgttgcttcagagaaatcctcttttttgtaattgaatccagcagctgctccaagcttttctgccatttgaagcttcttctgggagccagctgtgaccagaggaatagctccagccatccgggtgagttggatagcagctgtgcccacaccactcagtcctgcatggattagcacatagtctccagcctgaacatttcccacaagatgtaacagctggaaggcggtgagccaggcctctgggatggctgcagcctgggtcagggtcaatccctctgggataggcatgaggagcccttcggggacagtgacgtactgagcctggcccccaccggggagcagagccatggctgtgtccccgatcttccagtgtccctggcagccaggccccagctctgccacatgtccagatgcctcaagtcccaaaatgttgctggctcctggaggtgggtcatactggccttgtctctgcattaagtccgcccggttcagggcgctggccgccaccttcaggaggacttcaccctcccccgggctcggcttggccacctccttcacgtagaggttttccggtcctcccggcttgtcaaagtgcacggctaacatattgttcctggcccggctcccctcccatgcaccaggcggcgccgagtggttctggctcctgcgggtcccggtgacaaagcccgagccccagagccccaggactgcctctgcctccaccggaatggacggctggacttcaaggagaggaaacttccttctctctagggaacgagacccaacctcttggcgggcggattggtccattttccaggcatggccaggcttttggcacatttatgtaacaggctggcatcccgcccatcttga

SEQ ID NO: 441830 - DNA, 844 bp, Homo Sapiens
  misc_feature (134)..(142): n is a, c, g, or t
  misc_feature (366)..(366): n is a, c, g, or t
gagggagctgaaattatttttattggttcgttcagcaatattttttaacttctggggaaaatacatggtattgccattttttaattatcacaaacactgaactcaaaaattaaaggaagttcgttgcaaatgcnnnnnnnnnaaaaacaggacaatttttgagtgccgcccttggccttcaccctgattcctgtgagcaaatgacttcctctgaagcagcctgattttgtgtatcctttcaccaatcaaggatcagggtgtgtgctcgttggttgctgaaacctccctcttcttttttatagctccagcttcggcagtcccaacggcggggagggagacccatcctggtcttcctcccgttcctgnctgaggctcaagaaagaaaaatacccttcagagatggcctctttggcacttggattatttccctcctgatagcacagcggttctctttctagaaaggatgaccctttgtttcttaattacagaattttctttgtataatattgattgaatagctgcctcagtatcttctttagctaaaacctccataaaacaaaggggcttgggctccaaccattcttttgagctcttgagcttgggaagtgtgccagttaccagatcatcactgtctacatttttcattgtggtcacaaataacaatgcccctggaaaaactaaaaatcatcttatttagtattgaacatttcacagtcatctgattttctcttctgtttaataccacctgtgtccttgcacacacgcaaaatggattttgaacactaaccatccagtttccctaacaagaggccttcactacagactccagatgacggcttcagag

SEQ ID NO: 441831 - DNA, 1286 bp, Homo Sapiens
  misc_feature (134)..(142): n is a, c, g, or t
gagggagctgtaattatttttattggttcgttcagcaatatttcttaacttctggggaaaatacatggtattgccatttcttaattatcacagacactgaactcaaaaattaaaggaagttcgttgcagatgcnnnnnnnnnagagacaggacaattcttgagtgccgtccttggccttcaccctgattcctgtgagcagatgacttcctctgaagcagcctgattttgtgtatcctttcaccaatcaaggatcagggtgtgtgctccttggttgctgaaacccatcctggtcttcctcccgttcctggctgaggctcaaggaagaaaaataccctttcagagatggcctctttggcacttggattatttccctcctgatagcacagcgggttctctttttagaaaggatgaccctttgttttttaaaataactgttttttcttcttcctggggattccaaaagataaggagctcttgccaagggtttcaaatcaaaactacagtcattaaaattcactttcacctttaaccttctccttctacaaaattcactttctatgtatcttgtaggcagtttcaggcactcgtttggagttataaagtgccttgaattagaaatttgtgggaatctggaatgcagctgaaccttttcaacttctttgaattcctttattgaatatattttgccttcagaaaattggggtccttcttgctcatataaaagggatcatactcttttggatcataatgttctataaatgcatttccctgtgtgtatgttacatgttttaaaaagccatctaattccccttgcctcctgttttgtgtaatcttcttatgtgagcaaactttttctataattgtcttctgaagaggatctgccacacagtcaacccatcttttatataacatctcctttcttcttgcatgttaagaaggcatgatgttgtaaatacttatctagttccttaattacagaattttctttgtataatattgattgaatagctgcctcagtatcttctttagctaaaaccgtctcccggacgcagcgccgcgcgagcactccgccccctgcgccgcgggttccacagcgagtccgcgcgggcggtgccggggcggcggaggacggcttcaggcccaaaggggattgggcggcggctctaggtggcgggtcttggtttgcggaaggggctggagtcgctgcttctcggtgaccggcgcgtggcccggccaatccagccgccgccacccacccgcaaccgcgtccgttgacggtcgatca

SEQ ID NO: 441832 - DNA, 1152 bp, Homo Sapiens
cgatctgggccagaaggcccggtcgcccggaattcccgaacgagaaaaggggccccgggaaatgggcaaatcgcccgggaacagtcccgacattgcggaactagggtcctgagcctcagcaagtgtgaacagacttcctcgccgtaaaagagccttggaaaacagggcccagggaggtcacctccgcccatcagacccatagagacccatcgcccatcaggagcccagcagtgacgttcttcctccagtaggatccgcctagcagttctagaataagattaactccagcacccacaagagtgtaacagctggaaagcgggtgaccagcctctgggatgctgcagcctggtcagggtcaatccctctgggataggcatgaggagcccttcggggacagtgacgtactgagcctggcccccaccggggagcagagccatggctgtgtccccgatcttccagtgtccctggcagccaggccccagctctgccacatgtccagatgcctcaagtcccaaaatgttgctggctcctggaggtgggtcatactggccttgtctctgcattaagtccgcccggttcagggcgctggccgccaccttcaggaggacttcaccctcccccgggctcggcttggccacctccttcacgtagaggttttccggtcctcccggcttgtcaaagtgcacggctaacatattgttcctggcccggctcccctcccatgcaccaggcggcgccgagtggttctggctcctgcgggtcccggtgacaaagcccgagccccagagccccaggactgcctctgcctccaccggaatggacggctggacctggggtagccggaggggtggggctaagcagaaccaccctccccctctttcctttcctccttccccctttaaaacgcaaagttagaagcaagcaaatcagattttcttgtccttttagcctctggaaaagagtctttctctcagcttgacagaaagtgcgattctagctctcacttcaaggagaggaaacttccttctctctagggaacgagacccaacctcttggcgggcggattggtccattttccaggcatggccaggcttttggcacatttatgtaacaggctggcatcccgcccatcttgagcatgggtgggcaagc

SEQ ID NO: 441833 - DNA, 2529 bp, Homo Sapiens
  misc_feature (67)..(78): n is a, c, g, or t
  misc_feature (2110)..(2110): n is a, c, g, or t
ccgtgggcaaacatgaagacgtacgagcgggggagaacatgtcggggaggggtaaatacaatagacnnnnnnnnnnnntaaagagcgggtagatggaagaggggaacaacgaaacacggagagagaggtgcctatagccagagtggcaggacactgagcacgaacaagttcttcgtagggagtgtaggtaggggataaaaggggggaaaagggcgctggggggaattagaacatgtgagggtgagagcgggagggaaataggccggtagggaccgggactaggtgggggaaggggagagggtacggcatgggggtgcccagacagaaagcgaaaggcgcgcgggggaaaagaagagaggggggggcggaagtaagggaatggggcgcttgtcgcgggacagtaaggggaatgctgtaaaggttggaggggcggggcgatatacataacaacacgggggaaaaatgggatggaggggcaggaagcggtcagggtgccggagcgaggggacggggcaatggcggactcggaggtgggggcatgggagggcagcctcctttataagcgggcgagatgctctttgaaagaatcccccggtccgttggaagggattcgcacgtccccttccaaggcagcccattccagccagtgtggcagcttcagcctggcctctcggagtcccatttgcgacacttttctgactttggtggcctcgagtgggaagaactgcaactttctggccacagaaacacaggctgagctgcttagagaaggcagggaggggctttcggtcatactgcgcgagtcttcgagctctgagcggctcgaagtcctccccgaggcacgggtgcgacggggatgtcgtaggcgtccgcacccgctctcgctcatcgcgcccactcccggcccttcctcccacccactaggccgggcgcctgcggcctccacgccagccccgggccgggggcctcccgcgcaggcgcgtcgtgcgcggggaccgcccggcctggcggggaggtcgccggccgcgacaggcacctctctgccctcccaaggccagcaggcccgcggccgtcctgctacacactcgggcccggcccgacgaccccggagccgtccgactgcggctggaagggagccacgcccgcgtcttgcgggaacgcgcgaatgttggcgcccaccgtctccctggacgcagcgccgcgcgatgcacgttccgcccccgtgctgccgcggggttccacagcgagtccgcgcgggcgtgtgccggtggcggcggaggacggcttcaggcccaaaggggattgggcggcggctctaggtggcgggtcttggtttgcggaaggggctggagtcgctgcttctcggtgaccggcgcgtggcccggccaatcctgccgccgccacccacccgcaaccgcgtccgttgacggtcgggtccttggtcgccgggtccttgcgggcaccacagagcggggtggcgtccgctccctcgagtcctcggtgccagggaattcaccgctcaccaccccctgccccgccttgggtcctgctcggggaccaaaccactggaaggcagtggcgggaaacgggcgcctgtgccggagagttgagggaacatgagccatttgcagagcttattgttagacaccctcttgggaaccaagcatgtggacagtgcagccctcatcaaaatccaggagcggagcttgtgtgtagcatcaccaggtttcaatgtaacgcccagtgatgtccgaacactggtgaatggatttgccaagaaccctttgcaagcccgaagagaaggactgtatttcaagggaaaagattacagatgtgtccgggcagatgaatattctctttatgccaaaaatgagaacactggtgtggttgtcgtgaagacccatctgtatcttctggtagcaacttacactgagggcatgtatcctagcatctgtgtggaagccacagagagcctgggagactacctaagaaaaaaaggaagttaagtcatcagaggcccatgaaagacaattttattattttagaagaaaattgaagagcctaaagaaaaatattttatggttgaaaaacactagacagaaagcactanaaaagaagaatgaattaagggagcaatttttattacctccagagatcctcttctttcactggaattacttgatcaactggttttttataaagtgtttgggcctcgggcatgggattgaagagaacacctgatcattttcaccggagcattttctatttggggaaggctcccttttctgtggaaggctccttggacttcttacaccacctctggttaaagtatggcccaagaaatggcaagggctctcccccacctcttttttatccaagaacaatttttttccacagggttatagggttggccaacacaaagaacaccctcttgtgaaaaaattgtaaagggggaatgggtctctcccccctcttccgggggcacccaaaagagggcccaccgcgctttgggctcttatacagggggga

SEQ ID NO: 441834 - DNA, 587 bp, Homo Sapiens
  misc_feature (543)..(543): n is a, c, g, or t
agagcaggcatgttgccccaaatacctgtgttttccttgtttgcagcagagtgtatgtcacatagtagaagttaaagccaaagaaacgattgaattaatgaatgtctctgtgggttattcttaggagtaatttaaacttatgaagtttaagttttggaaaattttagaacaagaaagctttaggataatatatttgtcttttctaccactgtttactaggaactagataagtatttacaacatcatgccttcttaaatgcaagaagaaaggagatgttatataaaagatgggttgactgtgtggcagatcctcttcagaagaaaattatagaaaaagtttgctcacataagaagattaaaaaaaggaggcaaggggaattagatggctttttaaaacatgtaaataaaaaggtactaagagatcatttgatgcttttttcagttgatttagacctaatgtcatctttgttcatttataatcattcagtcagtctgtccctgtcccctctacatatgtatcatctataccccctggtggaaaanggggggttaaacctgcccggcgccgctcgagggggatcctctag

SEQ ID NO: 441835 - DNA, 1012 bp, Homo Sapiens
  misc_feature (928)..(964): n is a, c, g, or t
ggctgttgagcgccagcggctaataggtttcatcccttgccatattctggtccggcactattgttttagggcgttttttaaaaaatagttttggcttttccaccacaggaagaggtggaagttttttaagctcctgtaagacggtggtcgcagcgcgcttcttggagagttttttgctatttccttctccttctgcagagaactctcctactgacactcgagtaacaaagcttgtcatatgtggtggtccactttctttaataacctcaaaactgacaggcatatttcgcttcagagcaatttcaaacactaagctgatctcagacttatttgcatctttgtcatcatccatatcctttcctgattcaccattctgaggagatctttctggaataggttcattctgcagtgcttggagggctttcattgcagcattgtgtctagcagcttgtcgagtctttccttccccaaaaaattcattatttcctacagtgagctgaacataaaagatcttaggcactgggcaatgatacctctgattgtacatgccccgaaagttgtaattagctctataatttgggaatggctttggatctaatggcctgtagatggcaggctctccccttttcatagcaagcccattcagttccacagttggagttatactgcctgggttattgttaacattacttttgggtggcttctgaactggtttgggaagcgtagattcagtcaaagctttattggcaacagcctgctgagccttctttatactgctgccttcggattcccatgtctgctcaccaagactcagctgcactgagaacatcttcttgccggggacactttgcagacggctccaacattggcaaacactacagagaactccgctctcgacgaattcgagctcggccgatttggcctgatnnnnnnnnnnnnnnnnnnnnnnnnnnnnnnnnnnnnncgccgccaccgcgatgagctccgattcgcccatagtagtcgatcatgt

SEQ ID NO: 441836 - DNA, 466 bp, Homo Sapiens
cagagcagaaaaatgcatatagcaaatcggcatacatgtaaaattgctacatcttaagacttgtttgagctcccttttgacatggtcaaagagggttcggtttgttttttaatcattgttatcgtttattaaacagcagggccacattcaaacgctttccaattctctctaaataacagcctaacgctgacgtttttgttggcctgtatctcataattatttttatttagaggaatttggtagtggcggggttggggtgggaggtggtgtgtggacggtgtgaattgacagaaacaatttccctacaccaaaatacaggtatgttttcattctctatgcccctaaacaccctccctgcagctatgcaacgagcaattcacgggaagaggcttctttacatagacccctgtttttggtgttttgatttacttttgtgtatagagttggtgccgaattcctgcagccc

SEQ ID NO: 441837 - DNA, 789 bp, Homo Sapiens
  misc_feature (450)..(597): n is a, c, g, or t
aaaacccaaattattgcgatgaccggaatcccgggcgaggacggccgcgctcccggttcccttggtccaaatttgtgaatttcgctaacacgaaaagttaaacaagacacagaggagaaactgcacttaagggtttctaacgaattacctttactagcaagaataaaactgcaagaaaattaaacgtaaaaatgtcagtcctaaatcatgcacgagtttcagaatatttgaatatttccttttggggcccaccgctgccaaggtggccgcagtttcgggtttcgccggacagggctcactaaaacgtgcctacgccccagggatggacgacttggagacaggggccgggaagcctttgtctcaggtcaccctgcgccaggtttgtcgcctaagtttatgggatggacgggagacaacatttgtaagtttagagttttgggaacgttgttnnnnnnnnnnnnnnnnnnnnnnnnnnnnnnnnnnnnnnnnnnnnnnnnnnnnnnnnnnnnnnnnnnnnnnnnnnnnnnnnnnnnnnnnnnnnnnnnnnnnnnnnnnnnnnnnnnnnnnnnnnnnnnnnnnnnnnnnnnnnnnnnnnnngcctcgctacgacaggggttccgctaccacgcgttggtcgagtgcgggtgcggaactgggatgtccgagcctcctctaccagcccatccgcaaatgttccctgcgaggtctggagaaacccggtgtccccgcgggctgggctggattcgtggcgggtacctagggtcgagctgtcaagttcaatctcaagcc

SEQ ID NO: 441838 - DNA, 824 bp, Homo Sapiens
ttaaggcaagtggaactttgaacatttattacacgtttaataatatttcaaaattattgataattcttttggatgtgataagctttgtaattatcttttaatgagctctcatcttggagagatacattctgaaatatttacagaagaaataatccgatgcctgagatcagcttcaaaagaactcaggatggggcagggacgggttgtaggtagtcggtagtcagggtactgggtacacggatgttctttgtactgttctttggtctgttgcgcaggttcgaaatgcttcctaattaaaaagcctaaaaagggacttggcaagctcccatccagacttcaaccccacaatatggagagcactcaggtccgaggcgttcctgctccccagctccctgcaaaaatagcgccaggcaaggtccgaggcgagggcgatgcttccatgagggtcccgccgactgcgtcgcgatcctcaatggctcagcgacttgcggcccttgagcattcggcgaaggatgacctgcacgccggccggcgtgctcaggcgccggacccagccgtgcttgttcttgcgtttgatgttgctcggctgatactcattcccgcgagccttgccccgggcctgctgcggggtggggaggccccaggcgtctgggaaccccagccaggcccggggctggagccacctgccacccagcaacgctgccgacctactcgtggggcccaacagggatccagccaagacagccatatccgcagtgggtcccgcagtaccggctgcgggcgattccggagcccagagccgctccagccctggaacaaagccc

SEQ ID NO: 441839 - DNA, 1003 bp, Homo Sapiens
aagctaaaacatataatgaaagatggaacttaacattgtggaagtcctaataatttttttgaaatattagaaattaggttatccctcttgttcctagtcatctaaaaataagtcttagaaaatgataccattgtcttttcaccatgtacataataggttctttctttctttcattaagaactctatgaggatcatagagtcttggagctcaaagaaatcttatagatcatttacttcaaactgtctttccacatatgtgggagttgagactcagtaaatgaaaagtgttaacccagtaccgcagaacgaattgggagtggatccagccttagaattcaaacctcaggcttcccagcccagtcatgtttccatagaagatacttccaacattaatcataacttggctttgaagagaatatctggccctgcatttgaattacactcaggcagacaaaaattctgaattataaccaagactttagattgccagctgggtaagattcagcaagacacccaattgccatttagatggtaagagatgtaaaagaggccaagaaggctcatgcttgcactttcgtcattatcaatgggttggcatagctcacaagtggccaattctattctctagcagaattaaactttgcaggttcactgggtaatacaattgctaatttggtttgataaacaaaatacaaagtaaatgatataaaactattttaaaagagtatcccatgaaattcaatgtagctaatctaatccaagctgctgtctgccctcagtgagcagtttgtagttttcatgattggatgaaaactcactaggagtagaggagagtgggctctgcagtcctagtcttcattctgcctattactcgctatttaaccttggtcaggccactaatatgtttttgcctcatcattgtaaagacgaaaggagttagacatggaagctttgaagcaattcctggcacatattaagatcccaataactgtaaagcgtgccg

SEQ ID NO: 441840 - DNA, 1093 bp, Homo Sapiens
cactttaaatagacactttattagatccacaggcgataaaatcccagagctactgttaggcacgtaaatatagaccctgctaaatatttaatattatcaagcttgtgtgactcaagcatggttttgaggccagcaacctcagtttcgatcttcctgtctgtctgggtaagggcccgatcttgctgggcatgcaatgccactatttctgttctcaattccagcagcttcttttcgttcaatgaatacaattcttttactctgctcttttctaggttgaagtctaatttggtatctgttcggactttgatcacttcatccattacttgttgttttaactgatgtagttcgagttttattttctcattttctgctctgagggctgaaaattcactcttctccaaaataatcatatcctttttcacattcgcaatctgagacattacttgctgaaaagtgatttcctgctgcatcttggtgaccatatctttgtagacgatgtccatgttggcctccaggatcttgaccaatgcagacacaatgatttctgcttgttgagtagcaaacccattgtcttccagtaagcacactaaggcatgagtgtcgaagtagagtttcctgctcccagaagaggtgaaatctctccttttgcgctccagctgcagggatccagcagacaagcttagctctctcctgcaggaaacgagtgcaggcgccgggccgtggtactggggaagggcgccggcggcagcggcgacgcccggtgagcacctccacgcgccgctgcgcccggccgggggtgcggcatacccgaggcgcgagcgctcccagtccccgagctgccggcgcggggctgcggcggccaagcgcggggagggcactagcaggaggaggagcagcggtgaggcacgtgacacgccgccgcgggccgccggggcgcgagggcgcagcgcccccagaccgtcggagagcgcagagaggcagcggcgtgctgaggtttcgctgccgcccggtcttccgctgaggcccacgggcaagaagagaagccgctggcggccgggcaggcgctgggtcctatggccgccgaccgagccgc

SEQ ID NO: 441841 - DNA, 813 bp, Homo Sapiens
  misc_feature (30)..(30): n is a, c, g, or t
  misc_feature (53)..(53): n is a, c, g, or t
  misc_feature (75)..(75): n is a, c, g, or t
  misc_feature (145)..(162): n is a, c, g, or t
agtacattaaaggaaaattgccacccaggnttgaagcgcaggaaccccagtgngcaggaagggttgcacttaccnttggtccctgcttcattcttgtaagattataaaactgggcccaagctcttaaataaattataattgaccnnnnnnnnnnnnnnnnnnctcgagactagttcctcgtgcggatttcgcacgagcaaaggtggcaaacatatttattgcctcactgtaaatagagaaaatcttgtcttctctcgaccagatgcccaaaaggttataaaagaagtataacttagctccaatttgaggatatgtactaaaaattttaaacgtcaccttggtgtttttttcaagactaagtgtgataccacgtaaggcatttccatgtcataaattaattctaccatatttttatgtaaaaaatgctgcacgttgttgtgtctgcagctgtgctgtgattatgagacagatacaatgattcacactggctggaagctaagtctcacgtcccagggatcagggcagtccagcccggtgctgccacaaagggtggtggtatcaggtcacacctaggacctgccactttagactgaccttgtttgatccacggttgtgaccatgtattaccacaaatttaacaataaaaaattgttttaagagtatctgagaaaggactaagcagtcattcccattttgtgtccttcccttgttttaaaataagcaacgtcctatacttccatcatttaagatcatcaagctgacttgttcagtctgggcccatgtcatccttccagaacaagcacatcctaggat

SEQ ID NO: 441842 - DNA, 352 bp, Homo Sapiens
  misc_feature (272)..(309): n is a, c, g, or t
gcacgaggttcactagaggttaccggcgtgggaattgttccatttcctgaagtgcatctgaacatgggcagccagaaggaggtctctcgctaatcagcccctagaaaccaacaagggccaaccaggttccttggggtcatgtcctctcttcccatgagggacagccccagacggaacatggtcctcgctgggatggccttggctcactgagtcttcccccacccccgcctgcctctgcccagccaagatataacaatacgttttaaaatagnnnnnnnnnnnnnnnnnnnnnnnnnnnnnnnnnnnnnnaccacagcactctagcctaagcaacagagcaagactccatctc

SEQ ID NO: 441843 - DNA, 612 bp, Homo Sapiens
  misc_feature (421)..(421): n is a, c, g, or t
  misc_feature (488)..(488): n is a, c, g, or t
  misc_feature (504)..(504): n is a, c, g, or t
  misc_feature (588)..(588): n is a, c, g, or t
  misc_feature (597)..(597): n is a, c, g, or t
gcacgagggttattgttatattcagtaagtcacaattctctttgatggctagagcagggaagccatgagtgttctctgaaccacatcattgtttaaacttaaaagatagtgggctattaaacttatattctgaaataattgtactctcacaagaacttggaaaaatagtacagagaggtctcatgcatccatcacccacatgcctcaccagtgacatcttacgtaactatggtccattatcaaaaccaggaaactgaccttgtgtgcccactgtcttttatgtccctagttttcctaatgactaatgatttcatttaagatctctcatttctgtttctcttggaaagagaataaaataccacatgagtctctagtcactacctgcccataactgtttaacttacttcacaaaggtacatanatgacgattatattgatacatctttcaatataagcatatatacctatactggagatttaatgtgtantctaccaacatataancaatatatatctgacatatccttccccataaagaatgctaccctttgttaattggattggtagatacagttatcatcgtgtcangacacccangatgttatagatggt

SEQ ID NO: 441844 - DNA, 604 bp, Homo Sapiens
accaaaaagatctgacatggtatttggggcctttatgtaaactgaatataagctgcgtgatatttgaaaggttttgatattttgaatagacattttcatgatacacagacacagataaaagatgtaagtagacagtttgaggtttcagagtccctcctgcagtgtgtttagcagcgggtacaagataaatatccaagcaaaatcagattaagggattaacagaagtgactttgctatgagttggtgagtggggtcaatgggtggcttgaaagggattttagagttctgtttttatttttcctactttacatcagtgcattttgggcaaaataaaatgagtaatgtttacttttaggcctcagtaatataaaaaaaggcagattctaaggattgtggaaggtcatgtttttgaaagtgaaaggtaattcagctccggttattaggagaaactctgtctccatttttactttaaaaaagcttggatttttttccccttgaaagaccccatcaaagatagttgaagaatgaggagagaaggatcatgtttaagatccatgtaatcatacattaagagggaacacatgggcagggtgtggtggctcat

SEQ ID NO: 441845 - DNA, 1131 bp, Homo Sapiens
  misc_feature (200)..(200): n is a, c, g, or t
  misc_feature (223)..(223): n is a, c, g, or t
  misc_feature (915)..(936): n is a, c, g, or t
ttccccacgggttcaagaaggtttcatgggtgctgggccccccgtggcttcggattggaaggcagtaggcttgataaggaagggaaacccctcttccctttttggggacagtgatgtacttgtagtccctggtgaggcctgtagccaggatcggcagtaaaacctccacccccagttcccgtgttgtagcgctcacaggnccgcgggtggcagacgaaatctnccgtgactcaccattggaggtagtggacagacttccagagcaaaggcaccgggttgggctggacgaccagataaggttttgtaagcactcaagatacgcagacccatcaagttaaaatccgggaaagcagcgataggagatcacagtccccaccgggaaggaggtctggagctcagagatgtttacatagccattagaagaggctagaggtctcaggcagccttgacagatgggcagattattccacgttccatcatcgcgacataatgaaaccatattgtgtaggtcggggtaccggatcttgaatccttcatgacaagtgatgattagcttctctccatgtctatatgtcttgttatgaatctcagcatcttcgatttgagggatacggcaatcttcttgcacacagatggaattatcacttgggatccagcctagggttccattaaaatgcttcaaacacagtctctttgtagcgcccttcagcttgaatccgtcttggcagtgaaatcgggctacagagccttcaaagaaaacccctccgctgggggtcctgaagccattctcgggaatgccggggtcagcacacacttgaaggtcatcgaacccgcccgtgagctgtgcagggccgaagcacagcgccagctgaaaccacaggatcacggccaagagtctctggggggactgaggtnnnnnnnnnnnnnnnnnnnnnnctagaaatccatctccattgctcgggttcattccatgatacatctttcatccacagagggcatccagcttgcaagagtctgtgggtctcatgcatgcagcttccttccctcctccgcctcctccccccgccagtctaacccgcatctgtgcgcgacctctgctgccgccgctgcgcgagcgagccgagacccgct

SEQ ID NO: 441846 - DNA, 519 bp, Homo Sapiens
aggggcttcaggcaaaggtgagcttgtggttctgaaacttttattctcccctactgcccaagtctgtccactacctccaatggtgagtcacggagatttcgtctgccacccgcggccttgtgagcgctacaaccacggaactttggtggagttttactgcgatcctggctacagcctcaccagcgactacaagtacatcacctgccagtatggagagtggtttccttcttatcaagtctactgcatcaaatcagagcatacttggcccagctactccatgagaccctcctgaccacgtggaagattgtggcgttcacggcatccagtgtgctgtctggtgctgctgctcgtcatcctggccaggatgttccagaccaagttcaaggcccactttccccccagggggcctccccggagttccagcagtgaccctgcctttgtggtggtagacggcgtgcccgtcatgctcccgagcctccttcccggtggggactgtgatctcctatcgctgctttcccg

SEQ ID NO: 441847 - DNA, 1282 bp, Homo Sapiens
ctaagaaataaacttgcatataacccgaacgtaacaactctggtattacatcaatacagctataacattaatgcagcaattatataacacaaaagtgctataatgacatgggaaatgttcatgaactgtgaggtgaaaagatacagaaaatgactatgcctactgatactacctttgaaaaaggatccataaaaaatacattgaatataagttggctaaagaaaatattaactgcggtactttcttacagattatggctatcttcttccatataacttcaatatgtactaaaattcacatgcatttattttataatcagaatgtcattataattaaatgttatgctgtgccatttcatcagtttatcagatcttcttatagtcaatgtcacattaaattagaatctgagtaactaatgtttaaaaatagctgatatatttgaattttaggctaaaaacctcatatttttatttgtaaaatgttctcagtgttagctttattgataaataaccgataaccaacctaatattttatgatttttaaattatttttaagcacaaaatagacccatgttggggatgaataacatgtctgattttgttaattttgtctgctacttttccctatatttccttgtttccttcatcctaaattttttaaaaatgaaaactttaatcattgttgcatgtttaaactattgaatattttcttttgttaactgaagtaaaaggaaacattcttgtagaattatggaaactaataatgtagtaggacttaaaattgaatgttaggaggttcttcgttttaagggtcttcctgtgggagaagtttccattgaactgttgtatcaattttatcatcaacatttcccagctcctgctctttacagagttctaagaatacctgctccaaggtagcctgagagaggctgtattcctccaggttgaaggtctgtttcattgcctttaacttgaaaaaggcctgagatagagggtggacatcctccacaggtaacttatacgccattaaagaggaatatctttcctgccaagcagcctgtgggaaaagcttcaaaatctcggtgtggagagcttccaccggggtaggttctttcatttttatttctagtaaataatctctagcgaacttgtttttcagatgtggaatggaaccaatacaccttagcgttcctgacaccatcatggccatacggtcacacacagcctcaggctctgacatgtaatgggtggtcaagagggtgccctctccgtgttttaacggt

SEQ ID NO: 441848 - DNA, 1205 bp, Homo Sapiens
  misc_feature (53)..(63): n is a, c, g, or t
  misc_feature (315)..(315): n is a, c, g, or t
gaaggggtgtaaaaagttctccgggagggaagttttcccccaacattatgttnnnnnnnnnnngaaaaattaagggtttctttcaccaaaaagtttccccaaggtagggcagttttttcacacgctccggggcgttggttaaaaaagggaggggccaaggtcccttaggcttaataattacggacctcccttaatagggggacccccctttgtcccaagaaaaggcggggttaggcggtaaagttttggggcccccttgaaggggatacctttagaagcgggccggcccctttgtttcctgttcccatgtccttntaggaaagtcccatatttttattttctgttagggggcatatttttcagttcaattataaattaaaagggcctgccttgtacacccaaatcccaggtcccttgggtggttcagtcaaagaggtaagacctccagctggctcacaagagaagcgtccactccttggccctggttttgggattttgccagccttgagctcatcaataatttcttcaatatccttagctgtcaaatcctcatagtaattgtcatttatttgaaccattggtgcgttcacacaggcccctaaacattccacttctataagagtgaaaagtttgtcaggtgtagtctccccaacctttattccaagctttttctgaatggcctccagtatgctgtcagagtttcgaagcatgcagggtgtagtagtgcagacctgaatgtgatactttccaactggctttcgattatacattgtataaaaagttgctacttcatatactctcattggaggtacttgtaaaacttctgcaaccttgttcatagcagagatgggcaaccacccattctgcctttgggctaaatccaggactggaagaacagctgctgctttatggccttctggatagttttttacaattgcctctatcctcttatagttttctggtgtgaaatcaaatggagtatcagggttattctcaggagtatctctgtgcacaaataaagctcctccagctccattttgcatagctgtcttatgcaaattccttacatgtcttccccagtgggcggtgaggccagccgcccgggcccggagcgccgcggagaagaacatggcgggccacactgttcaccttccccagccgcgccaggcgagaatcccgagcgcgcccagggcgcacagcccgct

SEQ ID NO: 441849 - DNA, 845 bp, Homo Sapiens
  misc_feature (182)..(187): n is a, c, g, or t
  misc_feature (189)..(189): n is a, c, g, or t
cgtttttttatggggggggattcccaacccttatgtcctggccccgggttttccttagggaaccaggttagggccattttcccttttccctttcgggggcccgggggcccaaaggaatggttttagaaactttttggaggggcggaggcgggcccacaagggtggtttgtgggggggcgtgnnnnnntnggaagattggaagtccatattttatttctctagtgacatatttacagttcaatataaattaaaggcctgcttgtacaccaaatccaggtcccttgggtggttcagtcaaagaggtaagacctccagctggctcacaagagaagcgtccactccttggccctggttttgggattttgccagccttgagctcatcaataatttcttcaatatccttagctgtcaaatcctcatagtaattgtcatttatttgaaccattggtgcgttcacacaggcccctaaacattccacttctataagagtgaaaagtttgtcaggtgtagtctccccaacctttattccaagctttttctgaatggtctccagtatgctgtcagagtttcgaagcatgcagggtgtagtagtgcagacctgaatgtgatactttccaactggctttcgattatacattgtataaaaagttgctacttcatatactctcattggaggtacttgtaaaacttctgcaaccttgttcatagcagagatgggcaaccacccattctgcctttgggctaaatccaggactggaagaacagctgctgctttatggccttctggatagttttttacaattgcctctatcctcttatagttttctggtgtgaaatcaaatgga

SEQ ID NO: 441850 - DNA, 797 bp, Homo Sapiens
  misc_feature (65)..(66): n is a, c, g, or t
ccagggtcccctggggcggttttcagtcaaaggagggtaagaccctcccagctgggttcaacaanngagaaggcgtccactcccttggcccctggttttgggattttgcccagccttgagctcatcaataatttcttcaatatccttagctgtcaaatcctcatagtaattgtcatttatttgaacccattggtgcgttcacacaggcccctaaacattccacttctataagagtgaaaagtttgtcaggtgtagtctccccaacctttattccaagctttttctgaatggcctccagtatgctgtcagagtttcgaagcatgcagggtgtagtagtgcagacctgaatgtgatactttccaactggctttcgattatacattgtataaaaagttgctacttcatatactctcattggaggtacttgtaaaacttctgcaaccttgttcatagcagagatgggcaaccacccattctgcctttgggctaaatccaggactggaagaacagctgctgctttatggccttctggatagttttttacaattgcctctatcctcttatagttttctggtgtgaaatcaaatggagtatcagggttattctcaggagtatctctgtgcacaaataaagctcctccagctccattttgcatagctgtcttatgcaaattccttacatgtcttccccagtgggcggtgaggccagccgcccgggcccggagcgccgcggagaagaacatggcgggccacactgttcaccttccccagccgcgccaggcgagaatcccgagcccc

SEQ ID NO: 441851 - DNA, 880 bp, Homo Sapiens
tttttttctttagggacaattattccagtttccatattaaaattaaaggccctgtttgtaccccaaattccaggttcccttgggggggttcagtcaaaggagggtaagacctccaggttggctcacaagagaaggcgtccactccctggcccctgttttgggatttttgccagccttgagctcatcaataatttcttcaatatccttagctgtcaaatcctcatagtaattgtcatttatttgaaccattggtgcgttcacacaggcccctaaacattccacttctataagagtgaaaagtttgtcaggtgtagtctccccaacctttattccaagctttttctgaatggcctccagtatgctgtcagagtttcgaagcatgcagggtgtagtagtgcagacctgaatgtgatactttccaactggctttcgattatacattgtataaaaagttgctacttcatatactctcattggaggtacttgtaaaacttctgcaaccttgttcatagcagagatgggcaaccacccattctgcctttgggctaaatccaggactggaagaacagctgctgctttatggccttctggatagttttttacaattgcctctatcctcttatagttttctggtgtgaaatcaaatggagtatcagggttattctcaggagtatctctgtgcacaaataaagctcctccagctccattttgcatagctgtcttatgcaaattccttacatgtcttccccagtgggcggtgaggccagccgcccgggcccggagcgccgcggagaagaacatggcgggccacactgttcaccttccccagccgcgccaggcgagaatcccgagcgcgcccagggcgcacagcgtgcccgct

SEQ ID NO: 441852 - DNA, 360 bp, Homo Sapiens
  misc_feature (52)..(112): n is a, c, g, or t
  misc_feature (316)..(316): n is a, c, g, or t
  misc_feature (321)..(321): n is a, c, g, or t
  misc_feature (326)..(326): n is a, c, g, or t
atcagagacaggggcctctttgttgcccaggttagtactgaactcctggttnnnnnnnnnnnnnnnnnnnnnnnnnnnnnnnnnnnnnnnnnnnnnnnnnnnnnnnnnnnnncagcctgttcatttttgtatccctaatgtgacagtttgaaatgtctaccaattctgatattcttcccttcaaaacacagaacctcattctcctccctctgcacgtgggctgggcctggggggcttgcttttgataaacaggctgtggcggaagtgatcacgtgagacttctcagggtggctcatagaagcactgtgggcttgcnccttnctttncccttgggttcacctgttttggggaaggcagagg

SEQ ID NO: 441853 - DNA, 1250 bp, Homo Sapiens
  misc_feature (974)..(1063): n is a, c, g, or t
tcatatttttgtgttaaatagaaggctaaagggttagatttaagtttctgctacatgatcctattacgtttacatgattctctgtggctgaaacaaagttctaatcaaaactacttttgctgaagaaaaaattcagcctccatttgggtgtatttttaagcagttattcacagttatcacaaattgtaagcacaaaaaaacctgactgaagaagtagggatgcaacaatataatatgaaaaaattagtttaaattaccaaaacagctataaaagttgtagtcgtagcatacgccccgctctgtcagaagtaaggtgtataaaaccattgagtactaatagactgcggtttccaaaaaacccccaacactctaggttgaaattttggttattacataattataatggcatattttataacacaaaattatattgtaacatccctatgaacattttataagcccccgagctgctgcagagcctggtagcatttggtcaataactatttttatactgtattttttctcaaaatatttacatatctgtacaaagtaacagggtttgttagttctgcaggtaacagcagcagcttggctttcttctaactttatttaaaaatagcttcattcacttattcaataataaatacaaaagtttctcttattttacagaaatcaaaaactacaataaactgactcatggaatcaagtatttaaatgtatttagtgcaagttattatcccttagctctatccctaaggaagtcatttcagtacattccttgttcagtggtgtctactttatttaaaaacattttgaagttagagggcctgcccctttttaataaggccgtggccagcactctctgtccccctcgctggtgatttcagtcttacattcataggaaggcccctgcccggggcagggcagccatcggctctttgccccagtaaaagtttctccttagtgagactagnnnnnnnnnnnnnnnnnnnnnnnnnnnnnnnnnnnnnnnnnnnnnnnnnnnnnnnnnnnnnnnnnnnnnnnnnnnnnnnnnnnnnnnnnngtgctggaccattctgtgattccgtttaacctcggccacttcaggaacgctgcttctgtcagcttcctcctggcgctgctttaacctaaaggactgaggaaatcagaactcccagaagctttttcaaaaagtcataaaacagaaaacaaaaatctctttctgtctgcaaaattccaatggtgtgttg

SEQ ID NO: 441854 - DNA, 858 bp, Homo Sapiens
cgggtgacttcccagaatacatacctgtcttttgcggatagcctggagtgagtgggtcaccagcacccattcaaagttgaacacagttcctctctggctgcagttccaggaagattccatcctttggatatgccggtacctcaggagcaaagtagtcagctggatctgagtacaagatgattcctatggctcctgctaacatggcatttttaacgtttatttcctctgaagatttttccatatcttgcaataacaatcttcccagtacagttgatgcccatctctctttctagtttgaaaaagtcttcagtgcgagcatagttcacatatacaagatctccctctggcatgccttgggctgagaaagcattatatggtggcacaatatttgtaacattctcatagccatctggtggtggttcaaggtatgatgttttgaaaatctcagtttcatgttcatccacaatcgatatatagttggcatttgtctcattggggtaagataagaggacatcataatgaaccaacttggctgaatctagtccaaatttcttccactgggtttggattttcttggcaagcaagaaattttgttctgttcctgccagatgaggaagctttgtaaaagaacgaagaaatgatttgatgttttcagctttcatttcggataccagtttccaccgtatactttgatgatagcgcacagaagtggttgtttctttgagaggcttaataaaccagcccaccataaatcccatcaggaaagatgccagcgcagcagccaagcacatccaaaggtacagacggccctggattccgccatggcttcttgaggaccgagcttggggcgcctccgct

SEQ ID NO: 441855 - DNA, 506 bp, Homo Sapiens
atatacaagatctccctctggcatgccttgggctgagaaagcattaatatggtggcacaatatttgtaacattctcatagccatctggtgttggttcaaggtatgatgttttgaaaatctcagtttcatgttcatccacgatcgatatatagttggcatttgtctcattggggtaagataagaggacatcataatgaaccaacttggctgaatctagtccaaatttcttccactgggtttggatttttctttgcaagcaagaaattttgttctgttcctgccagatgaggaagctttgtaaaagaacgaagaaatgatttgatgttttcagctttcatttcggataccagtttccaccgtatactttgatgatagcgcacagaagtggttgtttctttgagaggcttaataaaccagctaatgttgcttggaaataaaacgattttttttcatcctctgcagacagtgacagctgtaggttgtctttagtgactcatgaataggtc

SEQ ID NO: 441856 - DNA, 705 bp, Homo Sapiens
tcttcctcttcctcctcctcctcgctctttcttgcctgaagatcaagggcttcgctagtgatgtgctcacccttaaccaacatgtacattatgaatctcctgaaagggtgtcgggaacgtgggaaacagctccctctgtccggtgaggactgaagaagttagtatttatacttatgttttttaatagatgcagaaacaacatgctcctgcttttttccagagcaaagacataaagcaatgggtgtcatagaaacagtactggaatcagagacagattcctacttcgggctctatcacagactagctatgtggcatcttgggctagtatgggatgttcagtgctttatctttatctataactctgcttcattcgttcattcatataaaaaacatatgtggcgaacctagactgttctaggtgctatgctggcttctggggaatgtgaaggtaaaaacatcctaccttgatagagcaaagagtggatgggggggagggctcccacagggtcgataaatccagagataagcaaatttactatgatagtgggatgatatatatgctatgagacaggaggacgtgagtatctacaaaaacaaggaggagtgtctcctaacagggactggagaaccaaggttgcagtcagggaagtataagggaagagatgttggatggacaacatagaatgagactctgtttcaaaaacc

SEQ ID NO: 441857 - DNA, 484 bp, Homo Sapiens
  misc_feature (89)..(99): n is a, c, g, or t
agacctaaaacagaaaatagtagtctgggaaaaaaagattgaaaccacattcagatctcattctaacattccaaacacaaaatacttgnnnnnnnnnnntgctagctgctgatagcaggtataagtgaaatttgtgattaattttataatcacaagtgtatttttaaaaatttcatgctcttatatatccaatacagaattctagtagcctgatttgactaaggaatattgccaagatttgagaaacaatcatatccgaaggagcacaatctaagtcttattacactaaatctacaacagatgagcacttgtgagttttgatttgcgattgtaagctgtgtttcattagcgttccattttgcataagaacattaagtttgcagcattattttatccattctagtgacatatgcatttcttatactcaagatcatatcagcattagaaagagtatcaatagagctaaacctgcagcccgggggat

SEQ ID NO: 441858 - DNA, 1193 bp, Homo Sapiens
caacaagggaaatcattgtgagtggtttgggttcccggggaaaggagccaatttatgaaattaaataaagtccacaaagggagtgagaaattcgggctcaggcaccccaccccggctgggcccagcactgctggagcacagcgcaccaggcacccccactgtctcacccctctcaagagggggcttaaataggccaggccccagcctggaggccgggggtcccggggcctagggcggacagaagtcggagaagtaggggtgctgcagggcctcttctgctgagatacgctggacagggttacacttcagaaggttctgcagcagatccctccctgtggcattgagtttgggcacgacgttcaccagggatgttgtggccgggtacatcggatagggcttatagtctggcagcttggtcatagagggccactgctcctcggtgggcgtccccagcagtcggaagatcctcttcaactggtcatcgacatcattgccgggaaaaagaggccgcccagcattggccagctctgcaaagatgcagccggctgaccacatgtcgatggacgtggagtacagcttggccccaaagaggacatccggtgggcggtaccacagtgtgaccacctcagctgagtaacagcggacgggaatcccaaaggctcgagccaggccaaaatcagccaatttcagctccccattcctgtttattagcaggttctggggcttcaggtccctgtgtagcacattgcggctatgacagaatcccagcccttttagtagctggaagaggaatgactttacaatctcaggatcgaggtcaccattgcaactgtcaaaatacttcttcaggtcctggtcacagaattcaaaaaccaaagtcagcttcttgtcgctgtgcaggacgtcatgaagcctgacgatgttcttgtgcttcagctccttgagtaggcagatctcccggagggcggaactcggcacaccctcatcatcgtcatccagcctcacccgtttcagagccacgatctcatgagtctcccggtttttggccttgaacacagttccgtaggtgccttccccaatcttttccagtttctcgtatttctgcatcgcggcggccgcggggacccctgcgggccctcggttttaagcctcgtgccgaattaaacacccaggcctcgtacctagccgtagtt

SEQ ID NO: 441859 - DNA, 522 bp, Homo Sapiens
gggaggttgaggctgcagtgagccatgacatgtgccactgcactctagcctaggcatgagcaagaccctgtctcaatcaatcaatcaatcaataaagcattttgtatttgtctctctgctctccctatgctgactagaagcatgacactctccctcttggtacagcactgaggccgtcagtcaccagaatctggtgactcctctatcctcagctcctctgttactcgtctgatctacagtcctttaatccatcatctctgtctggcgcgggttgtttcccaagcctcccagttgcttggccagctttggcactcctacccctatcctctttctcaactagcagccagaggtttcctattgctaaaccaggtcaagtcactctggccgctggagtgctttccatctcgtcaaagtggctgtgttacagtacctacaaggcctgagtgcttgacctgcttctctctgatcctctggagtctttctcctgacagcttgctgggtgggtgggggttgcttccctcc

SEQ ID NO: 441860 - DNA, 440 bp, Homo Sapiens
ctccttttggttttgctttcccctcttttaacttgatttaacaggatgcattaaaatggaatcgaattcataccagcacaaaagtccacacaataggaagaaagcgcacaccatgttggttctaaactggggcaccaggcagcaacggggcaccctggcggcttctccagggcagactctggtctcccaggcctggcagccgcggatctagggggtgggggcccagccttggtgccagtgctagggacagaggggacggagccaggcaaccacacgggctgatgtgagcaagtgtgggtctgagagcagggcagtgacccaccgtctccttgaaagctgtctgacagccaagcggttccgcaggaccggcgagccaccgaggccggagggtttctccaggtcctcgaaggccgtccatgaggatgaagttccaagcaacg

SEQ ID NO: 441861 - DNA, 413 bp, Homo Sapiens
aatgtatcaataaatgtttatttataaataatagaagtgtacaattgtaccatatattatgtacattataaaatatacaaaaatagaaatttaaaaggatgagattaaatataaataatcatcttaatacttcctcaatggattgatcatctccatgcccttgggatgtatacacccccacctgaaacaatagccttaaagtatgtcaatgattgttatttgggttttcagctcaggttacagaaatatgtacaagattgcatctttttaagttttgcaaaatagtcttagcatccaagtttaaatgggatgaggaatgcttgggtgttaacttcttgaggacatatttgggactaatccactacacagctgggtaaaatgtcgttatgggttccaccaacagttattttcca

SEQ ID NO: 441862 - DNA, 1203 bp, Homo Sapiens
  misc_feature (361)..(361): n is a, c, g, or t
  misc_feature (457)..(457): n is a, c, g, or t
  misc_feature (491)..(491): n is a, c, g, or t
  misc_feature (571)..(571): n is a, c, g, or t
gtgcagaatattcacgatatacaaagggagtatcccaaaaaggttaagacttactttataaaggtttaaagccaaaagagtaattgttgcgggtgggatactttccacttgagcaagagtgtcttaccaagtaaaagaataaggctggaaggcttcaatgcccttgtgtaaggcaagatcctggtatgtaacgcattcacacaatttagttgataggaaaactttttgtggagaatagtttcctaaggacgttgcaaggtcaaacgaacacactggttcttagattggtacttcacatcctttactggtcagctatctgttaatcacagataagactgtgcaaggacgtcaatccgtatcntacgagaggctcacaagcttgcaatggtctgaccaaaaggtactgagcatcgcactaccggaagaagcctgaacactgctagggcagcttcgtgcngaattcagcacgagctcgagtttttttgtatttnttaagaatagccacactgattgttcatttctttaatggttaaaagtgagtaagcagacaatcatgcaccctatgaatgcnccataagaatgttcaatatgcaaaccagtacaaccattttcattttttaataatactgtaaatatctcagaaaggatgtattgtttctaatgaatatcaaaaaagtcatcacaatgacatgttcccctgcccccacattgccctccccacccccaaagttacccaaatactagtaggaaattacaaaaaacaaaaagcaacaatccaccctccgccctgccccatgagtagtgttaagtgagtcaagcgttagccacattacgacgtgtgtgtgtgtcggcgatggcggaccacagggatctgtgcatccgtgagagttggtgtggagaaccggtagcagcagcagtgggaagcctccttgcctggggcctgctgggaagacagcagccgaggataaacacaagcagggccccagcctggcccttcctgggtccgcagaaccagacagctcagggagacgagagtgggatggtggcttgcccataagaagctgggcaggcctgaactgtgtgcacagagggggcccaggctaggcttcccgtcctgcccagtggggcactgggcatccctcttagtagacacaggcttcctcgtgccgaattcggcacgagcctgcagcccgggggatccac

SEQ ID NO: 441863 - DNA, 781 bp, Homo Sapiens
ttttaacttttaatgtcctaatgttaaggtaattttgttgtgtgtttagaagtgaccttacctttaacacctgtggagttagtgcgtgcacattgctggctcagcgtaacccatcacgggaccggagagaggagagcggggaagaggagagcagcttcaggccgtggtgtctcccacgtctgtgttcttatttgcagctcagggtttgcattcccaggtagaacaggtgtcgtacactgtgaaatgttccaggttatttgtttataatgtgtgtgtcatatacagatagctccaatgacatctgaagttgtgacttcatcatcttgtcatatttctgtatgatgagccccagggcccatcctgaggtctgctagccatgtgcttagtctcacctccccagcccacgctggcattaccacccagagacccttcagtgctgtgtgtttttcctttttagggttacttttgactcacagtgttaggcaagccagcttggaagttaacttttaaaaaaattcaattgaagctgtaaagtataatatatagattggaagtcaccagaaattgttttagtttgtgaattcccccagtgtatgttctgaaaagaaaatgggagagcttgtaaagcatctcctaaatgcgaagccgcgtgaccctggacttctggcacatctgaataaacatgttcttattttggaaaaaaatataatatatttactttcttacattttctctaaatatacttggagggggggcccggtcccacaatggccttgtgggg

SEQ ID NO: 441864 - DNA, 1298 bp, Homo Sapiens
  misc_feature (873)..(873): n is a, c, g, or t
  misc_feature (897)..(897): n is a, c, g, or t
  misc_feature (905)..(905): n is a, c, g, or t
  misc_feature (921)..(921): n is a, c, g, or t
  misc_feature (972)..(972): n is a, c, g, or t
  misc_feature (993)..(993): n is a, c, g, or t
gaaaaccttgctaatgaattaaagtgaaatttgcatgggattcagtttctctaatgttattttccgctgaaatctctaaagaacaagaatgacttcaattagtaaaagtcaattttgggaaaagtcatgggtatctgttttttaagtgtgtcaagttgattaaaatggatgaaacaaattactcatcataagttgtttcttaagctgtcaatatgtcaatagatggtgagttcagaacttatttcaaattgctaagacaaattatctaaattcataagaattaacatatagaatggtctggtcagtacatttataatttatctatgcatgaaaaagtattgttttgtttgaaacatgaatttcatagcaagctgccatagaaaggaacgcaggctgttctagaccttcaactgcctaaattatacaaaaattcattttaataaactcaattattagctatttattattcaaagacccatatttaaatcctttgctgaccatgttgacatatatcagccttcttctagacaaactgtcaactctcaaccatcttgacagtagaagtgacagtaaaaaatgttgaatgatcagagattatattaaaataaacatgtaattttcaagtatttttgttgtgcttttataatattaattctagatcagatttattttatagccagggtttgtctgttgtagagtcttgaggcgtagcagtcattcatgattaatcactgttagttttgtacccatatatttttaggatagttttaaatgttagatttctcaaaagctaaatgctacttaatatctttgtatcatactcataaagcaaagtaaatctgacactttttttaaagcaaacctctttgctgnccaaaaaaataaatttggggaaanttctagcntttaaaatgtagatcngcattttactgtgattacttgtgaaagtcatattttaatcttctaaattcntaatttgtcattttatttccntaaagttaatttccaatgcatttattcataaaatattcattctggaatgcagtgtttgtttaaatgtaatccaatgtatatagaattagtggtggctgtagtgctgtatttattgcttataattttttttaaatgtgaacttacttttaattttctcttggttttaatctgctagtagaaaccactagttatctgtaaaaatatattcaagatattctgatcaattataacaatttatgttatgcctagagtatatctctattttttgattgtatgaaaatattaaagttatgagttaaagttta

SEQ ID NO: 441865 - DNA, 777 bp, Homo Sapiens
gagttttaaaagtttatttaggtctataactatattttacataacaaaattcatacatacaagtaacaaaatacacaaaatataggtgaaagcaatgttaaagtgccacacaagttttaataaattaatgactttttatttgaagcagaagaggatgaaccgccctccccccaaaaagtcaaaagacttcagttatcctggaaagaaagttctagctttggagggaaagttcatctctgaagggcaggatcatagaagacagtctagaaggcccatagcatagccctgacagtcacagctgacttatcacgaagggccattcaatcaacctcctcaatgatggggccggtgctggggtccccctggcgggcttgagtgccacaactgctgcccccagggacaccaggccccccatagagcctggagaagatggggcgacagatttgctccagctccctcttctgatgctcatactcctccttctctgccagctggttgtgctccagccaggcaaggacttcccgacacttgtcttgcattttgcgcctgtcctcttcgggaatcttgtccctaaggctttcctcttgcaaagaacctttcacatggaagacatgggcctccagcgagtttttggcagccactctgtccctctgggcctcatcctcagccttgtactgctcggcttcatgaaccatcctctccacctcctccttgctcagccggcccttgtcattggtgatggtgatcttgttagccttacctgtgctcctgtcagtg

SEQ ID NO: 441866 - DNA, 555 bp, Homo Sapiens
  misc_feature (62)..(62): n is a, c, g, or t
gtagactgagtaaagaagatccaccctcactaatgtggatgggcatcagtccattcagtgcnccatatgaagcaaactcctgctcttggatatcagtacacttgcttctctggccattggacttgactgaattacacctccagctttcctgattctccagcttgcagatggcagatcgtgggtcttctcagcctccgtaatcatatgagccaattcctacaataaacctctctgtctctctcattctgtttctctggcaaactccaatattccctcctagggacaggaattttatcactctgatgccttatggctactattcatggacgtttcttatagctttgattttcttgcagtgtatatcccaggtaaatacctttctctgctattggagtcccctttcctccccttattcttgttaacttttggcttggattacattttatatgaactaggccttaccaaaaaatttttaaaatgtctgtcagtgaggaaaggataggtccagtgtataacttaaaagacgctatgaggcagagttctgtttttgttttt

SEQ ID NO: 441867 - DNA, 626 bp, Homo Sapiens
gccgacaaggtccttcttcttttgtgcctcttctttttcgcagcagtacactacaatttttaatttgtatacataatgcttcatgggtttccgagaacacacagattcatggctttctgagaacagcaaagtaaaaattccacttgttgaatacgaataactaactttatttgataacatttacctggccacgtctaaccttttcccattaaataacaacaaaaataataaaggcaatagaaattatttctaaaaggtagcagtgcatattcctgaagacaaaagtaaaaaaaactatacttcctaaatagatgaacactcccaagtgacttgaattctctgtggtgcaaaacctccaatatcccgcaaaaccacgttttacatagtgggcccagtatgagtccttataaaggaagatgtaccaggatattcaagagtttccccagaagacatagtggaactgtgtgcagttcacctgaaagctttagaagaaactgtggatgttgtaaacatgcatttctcaaagatacaaagctcctcagaacaactaaacatactatgagaaaaccctcgaccgggcgcggtggctcatgcctactgggcgaatcacgaggtcaggagatcga

SEQ ID NO: 441868 - DNA, 1086 bp, Homo Sapiens
  misc_feature (32)..(32): n is a, c, g, or t
  misc_feature (41)..(41): n is a, c, g, or t
  misc_feature (54)..(54): n is a, c, g, or t
  misc_feature (65)..(65): n is a, c, g, or t
  misc_feature (105)..(105): n is a, c, g, or t
  misc_feature (112)..(112): n is a, c, g, or t
  misc_feature (123)..(123): n is a, c, g, or t
  misc_feature (140)..(140): n is a, c, g, or t
  misc_feature (156)..(156): n is a, c, g, or t
  misc_feature (224)..(224): n is a, c, g, or t
  misc_feature (925)..(951): n is a, c, g, or t
  misc_feature (1069)..(1069): n is a, c, g, or t
aaagacacatggacaaatggactgctttgttncctttcagnatattatttcagntagaacctggncattctactttcaccttaaaagatccatctaagtctcagnatctggnaaacgttttgntaccgattatccacagncaaaacaaaaataagncttttattttattaataatttcgttcctcttgtgcccaatcaaatcttttagggaacaaactgcaagnaaaagctaaggaatgttttagagtgaactaaatacagacatgccttacttgttttgaaaaagggttttggttttggttattgtgtccttttaagttttctgatatgccccctttcaatatttagatatttatttgttgggaagaataccttaaaatgagggttcttattccagattctgggcagtggtctgtgagtagtttttttcctggatgaaaagggagcaagcccacttgtcactaaatgaattgtgtgaaatgtgctcacttggactccatcaacaatgtgctgctcccagattgccatgccagagggtcttcggattcttccttctatcacctctgctctaagcaaatcttgttagaagggcatgcctttgcttaggcagattgggaataccaattcactacagaataaagattttaaaaatgcaataaggtggcaaatgcattgtatgaagaatttctcagtgtttagtctgagaatttttgcatgttggttaattgtggccattctttaatttaaagttaaaactataatcttaggtagaacaacttttttataagaagtattatttgaccacttcaggtatacattcaatactgggtaaaaatttcagacctattttaggaacacagaaatatttggtgtcctgataagcactttctagactattgatgtggccaggaatttggaaagacgnnnnnnnnnnnnnnnnnnnnnnnnnnngttttttccttccctgtgatgaaaaaggctgtgaaaaccttaaagtatttgcttgcttcttgttttgtttagttgataatgaaatgtgtacaacctcaaatttgctgccagaatactnaaaatagaaaaataccc

SEQ ID NO: 441869 - DNA, 500 bp, Homo Sapiens
tttaaaaatatacttgctttatttaccaattttctaaaagtgcaaacaggtcataaaaagacacaagcagtcaaacaaatctattgcactgggtaaagaaagtttggtttgcacacaaacaaaccacttgtccagcaaggctcaacaaatcatcacagaaactctgagagcttatttacatatctcttcgggaatatattaaaaagaaggctcagtttaaaatagagaaaaactgtttaacacctgtgtaagcacacacactaaagaaaacatgacttgatgcttggcatcacgtaaacaaattcacaagatgatcctattaagtcaactgcttggcacgcgctgaagctacagttaacaatcagtgagcacatattaaatgataaaataatgctgatggtaaacattcataacagcagagtaagattttggcagttttgtgtttcggtaacataactgtaaccttagatgaacacctatcccttcatgatctgacttta

SEQ ID NO: 441870 - DNA, 446 bp, Homo Sapiens
  misc_feature (199)..(279): n is a, c, g, or t
cgagtaaatcagtgaaggggtatgagcccgcattgccaggagatcccttgcatcagttgtcgcattgaatgtgaatcctaacggagtagtatatgggtaaccatatgtaagctgttagcagagcaacaagaaagtatacctcctgtcaacagctaccgaatgactcaagttatgcacagaagtatgcatgtcgtgagcnnnnnnnnnnnnnnnnnnnnnnnnnnnnnnnnnnnnnnnnnnnnnnnnnnnnnnnnnnnnnnnnnnnnnnnnnnnnnnnnngcaagttaaagggagaaccaggaagatgcctcacagaaacattcaggccaagcttagctaaagcttgatctattcaattgccttttgggaaaatgcagtgagaattgttgcccttgctgtggtttgttcagcgcctaattgtgtagctaccttttgtatgtgatgat

SEQ ID NO: 441871 - DNA, 692 bp, Homo Sapiens
ccctagatcagagccaagccaatgccgattctcaccattgctatcaacataacactgttaaaccagagcatctaggcaagaaaaagaattcaagggcctcccattcaaattgaaagaagttagattgccaatggtagaaaacatgatcttatatagagaaaacctaaagacttcaccaaaaacctgttagaactaataaaccaattcagtaatgctgcaggagataaaactaacatacaaaaattagtggtgtttctatacactaaaaacaaactatctgaaaaagaaatcaaggaaaccattccacttacaagagcatgaaaaataaattaagatatttagaaataaatttaaccacagagctgaaggacttgtaaactgaaaatcataaaacatttataaaagaaatagagatagttttagcaggacaatgtacctaggatttctcagtcaccttctccatacagcaaacctaaagggaaactggttacattcccattttacccaaacctataattttgaattgccccaaagtagctaccattaagttagtagggaggattggtgaagcccagaagccagtatatagaagatcatactttccaggcctgcaagctatgttttgacaaaatatttgattatgtctatttacacatggaatttatctaaggaaagtagaccagaagccaaat

SEQ ID NO: 441872 - DNA, 1353 bp, Homo Sapiens
  misc_feature (86)..(86): n is a, c, g, or t
  misc_feature (809)..(864): n is a, c, g, or t
cacggcagtgatgtcggtgcgagaacaagagaccagtgtactagcggacgggcggacgggtggcagagacctaacacgcaccaccncgggtgggggagggcggcgcgagtgggcataagacgacgagagaatcgcatacgacatgaacggtcggtgactgccagcggtggaggctgtataggagacatcgcgagtgaactcactctgtgcgccgcgctcgctatgcaacgcgtctgaatgcgtacagcgcgcgcggcctcttgtgacacgagagtgatcggtgttgtcgcgtggaggcactgaagcgaagctcggggagccataacaacttcgagtgggcggggggcatgagatatcgcggggagagaaaattggccccagcgggagggatacttctctaaatttctctgttacacctacagtatatgattgttgtacatagagagtggcggcccaaaacaaataagaaggggttttggggctccaccaatgttctcaaaaatttcgcgccgtgggtattctgagcgtcataggcaaggcgtataaggaaaaaacgggtgaaacttcccatttggggaggattgggtggcgttcgaagcaagggcacccagaaggtttttctctgggtggtgtttgctgccaaaagcaaaagttccagcttttggcagtgcgggtccccaaatggaaattcaaaagctgggacttgttcaaatcccgcccagtgccaaattggtttattcacgtcaaccgtatacattccaccatggtatttctgcttcatgatagctatttcattttacattttacannnnnnnnnnnnnnnnnnnnnnnnnnnnnnnnnnnnnnnnnnnnnnnnnnnnnnnnacaccgttttgaccagcaaaattttactaaacaatctcagcaaatttcgtaattcatctttcaatatcacagtcttttaatgtcaatgaaaacaataatttatgaattaaaacatctttttaaacctgacaggaaaatatataagcacaatttctggataaagaaaatgaggtgcagttctcagggctttagtacttcattttaaacagtaaacacagtaccaaccatcgttttgattccagtgaataagaagttaagattaaatttattaatcaactttgaagtctgaaaccgaaatgatcctttaacagcattgccaaataaacaggtcagttctacaaagctaatcataatgccaaattttgaccaaatgataaagtggctctgttaccatagtaccagagtctgtctttttgttgggtttctgtttgccataacaaccaaggattgaattacatttaagcagaagtatacaaggcttgatgtagt

SEQ ID NO: 441873 - DNA, 854 bp, Homo Sapiens
tggttggtaccgggtccggaattcccgggatggcgcagcggcagcggcagcagcggcaacaagtgccggaggctagcagagccaagccggagcagtccctgccgccgacaccgccgggccgcccgtccggggcgccgcgcatggagcgtgagctgcggcggtcgccgggctgagccgcgcggagcggccgggacgtggatgtggccgcgatctcccgcccttgcccccgccccgccgagctggagctgctcccggacaagatatgagaaatgagtgttggacgtcgaagaataaagttgttgggtatcctgatgatggcaaatgtcttcatttattttattatggaagtctccaaaagcagtagccaagaaaaaaatggaaaaggggaagtaataatacccaaagagaagttctggaagatatctacccctcccgaggcatactggaaccgagagcaagagaagctgaaccggcagtacaaccccatcctgagcatgctgaccaaccagacgggggaggcgggcaggctctccaatataagccatctgaactactgcgaacctgacctgagggtcacgtcggtggttacgggttttaacaactttgccggacagatttaaagactttctgctggtattctgagatgccgcaacttattcactgcttatagatcaggcggatacagtgtgcaaaggaaacctttctggttgctggcgattacgtccctcactccacatttagccaaaacggcaggcaatccggggaatcctggggccagaaaggcaacgcaggaaaccaaacaggaggtgcgaagtcttcctgctgggccgaaacccccaaaggacaccacccga

SEQ ID NO: 441874 - DNA, 441 bp, Homo Sapiens
atgttcagttttatattcagagcagatatttaagttaattattttcacaaggaagagcagaactattctaaggctagttcctcaatattaagaattctctaaggttctgtcctaagacctcctctttttaaaataaactttactttttaaagtagttttgtgttcacaatgaaactgagcagaaggaagagatttcgcatacgttccctgtcttgtctccccgactatcaacatccccaacaagagtgtacatttgttacaactgataacacacattggtacatcattattacccagagtccataatttacattggagttcgttcttggtgttgtacgttctgtgggtctggacaaatagatgatgatatgtaaccatcattatagagtagtttcactgccccaaaaaatcctctctgctctgcctattcatccctccctc

SEQ ID NO: 441875 - DNA, 236 bp, Homo Sapiens
tcgtgttcatttgtactttattacttttatatacaatgtagcatttaaagtatcctgaaggttaactgaagctatattaaaattttatctttcatcaaatcagattactattttagagagttcctttccctgggaaaagctttgagcgtctctgtaccaaacagtgtgaaagatgttctatccccacctccacccccatcaatatcctccaaagggacctaaggaacttgaagcag

SEQ ID NO: 441876 - DNA, 1695 bp, Homo Sapiens
agcggggttacttcctccagagactgacgagtgcggtgtcgctccagctcagagctcccggagccgcccggccagcgtccggcctccctgatcgtctctggccggcgccctcgccctcgcccggcgcgcaccgagcagccgcgggcgccgagcagccaccgtcccgaccaagcgccggccctgcccgcagcggcaggatgaatgatttcggaatcaagaatatggaccaggtagcccctgtggctaacagttacagagggacactcaagcgccagccagcctttgacacctttgatgggtccctgtttgctgtttttccttctctaaatgaagagcaaacactgcaagaagtgccaacaggcttggattccatttctcatgactccgccaactgtgaattgcctttgttaaccccgtgcagcaaggctgtgatgagtcaagccttaaaagctaccttcagtggcttcaaaaaggaacagcggcgcctgggcattccaaagaacccctggctgtggagtgagcaacaggtatgccagtggcttctctgggccaccaatgagttcagtctggtgaacgtgaatctgcagaggttcggcatgaatggccagatgctgtgtaaccttggcaaggaacgctttctggagctggcacctgactttgtgggtgacattctctgggaacatctggagcaaatgatcaaagaaaaccaagaaaagacagaagatcaatattgaagaaaattcacacctcacctccgttcctcattggattaacagcaatacattaggttttggcacagagcaggcgccctatggaatgcagacacagaattaccccaaaggcggcctcctggacagcatgtgtccggcctccacacccagcgtactcagctctgagcaggagtttcagatgttccccaagtctcggctcagctccgtcagcgtcacctactgctctgtcagtcaggacttcccaggcagcaacttgaatttgctcaccaacaattctgggacgcccaaagaccacgactcccctgagaacggtgcggacagcttcgagagctcagactccctcctccagtcctggaacagccagtcgtccttgctggatgtgcaacgggttccttccttcgagagcttcgaagatgactgcagccagtctctctgcctcaataagccaaccatgtctttcaaggattacatccaagagaggagtgacccggtggagcaaggcaaaccagttatacctgcagctgtgctggccggcttcacaggaagtggacctattcagctgtggcagtttctcctggagctgctatcagacaaatcctgccagtcattcatcagctggactggagacggatgggagtttaagctcgccgaccccgatgaggtggcccgccggtggggaaagaggaaaaataagcccaagatgaactacgagaagctgagccggggcttacgctactattacgacaagaacatcatccacaagacgtcggggaagcgctacgtgttctcgattaaatgtgcggacctcagaaacttgcttggggtttcaacgccccgagggaactgtaacgcgcataacctgggcagtaacaaccccgtacaccggaaggtacttgacgttccgcccggggacccaccccttgaacccggctccccaaggcttcgtggtacctgttgggtgccc

SEQ ID NO: 441877 - DNA, 1133 bp, Homo Sapiens
  misc_feature (179)..(187): n is a, c, g, or t
agaaatatttcgtaatagaattcgtcgcgccgtgtaagccaaagagtttttgcaagcaagcggaaaccctattcccaggtttaggtttagacccacttatgccctttaaagagatgttgtaaatttccctggggggctttaaaatctcctgtaggggaagtttgttccaaattaagttnnnnnnnnnaaaggtgagggttccttccccaaaaggtccccaaggtaggcagtttttcccaatcacggaggttgaaaagagggcggcccagggcctagggttataatacggcctcactgtagggggccccctttgtacaagaaagcctgggtacggcgtaaggctgggccccctcggagggataatctagaggcgcccgcccttgacatggtttggcgggcgggttatcgggttttgctagtttatttcaaaaattacaattgtttgagtcaaatctatacttgatattcattgttgggtttctttaggtcattctgctgttctctcagtttcccaggtgttttgtgtgtcttccttgtgctattaattttcctgtggccttgttggtcagatccacagaggtaaatgcaagtgtttttccttgcttcagaacatgtgctgtaatcactatatcttctcctaattttgcaggtgacatgtacgttatgttcatatcgacactgactccgggtgctcccctttccgtgcatagcagagccattgttgatatgttatctactaacgtggctgtcaaaccgccgtggagagtgcctattgcattggtatgctcttcttctactttcatttcacaaatcactttcccaggagcagcagagacaagagtaatctttcccaaaactctctcaaaattgcgagccttggtcatggcctttatcacctcccgcagagactgagtcatgctggtcatcgtggacggttttccagcctttgggctttgcgcaagaacgaacttcggaagagctggaaagtccagaagttagtgaaagaaggacacaaagggcgaagagcccgcacccttctccgcccctaggagcgcaagaggccgggagtcaggcgagctggcagccccggtggtcagcgatttgctcactgactttcctcgcacccttgtccg

SEQ ID NO: 441878 - DNA, 859 bp, Homo Sapiens
  misc_feature (16)..(16): n is a, c, g, or t
  misc_feature (95)..(97): n is a, c, g, or t
  misc_feature (100)..(102): n is a, c, g, or t
  misc_feature (115)..(115): n is a, c, g, or t
  misc_feature (118)..(119): n is a, c, g, or t
  misc_feature (122)..(122): n is a, c, g, or t
  misc_feature (126)..(126): n is a, c, g, or t
acaccttaaccttctngggggccccccgccgccaaacggaaatgggtcttagaaaaggcttttcggaggggcccgaaggcggcccccacattgtnnnttnnnttttttcccgcgnccnnccnccgngggctaggtttatttcaaaaaattaccaaattgtttggagtcaaattctaatacttgggatattccattgtttggttttcttttagggtcatttctggctgttctctccagtttccccagggtgttttgtgtgtcttcccttgtgctattaattttcctgtggccttgttggtcagatcccacaggaggtaaatgcaagtgtttttccttgcttcagaacatgtgctgtaatcactatatcttctcctaattttgcaggtgacatgtacgttatgttcatatcgacactgactccgggtgctcccctttccgtgcatagcagagccattgttgatatgttatctactaatgtggctgtcaaaccgccgtggagagtgcctattgcattggtatgctcttcttctactttcatttcacaaatcactttcccaggagcagcagagacaagagtaatctttcccatacctttcccaaaactctctcaaaattgcgagccttggtcatggcctttatcacctcccgcagagactgagtcatgctggtcatcgtggacggttttccagcctttgggctttgcgcaagaacgaacttcggaagagctggaaagtccagaagttagtgaaagaaggaggacacaaagggcgaagagcccgcacccttctccgcccctaggagcgcaagaggccgggagtcaggcgagctggcagccccggtggtccgcgatttgctcccc

SEQ ID NO: 441879 - DNA, 833 bp, Homo Sapiens
  misc_feature (38)..(38): n is a, c, g, or t
  misc_feature (75)..(75): n is a, c, g, or t
  misc_feature (624)..(638): n is a, c, g, or t
cattgaaggttccccccagcattttggcaaccttggtntctgtttgggtcacttgttttacctttaagagcattncagggaataagtcctagagtgatttctaacatttagcacaatcactatatatcacagttaattttgctaccaccatttacaagaatataggtaaaacattggtctcctacccgctgggaatctaaaaaattgtatgtgctaagtgtcagtcacatggtcaacatgctgaagcacacccagctcaggttaaggtgctagatgaaccaggaaggagttaatactggctcttacttccagataatgcagaagggtgatgctgttctccagcactccatcagtgcaatctactggccaacgacaaggtggttaaaatgtcctttagtaggtatgaagacgtgatctgcttcttcagacacttatgcctgattagtgatgtagtttatgttagtgtctttgaaactgtaaataagtcaagtcaaatgtattaaattaagaacacagtctaactctgagtgtaagttttaaacccactcactatatggtaaatcttgcctttccttctcttatcaccaattttggaagtaagagaatcacagggttaagatgctnnnnnnnnnnnnnnnttgactccagtcttgaagaaaaatacatgtaatcttatgctttattgcatacaatgaaaataaattttagatgtttatgttgttagatcagcgagagaaataaatgctttatgaccactttaaaaatatttaggaagtatataagattttaatagagaataatatctatcatacaaagtttataggataatttta

SEQ ID NO: 441880 - DNA, 578 bp, Homo Sapiens
tcggtctagccaagtcgacgggccaaataatccacagttaatttcagctaaatagctaacaactgtcacaggagagagtggaagatatttgaggctttgtaaagagaagatcacagcattcaccttggtaccattatctttggatttctagaaacacagtttgcaatgccttgaaagtagatgtcaaacaccagctaatgataataactgatatttattaagtactccatgtgcgtgaagttcctctcagcactttacatgtattaattcaaatagaaccaactactttctgaggaggatactgttattattgtccgtattttacagctgaggagaagttgaatgatttgcttcaggtcacagttctagtcaggggagaatagtttacggttccaaccctagcagtcttagacactgcgctctcttagctgctaattaatactgtctctatcatggaacttttatacaaaacataaacttgtagttagtcagcaaaagtaaattttgccaaaaagaaatttggccattttaacctttttttggttattttgccactgagcacatagcattatgactct

SEQ ID NO: 441881 - DNA, 891 bp, Homo Sapiens
  misc_feature (302)..(302): n is a, c, g, or t
  misc_feature (304)..(304): n is a, c, g, or t
  misc_feature (307)..(308): n is a, c, g, or t
acacatctgcagattctgttcaaaaagatcttcaattccactaaattccaattccttctgtacttcttgctccaacagaggaaaaatgtgacgctctaagccaggttgatcaactgtgctgtaacacatggcatctccaaacaaaagaaccctcagagaacacctttggaatctgcaccagaattttaaatctgactcccttgttccagttctaaatgagaatgtgcacacacctgtgtgatacaggtctgtatcccatctcggcccctttgcctcttcttttctgtattgtctctgaaaananaannaaactcacccattcttagggtttcagctccttcctcttgagccactttgcaaatatgttttgctaatttttatttctctcccataattcagaattgcaacctttttaaaaatgtatttttcatttaattttgtttctttaaccgaataactaatacatgagatcacactcataaatttttgaatatctctctatattaactaaaagcctcctttcctatactctccaaatctcactcagtcttatagtgctagtctttaatatcacatttgcgagtttccatccacggctcattatatgtatttttctacgtgtgtatatggatttcacatgtttctaattttgtttagtgttagatcttgacaaatgtaaaactctgtagcttttttttcaactgtttacataccttatagattcttcttgtcagtacatacaaatcaagctcgttcttcttaactactgtattatatttcatagtgtggctataatagtatctttaaaccattcctcttttaataggcatctgaggtgtttacaattttttgccactaaagtagcgttaaaatgagtgttactggcatata

SEQ ID NO: 441882 - DNA, 339 bp, Homo Sapiens
tgaagaaaggaaaaagaaggcaaagggcaatgttcttactgtctttaatagtttcctaacactgccacagaagatatctgcttatatctcactgtctaaagttcagtcacatggccacaatctcaaggaaggctggggtactttaatctttattgagggcagtcatgtgcccagctaaaaccaggggttctattactaagaaagatacagctgccccccaccccaaaacaattcaataaaaatacaaataaacaatacagtgtagtaactattttcataggcatttacactacattcattattataagtaatgtagagatgatttaaagtatatggaag

SEQ ID NO: 441883 - DNA, 672 bp, Homo Sapiens
gtgatttgccttaacaattttttattctttggttttcacatccacagaacctaaatgaatggctaggctgaaatgaagctgttgttacagaattgtgctcacagatcgtgaaatgatctggctggaagcattagcgttgatgacatttgtgtttgttctactttttcctgactgcctgagaagggcagccacaaagagcagcatagcatgcagtgactgccagcaagtctttgtggccaacagtctgcctctttgtagataatacctagatataatatgtagataaaataatatttttaaagagacaaagcaggtcttataagacttgtatggatgtatttgcaaaatgtgaagctgccttctagtatatttttaactagctttatagaggcaatgaggaagccaatttaaatgttgaaatttagattaaataaatatttcattaaacttacaaaccagttcttgtcagcctcttatctatatgtaaaactggtgtactgctgattcctcattacctttggcctggtagagagtttgtacaaggcagcacggttaatagttgaggtttattccaagaataccagaagtacagactaatccagaggtctgccattctgttctctcctctaccggatttgattcaagctactggagcaagagtactcttctgtt

SEQ ID NO: 441884 - DNA, 863 bp, Homo Sapiens
tgaaccaaaatatcacttaacatttaataattgcaaatatatttattacaatttacagattagttatgttatatacacaaatataattttaactataaaatcccaactagttacatttaaattattgatctgtagaagccaatttagagtcttctagtcccctaactttaccttccttaaattatacaaaaataaaatctgatagttttgatttcaagttaaagatgaagaagtgttacatttcatcactcagaaatggaacttttacctgtctgtacaaagccttttacatgctacattgacacttaaagcaccattaacaagactttaaatgtataaaatgtttaattaaaacctccaaagattttctctttaagattacgggggtttaactttgttctaactagaattgggatgaaacaagaattttgcttttttctccttcagtccaactttaaaatagtcctttctgtccttcttatcaccttctgatcacttcttccaaggaggctagtatatggaagaactcttaatcaagctttcactcatttggtagtgaggttagaatcccatggggaacaattttccaaaatccaatgaaagatgtctcattattttcaaatacacagaggtgctaggtttaagaaacaggaaacacaacgttaagtctcggaaataaaatgtttcagcctggttttaaaagaatgcctgtatgttgtcaaaaggcttttttcaaggcaaatgacgcctgctttccaaccgacattgctgttgcttgaaactagcctgttttcatgttattagaccatcctgtaaatgtgctccctatgattacctaaagtggaggtgcacaaaacacacag

SEQ ID NO: 441885 - DNA, 776 bp, Homo Sapiens
  misc_feature (250)..(287): n is a, c, g, or t
gtgatccgacgtgggcccctccgcagcgatttgaagaccttggggaaccgtcgagggggcgcccaattggaaaacctggagctccagcgggaggaagtcggcacgagcacaggccccagcactgggaacaacccgtctacacacagctcactcgaccttgaggaggcctcccacgaagggcgacgatggccgagatgatcctaaaaataaccgaagaaagagaggaccaaccagaattccctttggacannnnnnnnnnnnnnnnnnnnnnnnnnnnnnnnnnnnnncttcttcttcttcttccttaaagacatttaagctaaaggcaactcgtacccaaatttccaagacacaaacatgacctatccaagcgcattacccacttgtggccaatcagtggccaggccaaccttggctaaatggagcagcgaaatcaacgagaaactggactttttaaaccctcttcagagcaagcgtggaggatgatggagaatcgtgtgatcagtgtgctaaatctctctgcctgtttggactttgtaattatttttttagcagtaattaaagaaaaaagtcctctgtgaggaatattctctattttaaatatttttagtatgtactgtgtatgattcattaccattttgaggggatttatacatatttttagataaaattaaatgctcttatttttccaacagctaaactactcttagttgaacagtgtgccctagcttttcttgcaaccagagtatttttgtacagatttgctttctcttccg

SEQ ID NO: 441886 - DNA, 1253 bp, Homo Sapiens
  misc_feature (28)..(28): n is a, c, g, or t
  misc_feature (40)..(40): n is a, c, g, or t
  misc_feature (982)..(982): n is a, c, g, or t
catctttccaaccactgaccgggttaangaagttaccaancatgagtgagtttcttctaaaacactaattttcaaaacttgtaagaatagtaactttgatctagtctgactttcccaagtacatctacattccaaatatagtacaacagaagcaaaagacaagaagtaatgatgtagttgtttattttgaatataatcatgaagtggggaaaaattttaatacaagagtagaaagaggattccagagaaaaacattccagtgtatcatggttctttgtgagtgagtagagaggggtagtgaggatgctgtccacaatgtattcatctagttaatgaattgtatggcccacaagctcaaacgagagatacattacagatggttgtattataaacctaatcttaagaaaccttaccaagcaaatgcttaaagactgatttttttgtgatctgataaaaagcctgcaaatcgtgaatcacttttaaactgtacagaatggactacacaccagtatggtaaagttcttgtaaaacaccaaacacaatggctcatagatatatacctctctcactcttaaatggcatttcctaattatagaaaatgtttacaacaaaagaacaagagggatcaaactaacaatcaataaggagaactgatgtgaagtcccatacactgttactccatttttcagcaactctttataactccttcattgacttgactcctttacaacatacaggtgaatttgtagaactagtttttccaagtgtggttccctatagtagaacagcaggatcactgggggaacttaataaaatgcatcttcttatatcccataacaaacttattgaataaacagggtggagcctagcgatgttttaacaagcccttaaggtaactgatgcatgctcaactcagagagccactggagcagagctggctttcattcagcccctgcatcatttttaccagtctcttctattnaaaaaaaaggtctggagcagtaagctctgacagtgttttttcttccaataaaactcttaatactatagttgcataaaactacctaatgcgcccagagtagcaggttctgctaggatttttctcccagtaaaaaagcactcaacactgtagttgcattaaaactacttgatgtccttggtgtattgataacctgttttgcttttgccaaagcaatttcagatgccctactggaaaatttatccagagtaggtttgatgtaataccagcaaca

SEQ ID NO: 441887 - DNA, 858 bp, Homo Sapiens
  misc_feature (41)..(41): n is a, c, g, or t
ggcagcaaagtgaaattaggaaaaccttttttatatatttnaccaaggaaaataacaaaatgttttgacaagtaccacgatgtgaaaaaaagcaccggttgaccatggagtacaactgtgaaatgcaaggcatgtgaaattcaagcattcagagaaaagccacactgagagcttgttagaccatgaatctggttatactatggggtcaaataatgaccctaggtatacaggtttctctttccctcgttaaaacagaaaaaaatttaaaagatgctctccaataatagaattataatgtgatttaaatattttttaattactcatctacacaaatgacctttgatcaagctcaggcaaaatataagttgcaataatatctacacgtaatgtgaaggttttaaaaaaataatacaaagttcattcacagtgcacaagtgaaaacaaggtaagtttcaaatatctcaacaacatatagccatgatcattcaaaaggtaagcatattttaaagcacatttccatactgctagagctataacatagaccagcttagagaactgagagaaaaaccattactttgatcccctttattggaaagcaaaaataccagatttctttcctcagatacatacatctagaataaataaatacaaaattattaactaaagattttatcttttaaacctatactctgactctcatcctatgtcaaattcccacattgtgaggctgggaagcaccactctctgccatgttccctacttatttttatatcattcatttgcatttggaggctgaataatatgcagaaagctcgtgccgaattcatgcagcccggagaatccgggagttctagaccg

SEQ ID NO: 441888 - DNA, 652 bp, Homo Sapiens
actttgatcccctttattggaaagcaaaaataccagatttttttcctcagatacatacatctagaataaataaatacaaaattattaactaaagattttatcttttaaacctatactctgactctcatcctatgtcaaattcccacattgggaggctgggaagcaccactctctgccatgttccctacttatttttatatcattcatttgcatttggaggctgaataatttgcagaaagaagtctgcggaaaaaactgtggaaaatgggaatacaaagagggcaatatcataaactactagaaaggctgactgttccacccgcaactatagcacagtgggttaaacggggaagctgcaagggccacttatttcgtgctgtgcactgcctaggtacactgatttttaaaattgaagtcctagccaaattaagtttggatatcatctatttacagttgttcagtcttccatacagagctttgtccactccactctttgcaaattctgacataaaaacaaatgattctgtggctagttcgaatttaacttctgtatatttaatatctttttgtttagattagaatcatttctgacttttgaactacagacacaagacacagggtttactcttgagactgaattttattttctttc

SEQ ID NO: 441889 - DNA, 480 bp, Homo Sapiens
  misc_feature (391)..(391): n is a, c, g, or t
  misc_feature (406)..(406): n is a, c, g, or t
  misc_feature (453)..(453): n is a, c, g, or t
gcttttcaactaaaatggttttattgagatgttttggttggaggagatactttttctggcaacatttctgactcaaggtccctctgggccccagctcttcccatgagacagtcacaacactgtttaatcagctctgcagaggccagccctggagcagaggaggattcagggccatggaggggacctactctgccctgttctggtcactacttctctagactctcatgcactattgtctgtagcaagtgacatttccactggaagcacataaagatggcgacagcctcatttcttcctgagtgaactgaagcccaaagaaaggggaggtcccaccaaaggggaagagagccagggccccacccaacaaggatgctgaaataaactacatgtnatgctttctaggggncaacacagaaatctctactctgaaatccagaatgttaaatatggctncccctctataagttaactgtacaagct

SEQ ID NO: 441890 - DNA, 622 bp, Homo Sapiens
gtcttacagcaatccagtatttgagagcaatgaagaacaactctgaaggacatgtgatatccaagttgatattacagagaaaccatgaccaaagggacccgtttccttgattttaagaaatgagactcttgtaacatcagctggagttttggggctacctatcaaatcatggtgacaaactaaagtctgtttgataaaatactgtctacagagaagaacattgacccagaagagtgctttcctcttggcttctgaaggtattagaggcattcagtgaaggcaagaatgggccaagaatttctatgggccaagagacaagcaggctaaaggggaaaaatatgtgatctttcctcttaggacaggacaatactttcctttttataaaaatgagttgaggggaagtagtactgtgtatactcacggagttgtaatttttgaatttttacttcatcgatggaaaaactaatgcgtgtgaaacattacaccaatctttactgtctgggttccttttctctgtagtacttttcagatttgaggctttttcttctgtttctggccttacccaacatattgttaaggataagcttaacttatgctgcaataaaaaacaactctcagataa

SEQ ID NO: 441891 - DNA, 800 bp, Homo Sapiens
agcgctggaagacgtttttttcgtcttttgctgggctcaagttttaatttgggaatcacttaaaccccaattcacaagcagcataagtggggtcagaaggaccagagggttggtggggccgagggagggccagtgaggttggtgcagcagcacaggtggacaggccaagggtggccagggagacgagggcaggagcgtgggcagccgcatgtcactcaaggcgggcactccttgtgctaggaggggatggtgtccaaggcagaggagcgctcttcaggtcatccacgctggcctgtagccctctagtctcccccactctgggcctcctctgccacttcctctttctctttggatgcctcaccctcctgttggggggcagatggcctcaagtcctccttgcgcaccaccccggaggtgaccgcgatgttctccgcctcctccacggtcttggtggccacagtgttgacgctgctcaccacagcctcgctcacggcgttggcctgctccttggtcttctcggccactgaggtcacgctctgtacaacattctccttggtcttggctcccacatacatgaccccctccttggtcttctcagctgcttccgtcaccccctgcttggtcttttccaccgcacccaccacgccctccttggcgatggagaagcccttcttgaagacatccatggtgggtgtgcagggttgggctgctgcaggcaggacggagctggatctccctgcgagctgcgggcttgagctggctcgagtgctgccgcagcggcatcccgggaattccggacc

SEQ ID NO: 441892 - DNA, 745 bp, Homo Sapiens
ttcacagcagcataagtggggtcagaaggaccagagggtgggtggggccgagggagggcagtgaggttggtgcagcagcacaggtggacaggccaagggtggccagggagacgagggcaggagcgtgggcagccgcatgtcactcaaggcgggcactccttgtgctaggaggggatggtgtccaaggcagaggagcgctcttcaggtcatccacgctggcctgtagccctctagtctcccccactctgggcctcctctgccacttcctctttctctttggatgccacaccctcctgttggggggcagatggcctcaagtcctccttgcgcaccaccccggaggtgaccgcgatgttctccgcctcctccacggtcttggtggccacagtgttgacgctgctcaccacagcctcgctcaccgcgttggcctgctccttggtcttctcggccactatgggaggacactggctggcctgaggtcacgctctgtacaacattctccttggtcttggctcccacatacatgaccccctccttggtcttctcagctgcttccgtcaccccctgcttggtcttttccaccgcacccaccacgccctccttggcgatggagaagcccttcttgaagacatccattgtgggtgtgcagggttgtgctgctgcaggcaggatggagctggatctccctgcgagctgcgggcttgagctggccctcgtgccgaattcgccacccaggcctcgctac

SEQ ID NO: 441893 - DNA, 826 bp, Homo Sapiens
ccagccctggagaagttttttgtcctactttcgtgggctcaagttttatttggaatcatttttatattaaagttcacagcagcataagtggggttcagaaggaaccagagggtgggtggggccgagggaggcgcagtgaggttggtgcagcagcacaggtggacaggccaagggtggccagggagacgagggcaggagcgtgggcagccgcatgtcactcaaggcgggcactccttgtgctaggaggggatggtgtccaaggcagaggagcgctcttcaggtcatccacgctggcctgtagccctctagtctcccccactctgggcctcctctgccacttcctctttctctttggatgccacaccctcctgttggggggcagatggcctcaagtcctccttgcgcaccaccccggaggtgaccgcgatgttctccgcctcctccacggtcttggtggccacagtgttgacgctgctcaccacagcctcgctcaccgcgttggcctgctccttggtcttctcggccactgaggtcacgctctgtacaacattctccttggtcttggctcccacatacatgaccccctccttggtcttctcagctgcttccgtcaccccctgcttggtcttttccaccgcacccaccacgccctccttggcgatggagaagcccttcttgaagacatccatggtgggtgtgcagggttgtgctgctgcaggcaggacggagctggatctccctgcgagctgcgggcttgagctggctcgagtgctgccgcagcggctgtccccgatgcctcctattgacgccgatgaaacattccgct

SEQ ID NO: 441894 - DNA, 640 bp, Homo Sapiens
  misc_feature (78)..(95): n is a, c, g, or t
cctcttttaaaaactctatttggtgcgtgcccacggtgctgcgtcccgtcagacatacctgtatagatctctctattnnnnnnnnnnnnnnnnnnaaaggttctttagcagttaaatagattccaatatgaacgtctcccaggacaaagctgcgtctcgcctctgggtcacacgcatctgtgcggctggggtgtatgtgccgcgtcacagcagtaccatataaatacgttgatttgaacgcagtttccctgtggtggtaaaaacacattcctgacaagtgacaagcagaagagtccggcagctgcagcgcctcactcggctgggacctcgtacttgaagatgacgctgaagagccggccgcccagccgctcggccagccacgcgttcttgatgacggccagcttgaggctctcgcagcgcagggctgcgtggtagtttgtgtggacagcacggcccatgccctcgatgaccaccagatccgcgccacgctcccgcaccagtgcggccagccccttatccaggcggctgaggtcgaggcacggggagctggagcccgtctgcaccagcagcagcctctcttcctggagcgcagagtgcacgacagggtccatgcccgcaatacgctctgccacgatgaggg

SEQ ID NO: 441895 - DNA, 436 bp, Homo Sapiens
  misc_feature (407)..(407): n is a, c, g, or t
tggtaatgatggtgatagggtaaagtttggctttttcttggtttttgtttttgcgggactccatcatggatcacccaataggaagccaagaatgaagcagactgggaatgcgagacttcttgtagccaatgcccagccctgcaaatctgccagggaagcagaacagagccaagtggaagtagtgtcctactgggcagggttgggcatctctcccttatccagtggggtctgctccttggagttcaagggtctgtcatgcatccgagggtttgggggtctatctctcctcaggatgacccaatgttcagatgggcaagggagaaggcactgcccacagccccagctctccatgttgaccaccttaccacaagagtaccttccctggcagttttcgggtttgggtttantggaaccacaaggcacacaggggaggggt

SEQ ID NO: 441896 - DNA, 1476 bp, Homo Sapiens
tttccttattcatattttattaggaagccatatcagaaaattaatcagttatacaactttaaacattgaatgaatcattcttatcaaatacatcaagaccagaagccaagtcaaatatggcatttcattttacaaatatttttacatttaatagtcatgaaaaagaaaagaacttgaaaaaacaacttcaactctgtacaaatgttaatatcaaggagcagctgaagcttaattttaagatatgcaagataagtgaaatgaaataagtaatgttttattaaaatatccttgtctttttccatgatatacacatattttttctctttaaataaatatatattatgtatttttaatgacagcttacttaacaacattcatctggtgctttggggccatggagttcacttggtaaggaagacaaataccaaaaacatcaggtacaattggattctcctacagcagaagaattggcttgatttttggaatgtctccccgcacctctcctcacatcaggacttctgagccttctgaggagtcgtcagcaaacaaaagttcatcgggcaatgagcttcccaagggcagcatgctcgaatgggaccatgagaccccattcctaacaagtctctccctcggtaaaacactgttcttttcagctgtgactgcagcagagggggcagaagtcagatcttcccattcctcactgcccccattcatgatgtaccgtccttcatgaggtttgctgtcatgaacttctgctgtgaccacactgatggcagcgcggggagtgcaggaggcaattatagagtcagggtcgatgttcaagtccagtggagcaagggtggagccctgggccaggccctcagagctctccagcaactgtgtattgacgtaaataacgtctgcttggttccgaacgtcaggcaaactttctaagagtttttctagctgcagcctcaatactgaaaaggtggggcggtctaagggatcggttctccagcaagagtacattatttcatacagttcatccaggcagtcttcgggctgcttcaacctgtggccatggagaagatagtcatacatctcatggttctggacccccggatagggagtcattccccgcgtagctatttcccacatggtcacgcccaatgcctacacatctcttttacttgtgtagactcggtctgcaagactttctatggcgatccatttaacaggcatcttagccatgcggccttggcggtaataatcgcccctgtaaatcttcttagagaggccgaagtccgcaacacagacagtcatgtcatctcgcaacatgcagtttcgagcagctaaatctcgatgaagaaaattcctgttgctcagatactccattcccagggccatatccaccatgaactttaatggtgtctgcagaggaatatgctttggtcctgtcttcaatcgggaataaagtaagtaagtatgcaggccccc

SEQ ID NO: 441897 - DNA, 472 bp, Homo Sapiens
tcctttgtaagaaggatttattagattatatggaaatggacacggtacagaaggtctgtggcacagtcagggttctgcaggaccccagagcatcagtagaaatgctggtgttccaccttccccagggccgcctttgcctgggcttcagagatgcagctgaggcctggcctccaaatgctgtgggcagtcctgcaggccatcctctgggcagactggcctgactcacggtgactattgtagtttctgtgaacctctgggttttggtcccactgttgtcgagagccttgaccaagtgtaaacgaatccattacggatgaaagttgcagccttggagggtgtcacagcagagaagaaagagcgggagcggagtttggcaggcgaacataagcgtggaaccagcagctgcaagttgggaactgtcaggacagcatcttagtttggacagcaggtttccttctaaactggaggccag

SEQ ID NO: 441898 - DNA, 1235 bp, Homo Sapiens
  misc_feature (1211)..(1211): n is a, c, g, or t
  misc_feature (1222)..(1222): n is a, c, g, or t
cttgttgtttggcgcgttctgtctgcgtcgcgcttctggtggcgggtccgtgtgcttcttgcctggggttgtctctgtggttcctgttccttgttttgtgtcgtcttttggtcgctcgctgctcgttgtcgttccttcgttggctgtttcgtcgtctttgtgcttgtgtgtgtcggtcgtcgcgcctgctgggctgcttgcttgttctgcgctcgcgtgtctgcctgtcttcgctccccttccttcgtgtcgctgctctcgtgttgtgcagggtgtggcgtggtccttgctctggcttctgtgctgtttgcgtgtcgtggtgcgtcggctattgtctgtggacttgttcgtgggcgttctccgcttggccgtgtgggttgctgccttttgttggctgtctggttggggtggtgttggttgcgtatgtctgttgatgtccgctagtgtgtgtcgttcgccgttgtgtctgcggtccgtcggattgtggactacgccgaccgtgcctgtcgtgcttctgggggtattctattgtttgttgcgtcgtggttaggtagggctgtcgttctcgcttgtgggcaaagtgactagtggacgttatggtatcagtagatagtgtgttcctttgggcttgatagtctggaggctagtgacagatctagcggtacgtgtactcatgtataccatgatcttcatggtgctctgtgacagccgttcatgttagtcttctatgatagggctcttttctggtggcacccttttgggtttagattctttgtggtgaggatagtttcctttcagagctgctcgtgtcccagtgatagacaatctagcttcctccatatttgatgtttgatttttgtggtgaatccaacatgtgtctgtcttgttttgaagctggtttgaagtaaatcgtataattgactgcttcctgtccccatggactctctgttctctttcccgctgcagcatggtctggtatctaccgggtctcagatggcagcgcgcggggctgacgaccccggggctggggatcgaggggaaacctggcctagcgggcatgcagcgccttgtcatgtcggcgccgctggcgacggcggcatgagccgtggctggagaagttgggtgcgtggttgccgtcttgctgcctgggactccgggagtctgtcggagcagaggtgggcggcacccccttctctcttcatggcggatcntaccccgcggncggtaccaagcct

SEQ ID NO: 441899 - DNA, 704 bp, Homo Sapiens
cacagtcacataatcaatcattttactaaatacaagcatattttcattcacatacagctaaataaagcatttttcacatttcattacagtgcacaacaaagtgaggaaaagtatacagtacattttattctgaaatatgagacaatctaatccaacatgcagttgtggtctttgttacaagttagtttatcttttctttacctatgtagtaaaatagcttctaaagctttatccttagtattatattaacacctgattcttttcacacttattttctaaaacccacttattgcagtgacaatgggtactggaattctactaaaatgatttttaaattttctgggaacttatttaggcaattaggctcggccacctctgctggatttatgctgaatatttttaaacctgccagaaaatgccaggagtgggaatactgtacatataataaattttagtgaagttgtagggaagttttgattctttccttctttgaactgacagaatccagtcgactctcatttacccactggataatcttgctttcagaatcttctaaacataattcagtatagcagttgatgaaattttgtgtaatgaaatttgccatgttttggttgccttttacaaccacgaaggtggcaatttaataccccacctaagccagctcttgtgtgaatattgaggatgatcagttcacttgtggt

SEQ ID NO: 441900 - DNA, 600 bp, Homo Sapiens; identical to SEQ ID NO: 144615

SEQ ID NO: 441901 - DNA, 613 bp, Homo Sapiens
  misc_feature (479)..(491): n is a, c, g, or t
  misc_feature (576)..(576): n is a, c, g, or t
cctctgtgcatcctagaaaaactcccaggactagacttaggaggaggcaatcaagttatgtggtaaaacaagagtgccttttctgttggatatccactttagtttcctggcttccagggcataagatgtttagaaactttttttctctaaacataagaattattgtgtaccacaattttgaaccaccgatttccatatcttcagcagctatcaacttgccaattccctttgggtctcctttgtatattcttatgtttccttctgtttccagttgtcctcaaaaagagttgaggggggcatgactcttataaaatggataaaaatgaaactgtacagatgtttgcctcccttgtatctgtgagcatgatctctatcaggctggaaaatctgctttatcattttggatatttgactattttgtattcagcattacttgactccttatgtgcatggcaatgtattaaaatgtgggatttctnnnnnnnnnnnnncactttctctatcttatcctcaccctttttaaatataaaaaaattaactggccgccgttttacaacggtcggacttgtgcctggnggtacccaaattacgccttgggcttccccttttgccg

SEQ ID NO: 441902 - DNA, 1075 bp, Homo Sapiens
  misc_feature (702)..(822): n is a, c, g, or t
  misc_feature (889)..(940): n is a, c, g, or t
  misc_feature (962)..(980): n is a, c, g, or t
catgaacagaaagaaaagtcttttattagtactgtgtagggaaggctaaagaaatatacatttaattcagaataatttttaagaaaaaacgtggggttccaagaaatggtgatttacattcaaatgaacatgtacatttgcaaaacctggataagtagatattttcatgaagcacgctacaagaaaattcacacagaattatttggtttttcaaaggcctctttcaaagtacagactccaagtccaaagcaaatacccatggcatgaacaaataggatgcctaagattctaacatttgcttcggcatggctttcctcctcacttccctacctcacaacaagaaaaaatttcctagatgggacaatggcaagatattgtgctaatacatttcataggatttctagatgctgggctataacatccaggttacaatttggtgacggatttttttatttctattgcaaatggactacactccaaaaacaaaaagattcttgccatagcatccaaacatccctatgtagacccacacttcctctcaatacagaaagaggatcactcagaaaggacaaagctggcagaccaagaaaggaggcaagggtaaactctgtcactggccaattatctaaaaccaaaatagcagcctctgttatcaaagttgtcagttaaaactgtcagctgtcaggcacagtgacacacacnnnnnnnnnnnnnnnnnnnnnnnnnnnnnnnnnnnnnnnnnnnnnnnnnnnnnnnnnnnnnnnnnnnnnnnnnnnnnnnnnnnnnnnnnnnnnnnnnnnnnnnnnnnnnnnnnnnnnnnnntgtggtggtgtgtgcctgtagtcccagctgctcaggaggataaggtgagaggaacacttgagcccannnnnnnnnnnnnnnnnnnnnnnnnnnnnnnnnnnnnnnnnnnnnnnnnnnntgacaaagggagactctgtccnnnnnnnnnnnnnnnnnnntaagtcgccagctctctcctttataaacagtctttagactggtttgtatcatgccccttgatgtaccagagatatgtttaaccaacctagttttg

SEQ ID NO: 441903 - DNA, 426 bp, Homo Sapiens
  misc_feature (54)..(54): n is a, c, g, or t
  misc_feature (59)..(59): n is a, c, g, or t
  misc_feature (71)..(71): n is a, c, g, or t
ctaaccttggccttgtcaacccccggggtgttttaactgttccccctgttgttnttccnaataccccttgncccaaacctctgtaaaaaatcctttccattaaaactgtccttcaaatcagtgcttcgtgtgtgcccatctctttccctgcccaagacactgaaaagtccccaaggagaaccctccctaaagggagagagtctttgctgatgaccatcaagctcataagtaagggctgcgtgtgcctgaggctgctgtgtccctctggacacaggcaacctgtctttgtgctatgattggacagaatagctgggcacatggatgtggacccagataactctgtttgggcacctctccacaggctgggccacaggacattgtgggtggtcattgatcatgcctggcagaaccagtcctcaacagcaa

SEQ ID NO: 441904 - DNA, 1185 bp, Homo Sapiens
tttttgccattaaagaaatattttattttgtctatatcattgtagatgctagtacccttagattagtaaaacaaaactaccatatgatctttatttaaaaagccttgggttaagctctggagaattttcataggcaaattcttctgtatgagctggatcagtaaacacgccaataaaatctatctccaggaagaatggaccatccactttatcagccaaggtgaatcctatagaagagatcttatcaagcggaagctcatgctgaacatcccggattcttcctcgattagagaagaaaaatttggaaaaaggaatcttgacctcctgccagtagggtcccccgcgggtgaacatgaagtaactatacatctgattcgtcctctggaagaaatctgtgtcctccttgatattcaccatccaaggccgaccatccccacgtacacggagatacagagtattgaactgggaccaatcgtaagacatcttcctctcaaaagcaccccttggaatcctggatatcattgcacagtacccacttcgggtagactccccgtcctgaggcgcctcagagctcagagttccatatagcagtgcactttggttattcttgcccattttcaaaaacacttcacttctgcctccaatcgtcttatcagaagtcactgtccacttatccaaatcttctttcccccggaattgccagacaaccttggcttgttccagcaagacctcatgcagagggtggccttccggtcctctccaatgatccacaatttcatccttcaaaagcctaaaatggtatattgccttcatctctaattgctttatcgaaactaacatcaggcttctcctcagaagaagttatatccaaagcaacttctttctggtgatctccttgcaaatccccttcagtcttcctctgtgaggaggctttgccaggagaagccactggtttctgaagactactggaatactctgcaaagagaatacccaaaaatggatacaaggcagaagttggcttagagaattttctgagaaaataagtaccatgcagcaatttgtgaaccaaagccatggtacaaaaaaatcaaaatgtaagtttcttcctgggctagcaagggccaccaagaagcttcagcaaatagcccaattctacctccccgagcctatagtgtaccttccgct

SEQ ID NO: 441905 - DNA, 680 bp, Homo Sapiens
  misc_feature (357)..(503): n is a, c, g, or t
  misc_feature (537)..(537): n is a, c, g, or t
tggtatattgcttcatctctaattgctttatcgaaactaacatcaggcttctcctcagaagaagttatatccaaagcaacttctttctggtgatctccttgcaaatccccttcagtcttcctctgtgaggaggctttgccaggagaagccactggtttctgaagactactggaatactctgcaaagagaatacccaaaaatggatacaaggcagaagttggcttagagaattttctgagaaaataagtaccatgcagcaatttgtgaaccaaagccatggtacaaaaaaatcaaaatgtaagtttcttcctgggctagcaagggccaccaagaagcttcagcaaatagcccaattcnnnnnnnnnnnnnnnnnnnnnnnnnnnnnnnnnnnnnnnnnnnnnnnnnnnnnnnnnnnnnnnnnnnnnnnnnnnnnnnnnnnnnnnnnnnnnnnnnnnnnnnnnnnnnnnnnnnnnnnnnnnnnnnnnnnnnnnnnnnnnnnnnnnattctttcgccttggcgtatacctcccgcactcnacggcctggctccggaggctagacggttcgccgcgcttgggaggccccctcaaccctcaagtgccagggctctgtcgcctccccacacccgggacacaccaaccgccggcctgccgccgcttacctccccgagcctatccgct

SEQ ID NO: 441906 - DNA, 1511 bp, Homo Sapiens
  misc_feature (99)..(99): n is a, c, g, or t
catctgccgcgccagagtgtaagattgttgctaggactgaaccttacgccgaacaggaatgttgtgtgagatgaatatctcgttggcgcgtcgcgcacntgcgtgcggagaaattgcgtaaatgtggcgagagtagtgtgtttgtttatacgtgtaaatagtataaaaattgtttggcaatttgctctcactctcgcaagtagtaagggtgtgggagagtaagaggaagaaagatattcggaagtgtcttagttttcccaaacttctcgagggagaatatatagcaattcgaaaaagaggttgtgttcagaggaagtttacgggctgaaataaataaccaagaggtgtgacaatcggtgtttataacaatatagaggtatgttaacttggatgacatgtaaggccccttgcttgtaagggggtctattgccccccgggcgggtggagtgctgaatcgtaaaggggtgtttttcacgaaacggaaaaggttgactaaacttttccaaggaaaaagcggtttgcaaaaaaaaggctcggctcccagtcaaggtttccatcaagggcctttgtatgaacttcgaaaattttggcttttttaaagacaaaagctaaaaattcttcctccaagagaagtgaaaaatggtaggagttgaggtaaatgaggttattataacaagaagggaacttttgttgttggcattaagagattttgaaggaattttgttggaaaagggtggtacatttgacaggaggggtcaaccacatattcataatgtgtacagaaatagcactgtaacaccaagatgagggacacagataacctattgatacgagcaacagaaccagcctccctcttctttctgtcacttcatactaaagattttatgctgaaatctcaggtttgccgtaacttttccacctttttttaaaatttatttttctctggacttctaatgtttccatcctatgaaacaacataccagctccactactgatgcatttggtaataaaaagtcacatggtaagtatttgccttaaaaatgacttttatcgtctaccccaaaggtgtttttacaggatgcaggttctgtagactgacatattcccaaatcatattagccactatcaaaagccaactcagctgaagcttatctattttctactacagtagttattttgaatgtatagagctaaagaggcctgtggctaacagacagggattccatgcacaagagcttttaagtatgtgcccatgcagtgcaaggccctgtgaacccaacaggccctgtccctcatcccatccaatgactatacttcaaagggaaagaaagatgtggattgcctgtatgttgcttcaatatgagatctctgagcaagctgggttggtttagcagatctagcaagagacaaataataagagaaaccaacataaaggtaatcagaagtttcaaactttccttctaattgatgaaaagataccctgctccaactccccaaacataaagcactgc

SEQ ID NO: 441907 - DNA, 597 bp, Homo Sapiens
tttttttacaaaacaggagaaaagagtgaatcgggttgggggaggtgacacatttctccacaaaggtacaaaattgcctatagaaagtcagcttcggaatgccgagcccaggctgctgagatgaggcgttcctgggcatccctctcccaaatgtccttcagatctggctggggtcactcccacattgagggcagccccccgaggtgagatggagtggcctccttcagcccttgcccaggaggcacaagagcaagcaactgagactgtacagagaaagagaagaggaaggggtgcagcccggggacacaggtaggggacagccaagccaggcccaggagcctctgggcagagagaagatggggaggcaggaggctctagccaaagtccctcctgttccttggagatgttcctcagaatggcagcagaggtgaccctaggaggtaagggcaactttttcgaggctgcagaagcacccccagggccacaaagccccatctgtcttggcccagctgccaggcctcaagcacgtgggtccatgtccccctggcagggcatctggcccagactgcttctcttttggtaaaaagtagtcctagt

SEQ ID NO: 441908 - DNA, 211 bp, Homo Sapiens
gtaactgtacatcacagaaaacagaaacagttttggtggtataatggtacatcagaaaatgatggctgaaggtggttatttggccctgatgggcaggtttcacagttttaaaaggaaaacatcaatatgctggaaaaagaaagttattgaggtcatcaggaaagtaaattatcctaaaacacaatctaatttatttttaaagtcaattttg

SEQ ID NO: 441909 - DNA, 1236 bp, Homo Sapiens
tttgagtagttaaaatgtgtttattcatttacaaacccagtaacatgagaagaaactcagtggaaaccttgcttggtggagacagtgcacagtgttagtgccacattcacaggggcagaaatgctcggtcaccctgtgcacccaaagtcacccaggatctctagaaaagatcccacttactgaagtgcctcggatgtcttcagggccagattgtaactacacaggaacagggaagggctaagctgaactgcacactgacaaacacaaacgatgagtcacaggactctacagtagttacaatggcatttttatatgtcccaagtgttgactggagagtaaagtgttaactgagctgctagaacacccttcactgaaagagctttctaccccacgcccattgttccgaagaaggagaggctatgtggggcggatgggaacccacacaccgagatgaacttttctctttcttcccatctgcacccaccatctgacattctggagtgtaaggcactagaacctggcttagagaatagtggggctctaagctccagttcttggtgtgcaaaggaaattctgacatacatcttttgaaagagatgctaatttaaccctccctatctcctgtaatttctgtctttgacagacaggaaaataagaaggcagaagatggtctgcaaaggataaaaacaggtgcatctaagaatgagaaaaatggctcatgaagaaatgtgtaactctccaagagatgcagacactctgctcagagaagtcaagaaccataaacaactcttcatgtttcatggacaaagggaaggcaaaggcatacaaaaatactcagttgtcttgaaaagtgtactggtagtgatcagggctacaaaggcgagccctgtactgacaatggaggagccttacaactcagcaccttaaattgttggcctgaagtggtggcggggagggaggcgctgacggagagacccatggctcaccacttattgcgtgtacacaaggcctggggcaagcctcacaagtctaccatttcttccactcaactgtgcttctcctgaatccatgtgcctgaaatgacatatgcaaggtgaacattctttatactgtgttaatactgcttatatcaatgttcgtgaggggtgtgtgggggatggggtgcagcaggaaaattagaatggcaggaggttcttatttattattaagcactgttgaccaaacctctatcttaga

SEQ ID NO: 441910 - DNA, 1319 bp, Homo Sapiens
  misc_feature (225)..(249): n is a, c, g, or t
  misc_feature (272)..(525): n is a, c, g, or t
  misc_feature (1192)..(1200): n is a, c, g, or t
  misc_feature (1236)..(1236): n is a, c, g, or t
  misc_feature (1302)..(1302): n is a, c, g, or t
ctgaatttgaaaccccccattttttcttttcaccaccctgttgagcaattttcccaaaaaaagggcagcaattattaaattgaattcaagtaagccagccaaagataggtcctaaattgctagtcccagtagaaccacctgatcctaaaccagtgcgaaacaaacagtaacaatgtccccagctgacttcagctaagaaccaatggctcctacccccgccccgcnnnnnnnnnnnnnnnnnnnnnnnnngagacggagtcttgctctgtccnnnnnnnnnnnnnnnnnnnnnnnnnnnnnnnnnnnnnnnnnnnnnnnnnnnnnnnnnnnnnnnnnnnnnnnnnnnnnnnnnnnnnnnnnnnnnnnnnnnnnnnnnnnnnnnnnnnnnnnnnnnnnnnnnnnnnnnnnnnnnnnnnnnnnnnnnnnnnnnnnnnnnnnnnnnnnnnnnnnnnnnnnnnnnnnnnnnnnnnnnnnnnnnnnnnnnnnnnnnnnnnnnnnnnnnnnnnnnnnnnnnnnnnnnnnnnngtgtgagccaccgtgccgagccagccccattttttaaatgatgttttggttaagagtggaccatgagaattagctgacagcatcccctttctctctccctgccttggtgggaccctccctgtgtgaccttggtcaagtcctcgaacttttgtcccgtatttaagatggagctgttttacctacttcataagacagttgcgaggtgccattgattcttgactgcaaaataccttgaaacccttatataaagactgaagtcaacggagcctagtgaaagacttactttgtggcttgtggttgaaagtcacatcaaaagacaaatgtggccacgttcaggaattggagacttactggcatggctctacagctgctcagttattaatcatgcagactaacctgtcaacactgggagatgcaacatagcaaaaggacagagaaattagaattttttgtgcagaaagccctaaattcccacctgaatgtaacttacagctcccttacctactctcacacatgccctcaaacatgctagattgggcttatacataggccaacacaaaatacaaacgtgacgtgttcatgtagcctagtggctatatgcctattctccatgtaccctgcatggtagtgctgcaaactttaaagtacatttctttcacagcagtannnnnnnnncataagtggcatataaatgtcattcaatgaaatggnggaaatcacgtttgaggaagttgggtcctgtcatctcccattgagcaaagactgggcagggagatnattaaaatttaaatttg

SEQ ID NO: 441911 - DNA, 1856 bp, Homo Sapiens
  misc_feature (129)..(129): n is a, c, g, or t
  misc_feature (133)..(133): n is a, c, g, or t
  misc_feature (966)..(980): n is a, c, g, or t
tctttaagaaaaccagtttcatgggcccatgttcacgtttacccattctggggcccccgggcgccccaagggaaatgggtttagaaaggctttcttcaagggcccggaaggcggcccggccaaggaaanaatnggtggcgatggggggttgtggtttcgagggttaataaacagctttatttgccttgtacagcatcaattttcttacattctcagttaattggccattaaagtgctggaaattttcttaatcatgataacatttgttaaaaagaaatcagaactaatatcaggaacatggcggcatgaaggaaacagttcccttacaaaacacagaaaatggaagcccctcatgttgagggggtgggttggacaatttgcaaacagattctaatttcctctcaccgtcagcaccaaactggctgggaccaccacccctgggtgaaagaaacaacactaaagaaccctaaaaacacccacacaccctgactaccaccacctctgggccatctgtgggcgtttgctgtttgaacagatccagtctcaggaaagaggaagacctgacctccgtctgcaacccatcaccccacccacccttactaacaaaagcccccaaagtcattacaatgaaaaagtgggtttccattaccccaaaactaacaatgttcagtaaaaatgaggataataaacacaaaagcttgcttagtaaacaggagctctcagcagtcaatgcaaaaaaatatatatatatgaaatcttaaggcaaatactgttgacttttgcacatgggctggacgaacttggaactctttacctatctggtatagttccaggagcctacaggcggtcggtttttcagcgcttgccaccgggccaggcaaggtctttgcatgattgctgaggcagtcggtgtgtttccctttggagtttatataggaacacaccacccaaggctgatgttttgtnnnnnnnnnnnnnnngtacacacatacaaaggcctgctactctttctttgtggaaactgacagctccacctcgggaagctggatgccaaccttattcccactttcattggtagaagaggaggacagtcgggactttttaggaggccaagggacaccccattcccctgtaacttgcctgtctcatcatcgctcccagtcacgtcataatgacctttgctctttgacccccaatccaccaaaggtaccgaatttcagcttcccgtgtttccctttaactttcccaccttccagagacacttccccaccttcaaactccagcgtccccgtcggggtggaaggtccagagaactctctttcatcactgaatgaatttgagcggtgccgtggcttcttacttttaaataaggagaatttgcctttcggtgaagaggcttcggcctctgcctctccttccagagagcccaggctggcctttgatcttttcaggtcacctttggacccagaaattgatgcttctggtgagccagtgacaccacctttccctttaggtttggaaaaattaaacttgggcattttgatcttggactttttcagtttgacttcagactcttcccactcgccgtctccagcaccagcttggatgctggcctctgctttagggaagtgaacatccacccccatttctctgccaaccagctcacggccagagaaagtaaatttggggatcttcattttagggaatgttacttttccagatcacactttccaagtgaccttgaggcccagacacactcagcccaggagcctggagtccaatctgacctcctttcacacctccttccacctttggtcctgagaaatgaaggcccccagcaaacttagatgtgtccc

SEQ ID NO: 441912 - DNA, 1271 bp, Homo Sapiens
  misc_feature (54)..(65): n is a, c, g, or t
  misc_feature (82)..(135): n is a, c, g, or t
  misc_feature (172)..(182): n is a, c, g, or t
  misc_feature (237)..(247): n is a, c, g, or t
  misc_feature (316)..(443): n is a, c, g, or t
  misc_feature (446)..(447): n is a, c, g, or t
tgtgcggcgaaggtttttataaattttccccccctcttccccaaaaataccacnnnnnnnnnnnnaaattataataaagagnnnnnnnnnnnnnnnnnnnnnnnnnnnnnnnnnnnnnnnnnnnnnnnnnnnnnnttggtgttttttaaaaaccttcgtgttccccgggggnnnnnnnnnnnggggaaacccaacccctttcttttcccgggtttttttgggaaacaattttgcccnnnnnnnnnnnccttggggggccccgccccaaaaaaaggttttaaaaatttttttgggggggggggggcgccccaatttnnnnnnnnnnnnnnnnnnnnnnnnnnnnnnnnnnnnnnnnnnnnnnnnnnnnnnnnnnnnnnnnnnnnnnnnnnnnnnnnnnnnnnnnnnnnnnnnnnnnnnnnnnnnnnnnnnnnnnnnnnnnnnnncgnnggtaaactaaaacttccaagttattattattctttttttatgttagcttagccatcatgcaaaatttactggtgaagcagttaataaaacacacatcccattgaagggttttgtacatttcagtccttacaaataacaaagcaatgataaacccggcacggtcctgagaggaaattcctttgcttcttaaagctgccagtcccggctttttgggggctcatgtgttataaattctggaagctcttttagctgcagtttgagcatcaggcaaatcttcttcctcttcctcggttcgcttgtgttttaaaaacaagtcagactttaagaagcggctgtagctgtcgtacttcatgagattaaagatctggtcctggagtttctggaacatcagagggtgcggttcttccaggatcttctcgttgagccgagactgcccctccacgttgacctgtgatgaggccttgctggacagaaaggtcatgtagatctcctttgccttttcctgcatctgcgtcttatcttgcattttcttaaaatcttcacatgctagccaaaacaaaacattttcttcactgaattccttttttaaaaattccctaaatcttttcacgccttctgggtcttccagcagattctccagggatgccgcccatttggctgtgctcttgaggctctggtggctgctgctggaactgccatcgctgtcgtggatgtgttccatgctctggtgtccacctgagaagttccacgcagaccaacaatccactgccttcccagagacgccttgtgtgagaaaggcagagactggagggctcccgagcaca

SEQ ID NO: 441913 - DNA, 485 bp, Homo Sapiens
ctttcaatcatggcagaagtcacctcttcacagggcagcaggaggcagaatgggtgccgagtgaaaggagaagccccttataaaaccatcagatcttgtgcgaaatcactcactaccactagaactgcatgggggaaactgcccccatgatgcagtgatctcaacaggatcctgcccttgacatgtggggattattataattcaaggtgaaatttgggtggggacacatatcaccgaaaattatttttacttctggcatatagaaatgcagttatttttgtagattttgtagaaatctttccttattaatttttttagacttttattttaggttcaggggtacatgtgaaggtttgttttgtaggtgtcatgtcatgggggtttgttgtatagattatttcatcaccaaggtattaagcctaataaccattagttattttttctactgctctcctttttactaccctccaccctcaagtagcccg

SEQ ID NO: 441914 - DNA, 641 bp, Homo Sapiens
  misc_feature (382)..(382): n is a, c, g, or t
gttgttgctgctgtttttactcggacaatgcttattttacagcggaattgacaaataaagccttattttacacatccgaagaaacaccatcacaggaggtttgtaggtcggctgtgtgctttccaaatcagcaaaatagattcttcccatccaaccccctttcctcttgtagagtagggtgtggctcgtggggcttcgtctctctgcaggcacagaaactggcagacctggtccctcctgagcgggccctgctcaagggaatggtgccagattttgaacacaggtaaacaggctccttcataacaacactgtgcatttctgtgtcattttgtttattgctcactgagttgttgccacctcagctcttggtggaaaacagtgnggtgtccagaaattgctgacacaagaagatggattgcctatgggtcgttagggacacagggcagccccagccagatcccagctggtccatgcagggcatcgtcagtagaagctcaacgtcccacttcgtaaccaggctacaagacaccaagtccggtcaccatggaaaagaattaaacctagagaaagagcctcatgatctgcactcagacgctccccatcagaaaggaactgttttctttatcggtcatgctctttcc

SEQ ID NO: 441915 - DNA, 429 bp, Homo Sapiens
aaaaaaaacggagtttatgtgcagggatagtcggggtagtggagagaggccatttagtagtgggggcttcgctcacccccgatagggggcgccaggaagccaagaaggatgtgcagcggcggactggttccaagccccttcagaggcgcggggtcttagggggagggactggcttccgggcccaagtaggaggcagtccggctctcaggagtgctataaatggttaaagccccaggcaggcccagggctgggcctcccaaggccgcctggacatccagcaggagtggggccccgagcgtggggtccttccctgggcttggagaatttaaccccttgaccgccagctcaggctcaccccgctctggaaccaagggctgcatcaaggacagctccatgtccaagtccatcagggtccattctcgcccttgg

SEQ ID NO: 441916 - DNA, 683 bp, Homo Sapiens
  misc_feature (55)..(55): n is a, c, g, or t
attgtggggaataatttttattttacgctgcaaggaaagagagagaacccagcanatataggtaggacagaaaggaagacagccagatcccgtgattgacttggcatgaaaatgagaaaatgcagacagacctcaacattcaacaacatccatacagcactgctggaggaagaggaagatttgtgcagaccaagagcaccacggactacaactgcccagcttcatctaaatacttgttaacctctttggtcatttctctttttaaataaatgcccatagcagtatttggagtcttttcttttctcctaaatccacaaactctcttctttctctttggacagatgacctcttgtcatagttaagcagagagtgggcaggatattcctgataggaggaactacatgaataaaggggtaagagcacagaaatttagctacagctccatggtgagccattaaaaggaaagagacactttacctgtgctccttggcaaggacctgccaaatgtgggagctaaggtttgtgggaacggaaagagatatggctgaagtagatgagtaagactcttattagtgatagtcttgaacctcaaactaaggattttagactgtatcccatggagataaaaggactagccatggaggcaaaaagacctggattcaaattctggctctgcaacatac

SEQ ID NO: 441917 - DNA, 514 bp, Homo Sapiens
aaggaatatggttgcagcaaaacagaaaggatcccaaagtggttaggggccttgtctaatgcacttctgaaagtccattataaagatgaatagaaaagcaaatggtaggttttcagttgacccagaaaccacacatagctataagaaacataattgtgcatagttatttattcattcagaatgtgatatgttggctagctctacattcccagtctaccaaagaacagggctgtctactttgctaaacccagggtcctttcgaagctcccagtaggtgtcgttagaaacccaggcttctctttgattggcatcaataacttttttaaaaaattttggtatatgttcaagattgttttcttccatatatcgtctccgagatctctggagttcctctactctttgcttctctgatgctgcagcttctaaatttccttcttccaaaaatctttgatctggccggaaccgggcgtctgttggtggaaggagatcttttagtactggatctaactcattg

SEQ ID NO: 441918 - DNA, 532 bp, Homo Sapiens
  misc_feature (100)..(119): n is a, c, g, or t
aacagtcttgaaaatgctttattgaaatgtgtgacttatgtgcagatgtgtttgaaagaccacagcttgaaaactgatttttgaaacttctcaacaaccnnnnnnnnnnnnnnnnnnnnccctaatgggcttgacttctagtgtaaccagaagcctggtgtaaagttttcctttaaacattatccattacagaactaaagaaaacaaagctattgtatttggaaatcgttggagtttgaagtttcagaggagaagcaacagtttttcagacatgtagggtgacttcttttttggttacatttggatgaacatggacttcacagttctcggaagaacaccggaggggtgttcaagtctgtatgcttgtcatgttgaagaaacggagatacacggacaggaaaggaaaaggatgacaggagaaagagaggagactttgaaaagggctcagagaaaagagaactggaacgagacatgattaggttaagtctagttataaatttatcagaagctgtgcgcacctttttaaaagtcc

SEQ ID NO: 441919 - DNA, 429 bp, Homo Sapiens
tcttttctacaaactatctcccgccctccccagccccacccacacacccattatccagtatactgaatgggagttgtaactctttaggaagacagctaattgatttacagtactctaaaaccaaccctgaaaactgataatctcattcacttactataacttcagtgctgtagttgacaggaaagaaaaagttaccttaaggctcaagggaaagtaacttattaaattgtgaatgcagcattatttactctcccatccattggaaactagcaaaatgcattctggatcaataatacaaaccttctaacattagcaaagatttctactcttcttacacagagttagaacaatattcataagcaattatctaagggagcctgagaaactatgatccacatcacacaaagatttcattgatttcatggaccc

SEQ ID NO: 441920 - DNA, 1703 bp, Homo Sapiens
  misc_feature (313)..(400): n is a, c, g, or t
  misc_feature (441)..(521): n is a, c, g, or t
  misc_feature (1215)..(1227): n is a, c, g, or t
gacctgggctcctagaacccatttgccttgatgagcttgccttttgtgacttgacactggggacgtggagtggcggtgtccaggggcgccccgcccctgcggccccaccaggtactgaaagacccgcaggctgagcgggtagaacagccgggtagggcagatagctgtctatgttggttcttgtttgggatttattttcaacaagttacttttaggatccttttggggctggagactgagtcttgaaccacagaagggaataaattatacaccactgtcattctctctctccctctgtctcttccttttaccnnnnnnnnnnnnnnnnnnnnnnnnnnnnnnnnnnnnnnnnnnnnnnnnnnnnnnnnnnnnnnnnnnnnnnnnnnnnnnnnnnnnnnnngtattgctttccttctagatttctagcttgccaccgttcannnnnnnnnnnnnnnnnnnnnnnnnnnnnnnnnnnnnnnnnnnnnnnnnnnnnnnnnnnnnnnnnnnnnnnnnnnnnnnnntgccggggtccggaccccggcacacagaaatacaacagacagggaatccaccagacttcatccaaacttcaggggtgtctaggccaaaagcgcctttaagagatgctggtttgttattggataaaggccgagatgacagagccactgcttcatcacactgactcacattttggtttgcaatccactttcctctctcctcatttccacatggaggaaaaaaagtgattttcctttcctcctcccagtaacatttctgactgaagtgttggtctaagactgcgaacaatcaatcctgtccaacaggggtgttgccgggtgtcacctactaggaccagcctacagagagcccagaaccacctggtgtgggagtgctgctgctgacagagaatatgcaatgctcctcgccactggtgttaacactaaaggctctgctaaaatggactaaattacatgagtcaacatcatgttttctgtttttggcatttcaacccatagagaatttctatctgaaacaagctgctctgaggcttgaagataccccccagtatcttcaaaagctgttctgcagaatcaggagtaacatttaatactgttgtcatctatagcattctttgtttctacgtgatttgtcaatgccgatactatatcctctaaaatcaaaagtatgccaaaaggcactaatctttcacacttnnnnnnnnnnnnnggttatgtggtccccccctccccaaagccaaccctagtgatggccctcactttcttgcttgtttctttagggggcctgaggactgactatgttagatctctatattattgaagctgaacaactgattacatttctaaaactctttctacccaggacttttaaaacactaggtgaagaagaataaggcatattagtaggtacggacaaattctcaaaaaagtacagttgggctttgaaaagtctgtggcatttttttaaattctggatttgttgattttcaagtgctaaatacacagaatgtttatataggagacaaatatcttattggtttgttatttttttaaagcacttatttacagactctctgtagtagtaaaaactacctggaaaacatatttttctgccacacagaaagggttagacagtcatactcaggatgtatctcaaattatgatgaagaaagaacagtctaatcc

SEQ ID NO: 441921 - DNA, 1296 bp, Homo Sapiens
  misc_feature (89)..(116): n is a, c, g, or t
  misc_feature (132)..(443): n is a, c, g, or t
  misc_feature (450)..(485): n is a, c, g, or t
  misc_feature (1217)..(1227): n is a, c, g, or t
agttgttccctctgcatgtattttgcatatctaatgttcctgtttttattaattattttactatagtgcagactctggatatcctttgnnnnnnnnnnnnnnnnnnnnnnnnnnnnggagacagggtctcannnnnnnnnnnnnnnnnnnnnnnnnnnnnnnnnnnnnnnnnnnnnnnnnnnnnnnnnnnnnnnnnnnnnnnnnnnnnnnnnnnnnnnnnnnnnnnnnnnnnnnnnnnnnnnnnnnnnnnnnnnnnnnnnnnnnnnnnnnnnnnnnnnnnnnnnnnnnnnnnnnnnnnnnnnnnnnnnnnnnnnnnnnnnnnnnnnnnnnnnnnnnnnnnnnnnnnnnnnnnnnnnnnnnnnnnnnnnnnnnnnnnnnnnnnnnnnnnnnnnnnnnnnnnnnnnnnnnnnnnnnnnnnnnnnnnnnnnnnnnnnnnnnnnnnnggtctcnnnnnnnnnnnnnnnnnnnnnnnnnnnnnnnnnnnncttggggtaatttatgtccagcttaagtacctgaacagtttccggaaatgtatattttttttctgagaggcaaaggatgtaaacagcttctaagtagctttaatgtttctgtacagaaataagtttatccctgtaacattgtggtagagttttaatacagtatttagttttttattgggcttttttaaaaagttaacttttaacatagctgctcagggattaaatcagattggaaaacccattctgactccacatactgctacaaagaaatacatcgttgtttatattgagctgcaggagatagtacactttaaacttaagaaagttaaatgtttcacaataacattgcaatataatcttcagctattctctttccattggtaaaatctctgatggtgtgataactctttgccaacctacgaaactcatatctggaagaatcaccagctcccgtgagcagcttcatgtaaatagatgcactccaagcagattgcatgccttaggtgtttgtcttctagtaatcatggagtgtgcaacacccagagtaacactacaaggtgcaggactgcaaacagcaggtcctggctaaaaacccttaatgctgcattgctgccagttgtaaagagatgcctgaatggaggcaagttctgccctgtgggtgaaactgatgatgtactgtactgtcatatataaatccactaaatccagctacctggaactgtggccatgcannnnnnnnnnnctttacagacccagtgtgatagtaggccatgcatctgagatacgatattccttgggtactagaggggag

SEQ ID NO: 441922 - DNA, 1766 bp, Homo Sapiens
gtgaaccattttttttatatcctgcatttatttaagcaaaccaaatgtgtagagataggaaattaatgtgttataatgttttacaaatacagagagaaaacacagaatattaagaccctgaagagagtgcatttgagaacgcagttctatcataggagaccacttgcagggaacacattaaagccattgctgacacagccatctgtcattcctggtttgccgtcatttaagtagtttcaatagataaatcggtgatttgcttttaaacaaatattaatgttaatgattagggtagccttgaagggtttgtgagtgactgtactatacaatgtgatgctaggcttaatgtgtcatttcaatgctgttgtacattatgcaggggaaataatgtcttattacacattaactgcgacatccactaaaatgtgaactagtttgcataggttagtcctttgggcagcacgatgttgctctagtccaccaaggcttaaagattcacagtgtagaggaaaaaaatatgaattaaagcatttctactaaaatatattttaatagctggtgttaacaatttgcataacaaaagccaaattatattagtaacattgtaacattccgtgaagccccttcatttgcaaaacattcaatgttttcttcaaaactgttacactctcaaagttagtctcgcaaattaatcatcaaccacaattctacatattttgaagcaaacagaagccaaactgtacaatggttcaattttgatcacaggtcaaacatcaagtttcacaccatgcctgtaatagacttggtgctgcttcctaaatgctcagcaattcattgcatggacactggagaatgggactgtgatgcagttttctcttttcctttaaagtacatcattcttaacagcaactggattacaaagaagtgatactatgcaaactggataccatgtatcaagcacaaaaaatcctatggcattcccaggaatatactgaagtcatacagacaactgagaaaatttgctcaaagattcttccaagtttatgggttcaagtagtctaagcatcacagaataataaccacagaagcaacatacaatgccttgacttttttgatcaacagttgacagttagttgcgaggaaagggtccaaaaggcatggaatacttcagagacttttattttagcatccttgtcagtttacatagcttcttacttaactaaaagctctcccacctccatatcaccttaaccaaacaaccacatctagccacttttagattatcagaagcaaatcgcctaaggtataattaatttatgaagtgaagttcatcttgtgtagtgaatcccagcctcacaattattctatcttacaataggcattttaaatcccaaatcctaaagttaatgtttatatagctcaactctatataaatccacaaagaacctttcagaaatagatggaagaagtcggcattttctaaagttctaaatctttagagataaaatacaatcagctaacacctttaatatctgaggagcatcccacttccctaccacaaaaatatcaatcatgtgtaataaaatattactatagaataggcagcaacttgcttgcttggttttctttccaagaccatactagacaaacaagagtaatcaaaaaggcacctatatttgtatatatctgtattacagttttggtatatcttttatccactttctatagggatgtgttattaaagatcacacacattttcttcatct

SEQ ID NO: 441923 - DNA, 1031 bp, Homo Sapiens
  misc_feature (109)..(109): n is a, c, g, or t
ccaagcccccccaggtgttttcttctttttcccctccccgggagtttccaggaaaggcggttccaggggcccttccttggtcccgatatgtcccatccaggtcccattntgctcccagcaggtccacggttcacttcccatggattgacatgctgcctatgggctctcgccgctctgcaatctgcaggtagcccagtggccaggtactggtccatgtcctggtgggagggcttcctcaaaaaacttctggcgctcccttcaggttcatttgctgggggtgctccatttccaggacctttctgggcgtgctctgcatctagttcagctttgaagggttcaagttccttcctcttatttttcttgtaattctccagttgctgggactgcatatgtttgcatctttctaattcacactgcccacataagtcttccagatgcagcaggttgttctctacctcctcaaaactcgcctctaaatgagtcagatttgctgtcatggattctaagtctgcgattaaagctgggagctgctggagctgctcttgcagctccacgaggcttgtctttttcttctcccagtgcgcagaaagcatgaccacctcgctatccaccagctctccagcacttgcacagtctttggctcttctgtgaagtgcagcccatgtatcctcatacctgctaagtaattctaatccagcagagtactttggcaaaaatggaacagtcctgggtttgcttttcacttttgcttctcttgacttgtcacttaaagtcttcagcccggaggtgaaatcctgctgcacgctcagcagccgctcgcgaagggtctccagcattgccgccgccgccggtctcctctcctcaggcctcgggctgctgctgcctctgtcgccccctgggtcccacgccgccaaccccgcgctgtcaccgcgcgccccgcactcccactaccggccccgcccccggtctggtcctcgccgccgcgccgcaaccccagcctcgtgccgaattcgccacccaggcctcgctac

SEQ ID NO: 441924 - DNA, 1012 bp, Homo Sapiens
tggcccccattggccagggccaccgccccccttaaaatgcccttgtcgcaacgaaagaagggaaagagtttcccccgtgagcccccggcaggagaagtccggcacctcccctgcaaaacgccagtccttaacccacaaggagcagactcaaatggatttctgggtggtaaaggagggaaaacaaacaagaaagctctcaactcaccaaagttaccggagtggagcatgtcaaatctttgagaagaattcatgacggaaccacaccactgttgcagctgccacacagccgtgtggaaccgtggggttagggagccaggagctggctgtgagcttgggggtttatgcgtaagtgactggcagatggttctcacgtctcacctttggaggggagtggcatcgatactgccctggttcagctaatgcaagtttgtcaaccctacctaaggcgggggacagcacagtgttctcttctcctccagagttcaggaagacgtccagggcctcctggtccgatatgtccatcaggtccatctgctccagcatgtccacgttcacttccatggatgacatgctgcctatgggctctcgccgctctgcaatctgcaggtagccagtggacaggtactgctccatgtcctgctggaaggcttcctcaaaaaacttctgccgctccttcagcttcatttgctgggtgtgctccatttccaggaccttctgggcgtgctctgcatctagttcagagggatccctctgactacggtgagtcctggagatgacatggatgtgagacctgaatgagtgacacagaagctcagtgctggtcaagtgaagcctccagttaccaggccagcatgccctcacgatgcatcttctgggatgtagaacaaaggaagtgaggctgaagcccagaaagcagcttttttccgaagaaattgtagtcaagcctattagtcttgtttggctgatggcctaagcaagatatacattggatctactgcctctataaagcaac

SEQ ID NO: 441925 - DNA, 1045 bp, Homo Sapiens
  misc_feature (828)..(848): n is a, c, g, or t
  misc_feature (871)..(914): n is a, c, g, or t
caaagtaattatgttttattttaatgagacattaacttttcaaagttaattatctcttaaccaataaacacaatccatattcacaaccatgttgatgaacaaaaccaaactctgcaagatatttaaagaggtttattctgagccaatatgagtgaccatggctgggagaacaatcccaagaggtcctgagaaagtgtggtcagttacagcttggttttacacatttagggagacagaagttgcaggccaagacataaatcagtatgttagagtaggcagttaggcagaactgagcagggcaggagagggcccctatcaggtcgtcaggcaaccatcaggtgatggtcaggcagttgttaaactgtgtcgctaaaatgataattggttgcagctggttccagggacctgcagtctcccagtagatagaaaatacctggagctagtgatcagcagcttcctgataagatctcaggagctaggcgagtcggttcaaacatgtgcactaagaggcaaaatgggagtttaactggtatatgaccttcctctgggaatgcttgactggtaagagaaaaatgcctcaaacgagcatacacacaacttcagtaaacgcactgcacatgcggcccctcccaagtgctggcaggtcactgtgcatgcagacagcctgccccaaggggaaaattaagggaagaaaaacacaaaccccggaaccatgccaatgtataaaaccccaagcccaaggctgaacagggcacttggatctcttatgttgcccacttgaccctcttccaagtgtactttgcttcctttcattcctgctctaaaacnnnnnnnnnnnnnnnnnnnnngagatgaagtctcactctgtctnnnnnnnnnnnnnnnnnnnnnnnnnnnnnnnnnnnnnnnnnnnncatgtatttgggggtaaaatatttgtatttccctcaggtctcctatctgtcatgtgatgctatgccagagttaggttggaatttggtatcttattgctacagagtctgttctgtcagttttatgattgccc

SEQ ID NO: 441926 - DNA, 855 bp, Homo Sapiens
ttgggttcaaaagggtgtttactatttggccaaacaatattttttaattgtcagtcataaagtgaaatacatactaaaatatatattaaatattcaccaaatctgcattgctgctacatgaaaacattttttggtctgttggaaaatgtaattcctgagatcattgttgggctttgtcaatcattttcctcaccatcaaatcaccttaagtgacttgggagtgtgaatctaggatgttcaattttagaccaattttctctatcttctaaatgagtaaacaggctctgtcttttataaaaggtagaaaaataaccatggtgtgctaatttttttcaaggtataccatatggaaaagtataggctgaacacaaaggaagtcttttctgaatggctctcaatcacacataaggaacatatgttttccagttaatctgtccttgatgtacagcagtccagctgttgttttgcatttattaaaatattctctgctaaatagttatgtttgtctttaaaagtaaattgcataaaattacatccaatttctttctctaaaccaacatattcttcaccttcacaaagcaaacacatggtgcactgaaaccgaggtgttaccacgctttcacatactgttctgccattctgtgaggggctgcaaccacaacagtatagtcagaaacaaaagctatccaagctttttgttggaagtctggtgaagtttaccactctagccgagtaagcctctcaagccctgcaccttcggcagggcctagccacaaaccttcatcactttcctacaccccgtataatcgcagaactgcttcccacctcactatgcaagtccctactggccactcc

SEQ ID NO: 441927 - DNA, 2040 bp, Homo Sapiens
  misc_feature (930)..(1000): n is a, c, g, or t
  misc_feature (1306)..(1306): n is a, c, g, or t
  misc_feature (1315)..(1315): n is a, c, g, or t
  misc_feature (1382)..(1382): n is a, c, g, or t
  misc_feature (1396)..(1396): n is a, c, g, or t
  misc_feature (1459)..(1459): n is a, c, g, or t
  misc_feature (1464)..(1464): n is a, c, g, or t
  misc_feature (1691)..(1691): n is a, c, g, or t
  misc_feature (1695)..(1695): n is a, c, g, or t
  misc_feature (1753)..(1753): n is a, c, g, or t
  misc_feature (1764)..(1764): n is a, c, g, or t
  misc_feature (1794)..(1794): n is a, c, g, or t
  misc_feature (1798)..(1798): n is a, c, g, or t
  misc_feature (1824)..(1824): n is a, c, g, or t
  misc_feature (1915)..(1915): n is a, c, g, or t
  misc_feature (1923)..(1923): n is a, c, g, or t
  misc_feature (1948)..(1948): n is a, c, g, or t
  misc_feature (1983)..(1983): n is a, c, g, or t
  misc_feature (2012)..(2012): n is a, c, g, or t
tgcgtctagaggatcctgatgactacgggggaagcaggtcaggtgaaacaggggacacccatgtgtgtcccaagcaaaaattttgttgacatcggaatagtaacaagtattgaaataaaccataaacaagtggatgttgcaaaaaaaggacaagaagtttgtgtaaaaatagaacctatccctggtgagtcacccaaaatgtttggaagacattttgaagctacagatattcttgttagtaagatcagccggcagtccattgatgcactcaaagactggttcagagatgaaatgcagaagagtgactggcagcttattgtggagctgaagaaagtatttgaaatcatctaattttttcacatggagcaggaactggagtaaatgcaatactgtgttgtaatatcccaacaaaaatcagacaaaaaatggaacagacgtatttggacactgatggacttaagtatggaaggaagaaaaataggtgtataaaatgttttccatgagaaaccaagaaacttacactggtttgacagtggtcagttacatgtccccacagttccaatgtgcctgttcactcacctctcccttccccaacccttctctacttggctgctgttttaaagtttgcccttccccaaatttggatttttattacagatctaaagctctttcgattttatactgattaaatcagtactgcagtatttgattagcaaaaaaaccacctgcatcacggcaaacagtcccctcgggctcccgtgccgctctgcggccgccgaggcgtgctggaatcaatcctgggcggcgcctcgcgcccccaaaaaagcttcacaaacatttggtgttggcccgggcccccccaggagagagcccaaccgcgaccccagccgcgttcgctaagcaagccccccggacacggcacgctggctnnnnnnnnnnnnnnnnnnnnnnnnnnnnnnnnnnnnnnnnnnnnnnnnnnnnnnnnnnnnnnnnnnnnnnnagcgccctctcgttggcgtccccttcccgcgcgccccctcttcaccgaggaatggcgcccaccggtgcccccttcgcatttctctaacctcctcgcccctcctctgtcctcctcgtctccgctccccagcaccgaggcgataggagtgggtcgtcgcggtcttcccgcgttcccatcccctctcttttctcgcgcccacgtacggaagcggcgcgaacggctgcttcgtcgaccgccgcacgcgcgcgccggtcttggctcgcggtaagaatctgtctatacgagatcggccgtcgcgtccggcgngcgcgctcnctccctcgtcaccgccacgcaccgcacttgcctaccagacgctgcacccccgctgcgtccgctcccncgcctcacgcacgncactgctacattctgcgctgcttatgacgcccgcgcgtcctggcgcgtcacggcgacgaggcngactngtcttccgcagtgagacctggcgcctcccccgcatatatcgtctacgtctacttgctttaatatcaacatggccgccacggcatgccgcacgacagcgtgtataactatcgcacgcgctcgaccctgtcagcgcggcccgtccgtgctatcgcagcccaacgacgtacaccccacctacgcgcatgacttctcaccatgatcgacacgtctcgcgctccgctgcgtntccntctccacgagcacacgataccgtatcgtgccgtaggccggtactgcgccggcatgctntgagaggacancgcacgccatcggcggttggattccaggcntatntgccggacgcagtgaccacggcagangtaggaatgcgggtcgcaccggcttaggcagcagcacggcgccatgccccggtacctcccggccgacactgcatccctaccgccgctcctngacgtctngctaaggtccagtccatccacgggngttggatgcagggcaacgtgagtcaacgagggccncccacagtaccacgtacttcacagacctncgtcatgactggaacctctgacaacttt

SEQ ID NO: 441928 - DNA, 555 bp, Homo Sapiens
  misc_feature (28)..(28): n is a, c, g, or t
cacaggcatgactatggtcagtgagccnattctagtccattgcctgtgtgcagagagcaagctaagaatagagcattttgaaatggttgaaaaaaatcaaaataagactattttgtgatatgtagaaatcatatgaaatccagatttcagggcccatacatagttttattggaacagtcacactcgtttattgattggctgtggctgctttcattctacaaaggcagaggtgaacagctgggacacagatggcctgagaagcctaaaatattcactatctggccctttacagaacaagtttgcagacttccagcttaatgtgtcaaagatttttacaaagtccaattacacaaagccaccactagtgggaggataaattggtgcatcctcttctgaaggcaatcacaattttaaatgctgagatgctctgactcagcatttaggaatgtaacctacagattcctttgcacatgttcacggggatttccatgaggatatttcttggtacaccatcctttgtaatatcaaaggcctcaggggatctgcccacctcag

SEQ ID NO: 441929 - DNA, 2190 bp, Homo Sapiens
  misc_feature (144)..(155): n is a, c, g, or t
  misc_feature (1655)..(1754): n is a, c, g, or t
  misc_feature (1893)..(1991): n is a, c, g, or t
cagatcaacaacccctccccgtcgtaaacgctgaggaatgatgtggcaagaatgccatgatgttctttaaaaaaattccatgagttttaagggcttgtctcattatagaggtacattgtggctgtgtaggtgaaaccagaatcnnnnnnnnnnnnaatctgtaacataggtgtactttttccaatgctgctccaagttacttaataggatttctttgtattacgtttttttcaaaaaatatagtgcataataagactataaacatgccattctctttcagctgtaatgttcttaaaattattcttgaatgtactgtgatgtcaataaagctctttagttcatttttgttaaactcttgcaccttaattttatggttttaatctaaggaacgtacttttataaaaaggcagctggaattttgtataacaggttttaaaggtaccttctctcacctcccccaaagaaaatggtttttacttaatagtttgtcaaagtttgtaaattgtacccatggacttttgccagattccaactttaagggtatgaaagagggctagaaatagacctttacttttcatttggaagtatttgacaactttctaaacttttcttcctattttggggattttcaagtaatatattctctgtgtgtataacgtgtggttcactcctgtaaaatgaaattgctggaatcaatcaagccagtgcaccagtagagttatttgtaaggaacgattgtgtttgacagtaatagtcaagtctggaactatattctacagtcacccacttctgttttagaagcattttgaaacactttttggggttatagaaataagactcatgattcaatatatttatttatatttttaaagtataatatgacctcaaatcaatggaggaatgctgtattatgcaggtttgtgtcaatttcctgacattaaaattgtctgatttttgtccgtttcttaaaattatgattagtgagtggtctaacagtttaaggcattgataacttacaagtagaatggggctctcaaagcattttaactcagttgctttagggtccatttttttatgtaatcacttactcagtgataaatgaatctctgaaaacaaatgcttttacattttaatttaaaaagaaaacaggtgcaggccacagaaaagttttaaagtatgccttcttaccagcaatagttcattttaaaaatcatgccagatttttgccaagatcagtgtttcctcaacatgaagatagaaatagatttgtatagtgtgctcttgtacctctacatagattattatataattttgagcagttacacatttatctaaaggaaataaatcaactgtgaataaatgcatgtttaccaaaatggctgtttacagtgcatttagttctgatatttataaagatgacatttcacagaataactttaaaatagtttgaaattctatatagtttagacatcgatcacatctggagacaaaataaaatgtgcaatattttttatgtaggcgagctaacacagtgtacctaattgcagaattatctgattaatttgtaatagataagttgtataacattttcatatcttaaaatgttttttagatcaatcttgaagtgaaatattttcaaaataaaattctacagnnnnnnnnnnnnnnnnnnnnnnnnnnnnnnnnnnnnnnnnnnnnnnnnnnnnnnnnnnnnnnnnnnnnnnnnnnnnnnnnnnnnnnnnnnnnnnnnnnnnttgggcggccccccccgcccctccaaaaattttttaaaccttttctttgggggcggggccccaaagggaaaggagaaggggcccaaactggttccaaaggaaaccgggggcaaagaaaaggggctggaattcccccccnnnnnnnnnnnnnnnnnnnnnnnnnnnnnnnnnnnnnnnnnnnnnnnnnnnnnnnnnnnnnnnnnnnnnnnnnnnnnnnnnnnnnnnnnnnnnnnnnnncccccagggcgaggctccatatataaaaaattaggcccccgcccccggggcatattttttggagagaaggtggggggaaatttctataaaaactctttccgccccaaagggggaacccctttccacacacgggggtggggggaacacccgaaaatccccccgcgcggacaataacacccccttgtggcgcccctgtggg

SEQ ID NO: 441930 - DNA, 635 bp, Homo Sapiens
tttactatcagttcaaaaaagacaaagcagaacgtagattagcttataatgaagaacaaatccacaaatttgataagcaaaaactgtattaccatgccacaaaagctatgacgcactttacagatgaatgtgttaaaaagtatgaggcatttttgaataagtcagaagaatggataagaaagatgcttcatcttaggaaacagttattatcgctgactaatcagtgttttgatattgaagaagaagtatcaaaatatcaagaatatactaatgagttacaaggaaactctgcctcaggaaaatgtttacagcttccagtgggaatccaaacattaccatggaccccaattttatccaagttctaacacattattaggaatgactcttggtatgaataaattaaaggaagagatggaaggggtggttaaagaacttgctgaaaataaccacattttataaaggtttggctctttaaccatggatggtggccttcacaacgttgactgtctttaactttctaatacaaatttaaggtttccatttgcacaatacaataactctagggcatttgaatgcctttatacatagtcactagtttctacaattcactatttgatgtggtcatatctatatac

SEQ ID NO: 441931 - DNA, 990 bp, Homo Sapiens
  misc_feature (608)..(663): n is a, c, g, or t
atttcatgtgattatgccattttgaatatgtatattacatgtaattgtataatgttaacttgggtaggcaaaattcttggtattaaatttaggatgttttaaaaattattaagaagatattaatgtctgctttttgatagcatattttcatgtaatgtttagtgtattaaaatcaaccattcaagatttattttattgggtgacactattgactgtgttccaaaatgcccatagtgttaggaaatgtggtgtgagttttatttgtgggctaaggataaaataatcatatgctaatataccttttattataaatgactaaaaatttggatataaaactgatgttttactacacaaattacagagagagataatataattatataattattaaataattagaaaatgcaaataagcaaaagtcacccatgttcccagttctcatctcctgaagatagttataactaacatattattttgtactcttcctgttaattagtttctagtgtactttctcctgtagctgaaattaagctgagaaaaaaggaagagatagttcctccctcctctttctcccactctgtctctctcctgtgctatctgtgtgtatnnnnnnnnnnnnnnnnnnnnnnnnnnnnnnnnnnnnnnnnnnnnnnnnnnnnnnnnctaatgtgcatattttcaaacatacacatattttttattatttgaaataagaatgagtcagactacatatttggtagccagatttttttcactcagtgatatatcatgaacatatttccatgctaatataattttctaataattttagatgctgtaactacaatttcattgttaatgggcaatttgttgctttacaaatggtaaattatatgataaataatatgatcattattcttgtagccaatatcattattagaaatgatggaccgcattaaagctataaaattaaataagaatttataaatgtaaggagttattcagacatct

SEQ ID NO: 441932 - DNA, 477 bp, Homo Sapiens
  misc_feature (158)..(189): n is a, c, g, or t
ctttaaacataattgtaacctgaaactaaagcagaacaattgtcagtttcataaatattaagcctattggtccaatgacttgcctgcatatgctactgttttggtttttcttaacatcatttacatttaaatgatctctctgtgtgtgtgtacatacnnnnnnnnnnnnnnnnnnnnnnnnnnnnnnnntctgtcaattttgaggaattcaaagtttacagtcacatcaatttggaaagtcatacaaatattgtcaaaaaactgatctgaatcaaatatgccatgcttgtttcttaatccattgaagttttacttatcatttaaatgacttgacaatattagtcagtttatattttcttttatgtagatattatgggctccagagtttaaattagtatttgatttcacattacgaaaccattataaaaaagtctcaaattaagataatttaaggtgatgaacacacaaacgtacact

SEQ ID NO: 441933 - DNA, 1088 bp, Homo Sapiens
  misc_feature (492)..(578): n is a, c, g, or t
caagcacaacatggatagatgttacttgaaatgaaattgtatatttcattttccaaaatgctcattgctaatacacagaaataccaaagactacttctattgagcttatattctgcaacattaccaaactcactaattacttttggcagatttttatagatttctaggattattaacatacacagtcattatctgtgaataaagacagcttcaattctttcttttcaatcttttcaatacttttatttatttttcttactttattgcattgatttagatctctagtataatgctgaattgaaagaataacaacagatattctacttttttctctgatttaatagaaaagcattcaatcctatgccatttaatataatgttacctctgagtttttttcaaatctacccttaatagggttgaaagtgttgccttctcttcttatcatgctgagagttttctggggtttgtttttataaatcatgaaaaaagttnnnnnnnnnnnnnnnnnnnnnnnnnnnnnnnnnnnnnnnnnnnnnnnnnnnnnnnnnnnnnnnnnnnnnnnnnnnnnnnnnnnnnnntcttaaatataaaaaagatttcttgaatcaagctaggacagtttttttaattataaacttttaacaaatatattgaaatataacttacatgcaattgagatgcatgaaagtgtataatcattaaagtgtataattttaagagtttgagcacactatacacgagtcaaagagaaaggacagaaaatactaacgatggctcagcacatgtggtctatcttgctgaatgctctatgtgagtttgagaagagttatttgttagctgttcttagatgtattttgcttaaatatcgacctggctaacatgtgtcattgattgtgtgaattaatcttgttctagtgggcagtaaaattactgtctgatcactttggacttatgtggactggtttatgttttattacaacggattcatggaaagcccacagcatttcccaagaccctctaatttggcaggactcaatcaccaatccacccctttgtgaatttgtcagggtttgcttttaggctttagc

SEQ ID NO: 441934 - DNA, 657 bp, Homo Sapiens
  misc_feature (467)..(467): n is a, c, g, or t
  misc_feature (557)..(557): n is a, c, g, or t
  misc_feature (579)..(579): n is a, c, g, or t
  misc_feature (597)..(597): n is a, c, g, or t
  misc_feature (602)..(602): n is a, c, g, or t
  misc_feature (615)..(615): n is a, c, g, or t
  misc_feature (620)..(620): n is a, c, g, or t
  misc_feature (636)..(636): n is a, c, g, or t
  misc_feature (644)..(644): n is a, c, g, or t
aaataaaatgattactactcttaaagttaactattttaattagaatttttattttgtgcttcagggccacaggataaaataactacatttagcttgcctttcagtgacgcttttgccaaatgtcagctacaaggagtcatctccctcaccgccaagctgtctagcagccagagtggtagctttactgtaacacacagtactttttgtaatcagactcaaagtcttcatccatactgcttgtgtctgccatctttttgccatcagtctttggcagaaattgtgcatagtctatcccctgctgctcatagaaaagaatgtaggcagagtcggtgtcaatttcatccgggtgaagttccttacagctgctgtcattgtaacagtaccacttgcagtttggggtttttgggcataagtgacgtaatgggcccccacccaggattcctgaatgggcacggaaattggcattntaggtttttaaatagggttaatacgggtatcttctctttggggcatcagtgctgtcttcttcactgtgggtttccaggttgaccattggntgtaggccattggccacaaggntcatggctcataaagggnttccntgggccaaggtanccccnggggcccgagggggtncccaactntgggtgggttttt

SEQ ID NO: 441935 - DNA, 793 bp, Homo Sapiens
  misc_feature (13)..(13): n is a, c, g, or t
  misc_feature (29)..(29): n is a, c, g, or t
  misc_feature (37)..(37): n is a, c, g, or t
  misc_feature (45)..(45): n is a, c, g, or t
cggggtcttcccnaccagggcttctgggntggaaggncaccaccngctcttaagaggggccctccctttcagactgacccactatatgcccctgccacccaatgactggttgtgtctcaaacataaatacaacggcaaaaacaaaaagcaagaaagacaaaggaaagggtatggaaacaggtttaaaaaataaattgaaaaatcctcggtcccatgccttaaggaatcatttggcacaccctcggtgatcttgcttttctccatcttgtcaatataatggaataaaacttcaggaaaaaggaggtagcatatcatgtcgtccctagacaacattataattgtttgttttttactctgactccaaggaaatctttaatatttgttatgattatggtaaactctatactcactacatatttgttcatatctggacaagcacaattgaattcttatttggtcccaggtggctggtgccaaaccttttgtttacaggctaatggtgggatctgcctgaaagttctctatcggacaacttgcatgagacttcaaaataaaattactgctactcttaaagttaactattttaattagaatttgtattctaacaggataaaataactacatttagcttgcctctcagtgacacttttgccaagtatcagctacaaggagtcatcttcctcccaaccaagctgtctagcagccagagtggtagctttactgtaacacacagtactttttgtaatcagactcaaggtcttcatccatactgctgtccggatgttggccaggc

SEQ ID NO: 441936 - DNA, 1436 bp, Homo Sapiens
ataaaggaaggtggtgcctgcagccatttatcacccaacagcagactgacttttgagcaggacatagagcgtggcaatacagatggtctgggggactgtcacaattcctttgtggcactgaatggagtgattcgggaaagttacctcaaaggccacgaccagctggttcccgtcaccctcttggccattgcagtcatcctggctttcgtcatgggggccgtcttctcgggcatcaccgtctactgcgtctgtgatcatcggcgcaaagacgtggctgtggtgcagcgcaaggagaaggagctcacccactcgcgccggggctccatgagcagcgtcaccaagctcagcggcctctttggggacactcaatccaaagacccaaagccggaggccatcctcacggcactcatgcacaacggcaagctcgccacttccggcaacacggccaagatgctcattaaagcagaccagcaccacctgggacctgacggccctccccaccccagagtcaaccccaacgctgcagcagaagcggaagcccagccgcggcagccgcgagtgggagaggaaccagaacctcatcaatgcctgcacaaatggacatgccccccatgggctcccctgtgattcccacggacctgcccctgcgggcctcccccagccacatccccagcgtggtggtcctgcccatcacgcagcagggctaccagcatgagtacgtggaccagcccaaaatgagcgaggtggcccagatggcgctggaggaccaggccgccacactggagtataagaccatcaaggaacatctcagcagcaagagtcccaaccatggggtgaaccttgtggagaacctggacagcctgccccccaaagttccacagcgggaggcctccctgggtcccccgggagcctccctgtctcagaccggtctaagcaagcggctggaaatgcaccactcctcttcctacggggttgactataagaggagctaccccacgaactcgctcacgagaagccaccaggccaccactctcaagagaaacaacactaactcctccaattcctctcacctctccagaaaccagagctttggcaggggagacaacccgccagcccgcccgcagagggtggactccatccaggtgcacagctcccagccatctggccaggccgtgactgttctcgaggccggcccagcctcaacgcctacaagtcactgacagggtcggggctgaaagcgtacgccctcggctaaagccggacgtaccccccaaaccatcctttgctccccttttccacaatccattgaagcccaatgatgcgtgtacataattgcagggggacgggcgtccaggtgtcgaaccagcgtgcaaggcgaggtgcccttcagctcaggcaggtctcaatggcctcgaggtaccaaccagaccaagaag

SEQ ID NO: 441937 - DNA, 457 bp, Homo Sapiens
  misc_feature (180)..(180): n is a, c, g, or t
aaaccgttggggtttgaactctgggggtggggaagggcccgtcaaggtcccaggtggtgctggtctgctttaaatgaagcatcttggcccgtgttgcccgggaagtggcgaagcttgccgttgtgcatgaagtggcgtgaaggaatgctccggctttgggtctttggattgagtgtcccnaaagaggccgctgagcttggtgacgctgctcatggagccccggcgcgagtgggtgagctccttctccttgcgctgcaccacagccacgtctttgcgccgatgatcacagacgcagtagacggtgatgcccgagaagacggcccccatgacgaaagccaggatgactgcaatggccaagagggtgacgggaaccagctggtcgtggcctttgaggtaactttcccgaatcactccattcagtgccacaaaggaattgtgacagtcccccagaccatct

SEQ ID NO: 441938 - DNA, 738 bp, Homo Sapiens
  misc_feature (44)..(109): n is a, c, g, or t
ggtaattacagaagtttattaaaatttcacttgcttttacattnnnnnnnnnnnnnnnnnnnnnnnnnnnnnnnnnnnnnnnnnnnnnnnnnnnnnnnnnnnnnnnnnnctgcctcatccagtaaacagtcactgaaattttaattaagagtgccatacccatgaggctggaaaagtatgtcctctcaagggctaaaaactgagaaccaagggacaatcatttctgtaactccagctcctctttctcccacaaaatgttactgcagccagctgagagctgcagggtatgtcaggtcagacacaacctggtgctatgagatgtgggggaggcatgctgcagaacactgcataaagtcaaattcgtcttcattattacaacacccatgataagaatttctttaaaaaaagtattccatacttgagttatgagagaagttttgggtttctatagaccagaactctctagaacccagtctctatttgttggatctatactttcagttacaattcgatgcagcataactttcacttaaggaagaatttgtatacatgtcatttaacatcaaaatttcattctgtggaaattagggttcccaccctcctccccaaactactccctcccatttcccaaaggactgacaagaaaccctgtggcagcttcatttggccttccacaccatgaccagcaggttcctaacacctcaactgcaaagggcttcctatttctctcaaactgag

SEQ ID NO: 441939 - DNA, 574 bp, Homo Sapiens
tgttcctcacaaaattttcattttaatctctttcacttaggtcctttgtaatgtgcttcagttcttactttgggggaaaatatttcaatgcataccagtaactaacaaaatagtacttaattaaagcacacaagcacactagcctattaaatttagatagcatctttcctagttaaattaacggaataaactaaataatacagtattttcatttaaatatcagaatatacttatcaaagagtaaataatttcttctatgtgtccagctatttttggcaaaattaagagctaatataatcggtttaactgaactctaagtctcaaagtcatcacaggtagtcaagttaaaaataaagaatgaaattgaaccacttggcttgtgacactaattaacaaatacagtaaagccccccttagaacacagtctggagtggattttacgactttgtcctcgtgagcgctcgtgtaagcaggtggtcatgctgcctgaggcattaagaaagcatggcggggccaaggtcgcggggaaggatacggtcagtgccttggaatatcacacaacctttcctcgtgc

SEQ ID NO: 441940 - DNA, 882 bp, Homo Sapiens
ccccgaacaagtgcctgcagtatcttgagccaaacctgtaaggcaagtgttattattcccagattatacatgaagccactaaggctcagagaattaaaggacttgctgaaggtctttacaaagtgattgagctggaatccaaatatagagtgtctggtttcaaaactcatattcttctcgtgccgaattcggcacgagggtaacttctacatttaataccaaaaaagttatgtgcaacaaataaacattcttacatatttacatttggttttatttaccagttagcaaaacagtgccttaaatctctgataaagagtatttctatctagattaaaggggaaacctgcccagtgaactccattttaaatgactgtttactctggagcttaaagcactagtaagaaatatttctgatggaacatactacacagatcatatacctaataaatacttaggccatgcttaatacagttttataacaaaatatttcaccttttctgggcgaatttgtagtaaaaaatgtttaaccaagtagccggggctcccacccttgccctttttgtttgatggaagggtagttctcacaattagaaaccataagtgctgcctgaggtgtctgaaatgtttcacccatgactgtgtgttagagaaaaagacacgaggacagaaattgcatattaggtcattaggtctttttccccaaataggttaccagaaatcacagtgggtctccttgttggcatctaataatgatcttccaagacaagatctcctgtcactcttggtaccaatctaagttgtgaagtaattgctgaagataactctgtacttttgcaaatagtcttttccaaaactaaatgaaaaacaaaagtcaacaaatag

SEQ ID NO: 441941 - DNA, 608 bp, Homo Sapiens
  misc_feature (465)..(465): n is a, c, g, or t
  misc_feature (498)..(498): n is a, c, g, or t
attagcaataccaagataagttattgaagcatttttagtattattttacattccattcataaatgacctaacttgtaactcagcatacagcacacttaaagatatagtttgacacttattcagaaagctacaattattataacttacatgccttcattaccaggaacaccttaatatatcttctaattacttcaacaatactctgttccaaagcacacgatcaccccgtacaagtttacatattttgcttcaatcaccatttttaagttgtagatgtcaaggtgctattcactgaaattttactgtcatctgctcctggttaataggacgacctgacacaatattaaactagcaatatttctggcttaaatactatgggagaaagagaattactggcacttttccggtattcttctaaagtgttacccacctttacatgctcaggtgaacttgtggaacagcccnccacccccagccaagttgttcacaggtgaaggnatcttgcatccaagcacagttgtcactcaggatttatgacttttgaaggagtttctcttctgctcaagtactaaagctttgcattcatgactaatactggaacaatttgg

SEQ ID NO: 441942 - DNA, 1045 bp, Homo Sapiens
  misc_feature (20)..(20): n is a, c, g, or t
  misc_feature (694)..(694): n is a, c, g, or t
caatactctgttccaaagcncacgatcaccccgtacaagtttacatattttgcttcaatcaccatttttaagttgtagatgtcaaggtgctattcactgaaattttactgtcatctgctcctggttaataggacgacctgacacaatattaaactagcaatatttctgcttaaatactatggagaaagagaattactgcacttttctgtattcttctaaagtgttacaaaatacagggacaatcagacacaagcagtaatacccacgagaccactgcaggacccacctctacatgctcaggtgagctggtggaacagccccccacccccagccaggttgtccacaggtgaagggatctgtcatccagcagcagttgtcactcaggatttatgactttgagggagttttctctcctgctcaagttactaagcctttgcaatccatgactaatactggaacatatggggtaatatttttagcctctgattctctgctatatatactgtagattggtgtaccgtgtgtatacacatacctatgccaatagtaattattcaacacacatatgtgtatacattcttctcttgactttacacgattaacaagctgcagataaccaccgaggaccacgaacagacaagggcaagtccagatagaccgactaggacagggagtgtcacttacctgcaagaanaatgtgcagatttattaaataatccagaaaccatcagggctagaggcatttgaaagcaagggcaggtccacatcccctaatcgtttaatggaataatgacaataaagtgttatttataaaatttggtccttctgtctctggctaaagcaagaatagtcaacatgattagggcaggttggcaattagacgtagaggtgctgttgatcagcactaagtaataggagataattactgcttatttgaaccctgggctttgcacacaacatccgaaaccaaagaggttgattgccctctcctctcacctagacttggtcctgagcagtaggattcatgcagtctgaagagaatagg

SEQ ID NO: 441943 - DNA, 742 bp, Homo Sapiens
ccacaaaaatatatttaataagcttgttatataaaatcaaacacttaacattgtcaacatttcttcagttattcaaactcactgatatctaactgggagtagtttgtattctggaagacttcctaagctaaaagtatatttacatatttacaacacatgtaaatataactgaagaactacttcaaataatgttgaaattcacagaattctagagatttatagttatagtttagaagtatcaccaatttgtttgcaatcaaatgtacagcactaattatgaaaaatgttttaactattaaaccaaaaggggagaaaaactgggagggaaatatatggtgttaaagtcctgtgataaatgaatccctggttgtcatttttggtagcttaacccagtctgtcagaaggcagtatgctatgctgtcaggaactctccactgcctcgtcagaagccatgctaaatgcagtaacagcactggctgaaaataaggaagatgatgttagcaactttgagtttcacgcaccttcccaatacaggctaagtattcctgcttatatgtattcctgaaagattaaaaggcccgtcacccattcataccaaaaaatactttctcaacatgctttaaaaggattccttatttcgttttcatttctctcaatctttcaattcttcggagacaagggtctgggctctctcatctctcaaggctggccaagtgcacaggtgggtgccggatctatggaa

SEQ ID NO: 441944 - DNA, 928 bp, Homo Sapiens
  misc_feature (86)..(86): n is a, c, g, or t
tttctcctgggggagtaaagggttggggtgaggaaagaaagggagaaccccggcattcccgtgggtgaaggccatctcccccagcnaggaagccacgtaagatctgacgcatcgctgggattgggggctgctgtggacacggtgcatccaccagtaataacactgactcctcgggccaaacacccccgctgggagtacagattttgtggacgtgggcaacttcagcccaagacagaagtggtaggggactgtcctgggtgggtaccctcaaaggagaacctgatgcagggattcttgtgcaggtgagtgaggacgtggtgtcagaagggatgaggaaagcaggatagagctgaaggagaaacagaaggatgtgcccgagttccccgaggttggtagagtgttctgggggataagggaagcccagaaaaagcacaacgtgtgagtgttccaccccaattaaccaccattacacaaaaacccaaacactctatccttttattccttcccaggctattgcaggaaaagtcttgtttcccaaacgctgtgcctttctcctcttgccttcaaccctggaggggcccaactacacaagtggcttatttggagaagggaatgaggttgaataaagaaagctcagcttccagaacaccacactctcttggttttctctgaccttaaggtaactccttctcagtcctttggctgatttcccatttcccagagagcccaagggctccatccatggctcttttctgttgcttctcagtaatactcagagacaatctcagtggcccctccagctgcatggctttaaatgccactgacatgctgatggttcagtagtgggcgcctgggtgccctgccagatcccttcacacagctagtgcccaggacccccacccccaacacactaccacgcatggtagct

SEQ ID NO: 441945 - DNA, 434 bp, Homo Sapiens
gggagtagccctctcctctgtattccgtgtcttagttatgataaccagtgtagttactttttcttccttaaagacttttcctgagttcctaaaatttatcgagtattccttattagtatgttttgttttttcagtttagacgtggcttctctttctctcaacaaacacatatttggaatcagatgtccacatatctaattctatgtgtattcattttggctgataaatgtatagagcataattttagaggtgggctgcacagaccatttattttatgttattacaccttacattctagatcaaagtagatctttaaatattttctatcattaaatgcttttacatgctgtaagtaaaataatacttaatggtcatttgtggggaaaaaataagaaagtaattaccaaaaataataataaatgcatagacttttg

SEQ ID NO: 441946 - DNA, 882 bp, Homo Sapiens
aaaggagtgatataggggtaccagagatgggcaggatgattgaagatcacagtccagccttgcaggaccccgggggacagggcgggcactcagaggtggacctccagcaggtagcgcaggcgacactggctctcctggtagatgaggtactcgctctgggagaatgtggagctgctgaactctgggcagggcacaggctggccctggggcaccaccacttgctggccatccagctccaactcagtgtcctgggtcggatcaggctcggtgtggcctcgggcaatgacactcgtcgaagccaggaggtgggctcttcaagctggggttgtccgtgtttgatatggtgctctctgcccagggccacctcacccaggaacatgtagccgacatggtgggccccacacttcatgccaataacatatccagctgacttgctgttctctgaggcaaagtagatgcccttgccaacacgcccaccagaatgtggcatgatgcggagcccactagtgaggatggcggccaccacggccatgattggtgccatgccacagcagcttccgattacccagtttggagtgggcctggaatctgtcttcctccccttcttggtttactttccagatgtgttgacaagtgtagggcacctgtggttagctgccagtctgtatctaaagtaggtactgtatcacctatgtactcaaggtgctccagagtctagcagctagcagctggcacttagtgaagctggtacagtcatcggtcccagggagtgtggcaccctccataacaaccgaatttctactgctacagagactgcctacagaggactatggcccagcacgatgtcccgcaagaaacagggagcatgtacaatcatggcca

SEQ ID NO: 441947 - DNA, 620 bp, Homo Sapiens
  misc_feature (131)..(154): n is a, c, g, or t
  misc_feature (184)..(253): n is a, c, g, or t
gctcaagggattctcccagctcagccttcctagcagctgggaccgcaggtgcacagtggcacaatctcagctcactgcaacttctgcctccatagctcttccacctcagccccagagtatgcccagctaannnnnnnnnnnnnnnnnnnnnnnngtatagacagggtttcaccacattgccaannnnnnnnnnnnnnnnnnnnnnnnnnnnnnnnnnnnnnnnnnnnnnnnnnnnnnnnnnnnnnnnnnnnnntgagccaccatgcctggccagcttgctatacttctttatgttttttctacacatatgcaacttggaattagatctctgtcctctcagagactttccttatgctgtctggctcccaggagcctcttttcctagtcctttcactagtggcaggggttattctttctcttagagtcttagtgtcaccctcccccactgttttgccccagagaaatacatagtgaagattcttcccatattcttcctactaccctggaccctttcccgtttctcaggacagaaggacaggtttctcttaggctttcagatgtgctgcctcagtagtgcagcttcataacagactggctatctggcagagcctgtgccgaaa

SEQ ID NO: 441948 - DNA, 1020 bp, Homo Sapiens
  misc_feature (890)..(899): n is a, c, g, or t
gcatattcaactgaagaaatttatttacttttttctaggtacatagatgacataattatagacaagttttgatacataggaaaacccttccgtccacctctctttatgctaaatgaatcatcacaataatttttacaatttttaaaacaatacacagctttcttgggctgaagcaattgcaagaacatattggtactggtatattacagctacttacaatgtttttaagaacagcaatggagaaaaataagttatttaaatattgatttcatatacagaaagtgcaatgttgttagttgttatataacttgctcgacagtttcttttctctatcaattttaaatcaagataacttggactcagactattatatttttttctgaaaataatacagtacacacatggcagcagtgacttggcaagttgaccttttttgctgcagttatgaaagcaaactttactatgtcaggaactgatttccaatagattagtaatttccaatttcacccatacctgggggttcaggacagagaaaagggcctctgactaaggcaaggccatgaaacaatatcttagttatctgggtacataaatagtactagctggagctgactgcatttccttccagacagctttgaagtgaaaatcatacacaatgttatgtgtagctacctgagccgaactgcctttcccaggtttcttttgtgctttccaaagacaacaattttcaccattactcaaaattctgtaccaaatgcaactgattaaaactggatattcctgaagcctaccacctgttcactaatgtccacaggcagccccaatccacctcagtcaaacgtcacacccaaacattcagcttttctcagaccaaattaaatgtttacagnnnnnnnnnngaccaaacgctaaagatatttttaaaatatttaaacaacacaataaagtaaaaacaacctcagacccctcagactagacattcccactgaaaattctttgtggtccctgaatttgattttc

SEQ ID NO: 441949 - DNA, 499 bp, Homo Sapiens
tggctgtcctcgccgctaaccatgcaaatcattaaccattgtaactaattacaaaattatacataactacacgtacataggtaaataatagcaccgtactggttatgatgatgaaaataactggaaacttgaaagcttgtggtaatggcagataaagatggttcacctgggaaattaaaacttgaatggttgtacagaaaagcacagagtggaatgcacatcaatgacagtaagggagttagttctaggaacagctcctgaacagtaagattcccgcaatagtctccgcctcgttcgtctatggtatgcatcccattcattttcttcttctgattattgtcatctttccctttgccaaatgggcagttattgtttcagggagagaagctgctcattggccaatcattctggtgtgcagtgctccatcggattctacatgtccaacaaggcatgtctggatgatgcaatgtctgtctgaccccctttgtttaacttaaat

SEQ ID NO: 441950 - DNA, 460 bp, Homo Sapiens
ggatttcccgggctgcacgaattctgtacgagctggcatagaatgctgaatggatgttcacttgcatgcctctggattttaaaattatttttcacatgactccttttctgtgcgttgggaagcagctacagagcagtagaatccactgaattggtacactgaagcaggcatgccatttaaatgaaggcagttaaccttgactgttgtatcaccagagttaaagaattctggtgcccctctttaagtcttcaggaagtgtttagaggcttattcacattagttaaaacaggccccccccaccttccccaaggcaacagcataaccattagctctcttcctgttttccttcctcatttcatgcttgcttcggctgctaaactgaatttttgttacttagaatattataaagtgtggatgctttctataatgctattggtctaagtgtgatttttcttggtgt

SEQ ID NO: 441951 - DNA, 1909 bp, Homo Sapiens
  misc_feature (1294)..(1303): n is a, c, g, or t
cagaggagccgatggctggaggaagcccacaggcggatgttccccacttgcctagagggcatccctctggggtagcgacagacaatcccagaaacacgcataatacatttccgtccagcccggggcagtctgactgtcggtgccctcccaggaacggggaaggcctccgtctgtgtgaaagggcacagcacatcccaggtgcaccctcgtccaagtactcccaccccgcctactgtccatgacggcctcactgggggccatcagcctcaccagcaaagcagagatgagagcgtgggaactgtgttctttcctccctgccctctactgatttcagcccagcccctgcctagatcctaggtcccttttcctcccgagtttggctggcacgagagctagcccagcacatgaagcaggtgatgttaagtcacaaggtgctgcttttcagatccactatgcaagaggggagggtggggccacgtgaaaggcagctctagacatcaaccagtcctgggggaggggagtgggaaccgggcacaactaggaacaatgccaccattcccacaggagtggtacttaaaccagacagcagggttcagaggtggcacaccgggacaaagctgaggccctgcacctcaacagctgactgccaggtgcctgtgggtgaactgaggggagtagagggagagggcaggtggaactggggcagaatctagtcatgccctaaagctagtcctgtaaacaatggtgccccagaaagctgcaggtggtgtttggagaagcagttacttttcagttacaagacccatctccctagtctcagccttacaactccacgggactaaggaagagcacttccttgcctccgtaaggccagaggaagaaccatcccaatcatttgatctccagctccacagtagagagaaacctacaaaatgtcaaaccagcttcccgactcccaggagctcaagcctagcccagaggcagtggctggggtccctgcaggtcatgaggggcctatgcctttactccttttaaacaccagcacccgtcttttccccaacctaaaaccaaccaccagcatttcactacaggaccaaatggaaaccgagggaaccctgggtcttgggaagaacaacaggaaaccaaggtctgacctagggttccctcccagtcttcacatcactctggcctcatcaccaaggtgacagaggacacaggggagggggaaaacccacacacactccttggaatgggtcctgttatttatgcttgctgcacagacatattagaaagnnnnnnnnnngctttgtattattcttccacatatgctgggtgctgtttacacaccctgccaatgccttagcactggagagctttttgcaatatgctggggaaaggggagggagggaatgaaagtgccaaaaaaaacatgtttttaagaactcgggttttatacaatagaatgttttctagcagatgcctcttgttttaatatattaaaattttgcaaagccctttgagctactgccttagtctacccactgtccttttgttatgaggtagaggatctcatgacaccatacacacaaacccatcattgcctgtgaatgcacgtagggccagaattccccagttcccgctcctctgagggttgatactgctgggaatgccaaccactccacaagcagagggaagccccctcaggcctgcaggaggagccgcagcagtgtgtccaattcaaaccagcagcaaagagcctgacattttcccatccatctatgaggaaagccatctcacagaacatggacataggcaacttgctctcccacaccaagggatgggaatctctcctacctatagtcatccctgcactcctgactttactccaggacccagggtccaactaatg

SEQ ID NO: 441952 - DNA, 557 bp, Homo Sapiens
gcttcattacagatttaattgactgactaaatgaaaatgcctacccactcacagaacattcagtgtaaggtaaaatagacctgaggtatgttatgtgagtgggtaggcattttcatttagtcagtcaattaaatcaactttcaaagcaagtgaaattatattcttatactatatgggatccttgaacttatgaataatatattttaaaattactgtcataaataatattagataaacaatgtaaaaagtctaacatacaaaatcaatgctaagagtaacattttcttggaaataacattacttttataaataagctgatgcagatcaatttcacatttaataacttataaaaacaaagtcagtgttttctagtttcatatgcaaaagcaaagtaatagttggagtgtatgtaacctacattaaatatgtcttagaaaggaagataaatgaacttatcttccatatgcaatatgtaaatacgttaattcagactaattgttctatttttgtgtagtatctttgtataaactaagcatttttaattgaacagatttcta

SEQ ID NO: 441953 - DNA, 813 bp, Homo Sapiens
  misc_feature (50)..(50): n is a, c, g, or t
  misc_feature (744)..(745): n is a, c, g, or t
cactcggattgtatgagggactggggaggccttatatgtgtcaggcaggnattttttaaattttaatatcgtcaatattttcccccaaactgcccagtagaattcattgtattaattcttttgaaattacctttgaaaatagctattcctggagaatgtgcaagcttacataaggataaaggacaggggaggagtttgtaagccttgcagttccaataactaaccaacaggttattagacaaaagggaaggtgttttgtgcttctcagatgttgctggtttaggagtgtgtgatgatgcttgccagtgattttgtgttttggaaagggtaggtatcgaatgttaatcactttctaatgggtacctaaacagcaatgctgataaatgttcaaggaattattttcatcttagtttgttcttctcaaaaggcatcaaaaacaacttatttgaagctgcaatagagtgtagcattagcctgcatgtttctaggtcttctgccaagtgcttttctcagttgaaaactatttttcactagcaaaattggtattttatttcattacctgttagtaactacttcaatgatcatttcacaagaaaaagactataaattaggtagagaacaacatttttattgaacatttttggcttgcaatcaaactttgccactaaaaattaacttcataaaacactagtctggtatcaacttcttcacagagaaagtagctatactataccctacatattnnattatttattattctactatagcagaataaccaaaacttgatgcattaagccaagtctttggaacttg

SEQ ID NO: 441954 - DNA, 422 bp, Homo Sapiens
  misc_feature (46)..(46): n is a, c, g, or t
  misc_feature (54)..(54): n is a, c, g, or t
  misc_feature (97)..(97): n is a, c, g, or t
  misc_feature (139)..(139): n is a, c, g, or t
attttgtacctggaaaaatatttttaccaatttattttgattttanatgtgtcngaaaaatgtactgaaccatgttgacatgcttatttttgtaagngatgggtacttcttgttccccttggatttcggaagcaaagcnatgggaccctacgcttcagagtcttaatggggtggggcagtgtccattgaggtgccctgtcgggaatgacaagtccagggcagattatgaggcaggcatcctttggagttcttctctcaggtatattttaactaaaagctatcatttaagttgaagaaatcaagtcttgtgaattgatacgattgtacttctagagtctttgatgataagttgtctttgcggtacagattggctcctcgatctttcaaagtgtcatttaaatggaaataaatgtctgaaacag

SEQ ID NO: 441955 - DNA, 526 bp, Homo Sapiens
tagaacatcccattttgttattttaattggagaaacctgtgtaagctaagtttcctttattattgttccttttactctttataattgacataggtgaatttattcattcagccaatttgtttaagtaaatactggggaggcttcataagtcataaagatattttgatatgtaagtgtagcaaacacaatgcttgctgtgtaatggatgcaccattattggccataaatatttctgctggagttagtttgtagctccaagtaaagataaagaaatatgcgtggtgaagaaataaaatcgattctgtatatggagaggacattgttcttatgctgcaaaattgactctttctgaatttaaagagacattctgcttattttctgattatctttagttttgtttgtgtgtctacttatgtttatcccaactgtgtatgcatcacagcccttctttttattctttgtgttatggctacatctttattgctgtttgttttgtgccatgtcacctcgtgaattcctgcagccc

SEQ ID NO: 441956 - DNA, 753 bp, Homo Sapiens
  misc_feature (68)..(68): n is a, c, g, or t
  misc_feature (70)..(70): n is a, c, g, or t
tgtaagtgaacctcatccttcaccctgaaaacacacaatcaacatcatttttctgaactaagtagaananataagcaatatgtgtgtgcctccttttttactcacttgagacaatatagacatttagttattcacatatcattgaattcatttggatctttgaatacttgagcttcaaattccatctggctctttggatcaggaagaccatggccaaaggcctccagtagaagagtctcttctctcacagccagttcatagtctgcaaaagacagcttcccatcatggtcatgatccattttcttcagtgttatttcaaccaaatctttaattccttcatcagggtcttcctcagatggctgtttgagaaggctgttcttcaacatgtgaaacatttcctcctttgaaatgaatccgtcaccattcaaatcaaacacttcaaagcaatatttcattttttcttccaaagatcctcgaagaagcagtgataatccatgaatccactccaatacatttacacagccatcattatctttatcaaaacctcggaataaatgcttgcaatttttggttaaggtgtccgtcagcttctgcagtttcttgcggttcatgtctggcgctcagagaatcgggccgcggcgggggtctctgggcgcgcggctaccgagaccctcgcgggacccccgcgagcactggtgctgggtcaacgcggtgaggtctccaaggtttctcgtgccgaattcctgcagcccg

SEQ ID NO: 441957 - DNA, 755 bp, Homo Sapiens
  misc_feature (88)..(88): n is a, c, g, or t
  misc_feature (104)..(104): n is a, c, g, or t
  misc_feature (125)..(125): n is a, c, g, or t
  misc_feature (132)..(132): n is a, c, g, or t
  misc_feature (139)..(139): n is a, c, g, or t
cttttcaaccgatgctgttgcagtaattctctcactaccataagtaaccactttcattactaggctctacacctcgccggcatcttgntggttgcatgggactntatgaatttctcccttctttnttctccntctcccnctcaatgctctgcttccttacccgtgggaactcaaaggtccctggctgaagcagctcttcagtgggattctgaagccctagagaagagatagctgtctgtcatttcccttaggggtgagggaatggccaggattcctttctatttcttgtactgccagtgaaccaatttaagtcctctttggcaattgacagtttctgtcaaggactgtttcttggtgttacccgaagcctaagacaaaagggttaattcattattgcccatcagggtggcaagtctattttcactttaacactcaataaacctgtgtgcacagacacactctactggttgcgaacccaattttggattcaactttgtcacaaacaccacatcccaagttacaagtgagttctcctttacattaggtttgaattgacccctcgagcaagggcattcctggaatggtcatccaggcaaaggcagaccctctatctgtggtggagtccccccaaatagagtgagccaaagggaaaagagaggtccaaaatgcctcagggatcttgtagctccttatctaaaccctttacataccatgaaatcacactatgagaaattaccacctcccttgaaatggcc

SEQ ID NO: 441958 - DNA, 1026 bp, Homo Sapiens
  misc_feature (849)..(849): n is a, c, g, or t
  misc_feature (915)..(915): n is a, c, g, or t
  misc_feature (993)..(993): n is a, c, g, or t
agcagggacctgggatgccaggctctggggttaggctttctggtgaggacaaagggagcccttgaagggcattcggccactcgggtgatagtagcatggagggatgattgggtgggggcactgggagactcatgcctggctgtcttctgtaaatgcctcattgctggaaagccctccatcctttaactgtcaagggccaatgaggagtccctcactgtgcgaagtcttccctccctcatgccacccccagccccaaccttaaggggacaacgagcactccctcatccaccctttacctccattgcacttggagtaaacctcaatcctaggcctattgtttgctgacttgagttgtcagaagtcagcctccttcaccatcccctggaaaacaggaatctgtgtcttggccaaggccactcccctgcccaggtgtttgtgaaggccctgccccatgtcctgctaatcagtgctctcccactgattggctgattacttgcaagccccagaggagtcacctgacctgtctaggccataggtacatctagaagagaacaatctcaactcctgggtcttcaggagtggagtagatttcaggtggagcaaggcagacatagagccaggaattgcagccacaagagagaaactgaaagttcagcccactgtgttctgaaacctttcactcatttattccctgcaacagtcccttgaggtagatactatcattttattcagcttgccaatgtggaaactatggtacagagaggttaagtaaatcccttcaaggttatgtggccagcagaggcaaagccaggatctgaacatgggtaacactggctccagagcctttgntcttaaattctgtgctatcctagagcctacctacttcttacttccctttgcgtggcccagatcctngccctggatgtagtatgcttcagttctttcacgtaggctggagattcctggaagctttgtgggagaaggagccttatnacaaaccttccgtctttggggaccctaatcctg

SEQ ID NO: 441959 - DNA, 547 bp, Homo Sapiens
cctgttctttccctgctcttatttctgctgctttttgcccttttccccactgagtccagccgcggaactgatgccagctctctgattttatcttgtgtttattgggaaatggtggtgcccatctctgggccagtccagacagcttccccctaggaagtgagccaagttcccacggcgtgtcagagttaaaaacaaggacaagagacagcgtgagagacataagagagggggcacagagaaagacagaaaagcagagagagggacacacaggtcccctgcttcctcttctgtttgttcattaatcaggctgatgtcaggtggcacaaggggcattggacatcatttcatggctcaagatcattgtccctaagtctgttttcccaggctgtccccttaagagctgggctgccgcggccacaccctgcagtccatgtcaccctccagccattgctctcctgtgggtgtgcccggcagagcctccagttctgtgcctgccccctggaatgcccctaaagccctcccagccccttacccagccttcaaggcc

SEQ ID NO: 441960 - DNA, 728 bp, Homo Sapiens
  misc_feature (95)..(95): n is a, c, g, or t
ccctaaattcctcatctcttcaatgggaatcaatagcccttgcctcaaaaggtggtcataagaatttaacccctcataattgtagagcactaaanatagtgtctggcccattagtgattgctcaagaaatattaacacatcattattattattcctggcaaaacctcacgttatcaggccatttatcacttcctacccaggaaggcaaatgggtcataagggaatcacaatcctggtgaaaatcttggctgccacgcaatgatagccttatttcacagacagcatactgaagacgcagctcaagatttctaaaatctggaaggaagaagtagtcattagagaaggatcagtatttctgatttctagaagggggctatcacctataaaaagaagaataaggcttgttttgcatttgccaaaggtggacttgaattgaatggtggaagttagagggaaatgtctgttcactataagaaaggctaacatcagaaacaatcgcttcataaaaggatagcctgctttgaaggatattgtactgttaactgagtgtgaaagcaggagtttcatccatcaaggatgctaattgcccagcatctttgtaagcacattgtgtacgaacccattcaatcctcaccacagccaccctgctccactgtctatattcctaaccaccacaattcgctgcctacctcccagctctggaatcctgggcaagtaactcaacctgt

SEQ ID NO: 441961 - DNA, 1039 bp, Homo Sapiens
  misc_feature (150)..(159): n is a, c, g, or t
ccccacgttttataaatttttgccttaaaaagggcaaaacttttttccaattcacgggggccagttttccaaagttttcattgaccattccacagggtaaaattaaaccggtgaggccaaactttttgattttttatggcttaatagggnnnnnnnnnntccctgttggattataaaaaacaggccaaatttttggaccaaaataaaaactcaaaacccatttcatcccgtaaaattcaacgttcagaatcccaaaaattttccaaaacgaatccacttttcctttttccccatttgggcgaggtgcacttaacttcattagggaagccttgaaagatttttttaaacccttgggttttaaaaacagattggccaaacagtctttagaaactactcgagaagtattgattttaaactattaaggattccacaggcagaacaagaatcttatctaaaatgggcatccactatcgacagagatagcatctacaaacagtcccaccgtttctccacctaaaaaggctttaagtttcagtgtacacatggcatcaataaaatttctcacaatgaacaaaaaatacattactgtactaaagcccacactgccactagttctttaacacaaaaataacaaaatttatatctacttacatataattcaactacacctgaaacactataaactcaggttttaatattaatccaaatgtaacaatagcaaatttatgtatgcaatgctgaaattactgcccaaatatgccagcaccaatgctattagcatatagacaagctcctacaacaagctgattgatttaatggcaattttctctaaaactctgcccaaatttataattcaattgcattagcaatgaatctactgggagaaatagcctaatattagactaaacgaacaatattctacctactgctactgtgacaacattaatgtttatcctgatgtcatgaggataaagaataatctaggggaatagttgtatggggtagagggagggtgtcagccatttctttggccacatct

SEQ ID NO: 441962 - DNA, 617 bp, Homo Sapiens
ggccacttggccaataagtgaccaagccaggatttgacccaggtggtttgtttccagtgcccatcataccactggactgagataggtgtgtaagggacaaaaaccaagatgagttccttgcctctgagggtcttattgtttttggggggaaataaaacataaatactcataacttaccagactggaagggcttgcataagagccctgttagttttatttgacccttatccaagcttaagtgcagtgattgtttggttaaaatggtaagtcagtgtcagccacttcctccgattcctgaagccttaggatcatgtgacccatgataattcattaaaattagctaaggatgttggaaatgcaaaatcctctccatagatcatcatttattttggaaatatgattcatagccctcaggaatggaaaacaggaagctgaaaagtcacagtaaaagtgaaagaagataggaatttctaatctattcaaaaaagagaagttgaatcaggggatcctcagggattcctgaatgatgactgcatgggattagaacatgggttgagaaacatacaagcagcagagggtgaaaccccactcggtgcattccagtgggtaatttgaat

SEQ ID NO: 441963 - DNA, 746 bp, Homo Sapiens
  misc_feature (25)..(25): n is a, c, g, or t
  misc_feature (680)..(688): n is a, c, g, or t
tttaggagtaaaaaacaaacaaaanctgaaaggatgtgttaaatacttttgtcaacgtggcatccctgacactgacatgaagatccagttggatgatggatattgccaattaaaaagtttgtagtggcaaaagtaaaaatgattcaaattgacgaatgacctgtcctttgtttttaaacacagatacgtttttctgggcctttctctaaaatgaactttagggcttgatacatttcacaaaaatatacatatttttcgtcagctactactttgtatacaacctgaatcccagtgtccaacacttaaaagtactgcaattatataaattactaaacaagttaacagtaatggagaggcaacttctgagtaaataaaatgaatgattatgtacttaatagccttgtagtcactttcaaagaataaagtaatctaaataaaattatagttagcactctttttcatgtaagttcaataattatttggctattggttgaaaacatcacacagacagacaccaaccaaagattcattatctccactcgctaaaaacattgatggttaattttaagcaattctttcaaagaaaaacaaaattaattctaagcctttcagtctgatttgtgacatcttaatacaatataacttaaatgacaaagcctgagaaaagcaccaacatagannnnnnnnnaattgcatccaaccatcatttcagatgtcataaagcctgcagcccgggggatccacta

SEQ ID NO: 441964 - DNA, 989 bp, Homo Sapiens
tcacacctgcacccagcctagtacctcttttcttgatccaggttctactgtaaaacatttttggcttgaaagaataattctcaagttttctatgctaaaaatgactgacatttttttcacatgaccacagaacaaaccttgggcatctgtataccacttagtttactaaagttacaacatggtgttgtaactgaaataaatgatttaataacttattcaaaactctttgggaagagttcctccaggattcctacatgagtttgaggcgcttgtccaaggatggggagaaaaatgttgtctgttgaaactaggagtcccaacaggagctggcccttgcaggaaaacccttgtttcctggtatgccggaaaaacttgccagaggagcagaagaggaagatggggagctgcctgatgggtcaatggatggtaacccaactggactagtagaaactcgctgggaaggtggtctgaagccaggtgcctttgagttatcagggtgcatgttttccaagtgtccaagcactgagttacccaggaacgctgactgaacagtgaaagaggcatctgtagcaactcgtgaggacagtggaccatctccccagccctggttagctggcacctgactactatcaaaaagactgctgaagtgattgaaaagtgtggctgggccaaatgtaggtggcaaagacttatttgctgggtttatgtgcatctgagaaccattcataatgttcacagctgaagaaagctgcactgcagctggtgggccttgaggtggtgttaaagtaactggattcgtaacaaaaatagactggggatcctggtgaatagttgcatttggtaccatggagtaaaaagaacctctgggctgcattcgatgagaaactcgaggtgctggtacagctaactgaggtaaattactggtgtcctgattatcagcagcaaccattctgggtgatgtcaaagtcaatggagcaggttctgagtta

SEQ ID NO: 441965 - DNA, 829 bp, Homo Sapiens
  misc_feature (72)..(72): n is a, c, g, or t
  misc_feature (252)..(252): n is a, c, g, or t
cgttaagggccctccagaactcccatttggaatttttttcaaaacccctcggtttgccccccggggggtttntttatttggggaggaatcccaagcccttgttcatggcccgggattttcctaggaaaccagctatggcccaggttcccctttccctacgggggcccgccgcccaaaacgaatggttctagaaaagtttctcgaggggccgaggccggccgacattttttaatttaggggttttttataaantaatttggctttgtgttctttattgcctctcccttgggctaagggagggaccagcaccatgtccttctggagacccggaaccccccagcaggccagggaggcaaggcctgggccgccaggaagccatgcttgaacactaggttgggaggggaacaccccagcaccttggtcctattgaggcttgaagtgcctgcttgatcctgaccaaggggccaagtggaagcctgtgctggttgtggggaagtgccaggctcacatggtccagtaggcatagacgagcgtcaggaggataaagatggccacagagagcagcatgttcttccggttctcttgccgaagaaacttcagttccttctcgtagttggaggctttgttcattaggctgtttttctccttctccagggacctcctggcctctgggctcagctcccggctgtggagtctggagttcacggcctccaggtctctccgacactgggacagcttctcctctagcccatcgatctctagagcgacgcccagattctcccgcttctttttagtcatgttacttgccgggatcccccagtcatccccc

SEQ ID NO: 441966 - DNA, 531 bp, Homo Sapiens
  misc_feature (309)..(309): n is a, c, g, or t
acgagcagcactgggcgttgggactttatcaggctggctctatagccaaaagggtgtcaggatttgggcagattaagaagggcagagtcatttttatgggtaaggaggtggctggaagggtgcgtctttgccctcagcagtgtgtacccactcgttggagaggcagagcagaacagacgggcctaaactgcctgtcctatccctatcaccctctttcctcccagagaaggaactgaagtttctttcggcaagagaaccggaagaacatgctgctctctgtgggccatctttatcctcctgacgctcgtngtatgcctacttggaccatgtgagcctggggactttccccacaaccagcacaggcttccacttggccccttggtcaggatcaagcaggcacttcaagcctcaataggaccaaggtgctggggtgttcccctcccaacctagtgttcaagcatggcttcctggcggcccaggccttgcctccctggcctgctggggggttccgggtctccagaaggacatggt

SEQ ID NO: 441967 - DNA, 900 bp, Homo Sapiens
taaccctcggagctggcctcggactgctggggcgttaccccttcggccacccccgctgaccatggcagtgtttcatgacgaggtggaaatcgaggacttccaatatgacgaggactcggagacgtatttctatccctgcccatgtggagataacttctccatcaccaaggaagatttggagaatggggaagacgtggcaacgtgtcctagctgctctctcattataaaagtcatttatgacaaagatcagtttgtgtgtggagaaacagtcccagccccttcagccaacaaagaattagttaaatgctgaagaagccttcaggaatccaaatcctgaacatttggaatgagcccagatagaaatatcgaatgcaaagctactggcttcacagagacaaccatttatgatttgctgttctgtaagagtgtggattctttctatcaactgctgatatcatcttcaggaagcaagtccataacatgacatatctggattttgtgcttagaaccttaaattggaagcattcttaattatgcatctaaatttaacacagaagataatttcaaaacagtgctttctttcccttggtttcatcattttcatatcttaaaccaaattacttcggtatctgacaacagcatcatctacctcagtcattaggatttcttaataaaaaagagattgtatttttgacttggttattaagattattaccaattagcccttccttttgaatatgacatcagctttgctgttctaaattaaaaatagttgcttcatcagtaccacacttccagtttctataccaagccagtctcctcagtttcccattagactggacatgttctgttcacgtgtcatttctggatgcttcatgcatagagtttggtcatagtttt

SEQ ID NO: 441968 - DNA, 719 bp, Homo Sapiens
  misc_feature (73)..(73): n is a, c, g, or t
  misc_feature (87)..(87): n is a, c, g, or t
attaaaggaaatccctaaatgaactgaggtaggaatgatgctggttgtcaagatacccgaaggtaatttggtntaaggatatgaaanatgatgaaacccaagggaaagaaaagcactgttttgaaattatcttcttttaaatttagatgcataattaagaatgcttccaatttaaggttctaagcacaaaatccagatatgtcatgttatggacttgcttcctgaagatgatatcagcagttgatagaaagaatccacactcttacagaacagcaaatcataaatggttgtctctgtgaagccagtagctttgcattcgatatttctatctgggctcattccaaatgttcaggatttggattcctgaaggcttcttcagcatttaactaattctttgttggctgaaggggctgggactgtttctccacacacaaactgatctttgtcataaatcacttttataatgagagagcagctaggacacgttgccacgtcttccccattctccaaatcttccttggtgatggagaagttatctccacatgggcagggatagaaatacgtctccgagtcctcgtcatattggaagtcctcgatttccacctcgtcatgaaacactgccatggtcagcgggggtggccgaaggggtaacgccccagcagtccgaggccagctccgagggtttaacttcgccggaaccggcctgggctcggcatccc

SEQ ID NO: 441969 - DNA, 960 bp, Homo Sapiens
  misc_feature (379)..(379): n is a, c, g, or t
  misc_feature (454)..(544): n is a, c, g, or t
acctttttggcggttgggtttcggaattaaaagggcgccttagagccattaagcttggcccctgaccaaaacttatagggagggtcagaatgcctatccctaaccgtttttccccttgggtggacccggtcttaaaggcctttgtccaaaggcaaacctcaccattccggtattctttaatataaggatttccaattcgcctattgttaaaaagacctatttacaaaagttaccgaattttacaaaattaccgctacattgcccatcccatcaggttggcaactttggaaagcgtccggggggccttttggatttaagcaacttgcaaaggggatattcctcagagcgataaggtggtaacgcaagggtttcccattcnaccgtgttaaaccccggccagtgattgtaatccgctccctataggcgaatttggtccggggcccccctccaagannnnnnnnnnnnnnnnnnnnnnnnnnnnnnnnnnnnnnnnnnnnnnnnnnnnnnnnnnnnnnnnnnnnnnnnnnnnnnnnnnnnnnnnnnncttccttaaatacatgtttattttacttcaatatcgctcagggttgtatgtatttgaatacttcagtactattttgaacattctaaatatgaaataccataaagcgttcaaatttatcaaacagtggtacaatatggttactaaacttgcaacttaatttacaatgacgttcaatttttcctcttcaaataaaatcactgactttggtccatttgatgagaaactaggacatatgccatgacagcatacttctagcactctatgtaataagcaaaagataatttagctaatatagacaggttacctgactgaaattctactttctgcttaattgatcacgatcaagaaaactacaaaaaagaagcaaagagcagagcagaccaactaccacagacctcgtgccgaattcctgcagc

SEQ ID NO: 441970 - DNA, 516 bp, Homo Sapiens
  misc_feature (187)..(201): n is a, c, g, or t
cctggtaacggtccggaattccgggatatcgtcgaccacgcgtcggttctagatcgcgagcggcccctttatattgtcttcatgttacactgtgcatttatttacaaagaggttagagaaacacacagaatctggcccccctttgcactggggagtcaccatcgtcataataaatacagtaattttnnnnnnnnnnnnnnntactagattggaacagctgagggtcatcaggcttcccccattccctctcacagggagtgggggtcatgagatagaaaccatcttccttcccctcttctacctccgaatcctccataattgtccagggatcgaagtgaaagagtccttctttccaggtgttaccaacccctacttgaccctcaaaacccccaaatcagtgctccttcccttcccagggcactctgcagggaccacctgagtcagacacagagtctctgaccagggtgtcaaggggatatcttaagggtccagggacatggagggggcactttgtga

SEQ ID NO: 441971 - DNA, 1688 bp, Homo Sapiens
ggatttttcaaaatcggaggccggcgtcggctgttgtgcgcgcccaagggtcccgcgggttttcgggcgcagggtggcgcccgcggcaggcggcggccatgaacttctccgaggtattcaagctctccagcttactctgcaagttctccccggacggcaagtacctggcttcctgtgtccagtaccggttagtggtccgggatgtgaacacccttcagatccttcagctgtacacgtgcctagaccagatccagcacatcgagtggtcggcagactcgctcttcatcctgtgcgccatgtacaagcgagggctggtgcaggtctggtctttagagcagcccgaatggcactgcaaaatagacgagggctcagccgggctggtggcctcgtgctggagcccggacgggcgccacattctcaacaccacggaattccatctgcggataaccgtctggtccttgtgcacaaaatccgtgtcttacatcaaatacccgaaagcttgtctgcagggaatcaccttcaccagggacggccgctacatggcgctggcagaacggcgcgactgcaaagattacgtgagcatcttcgtctgcagtgattggcagctcctgcggcattttgatacggacacccaggatctcacagggattgagtgggccccaaacggctgtgtgctggcagtgtgggacacctgcttggagtacaagattctgctgtactcattggatggccggttgttgtccacgtacagcgcttacgagtggtccctgggcatcaagtctgtggcctggagccccagcagtcagttcctggcagttgggagctatgatggaaaggtgcgcatccttaatcacgtgacttggaaaatgatcacggagtttgggcatcctgcagccattaatgatcccaagatagtggtgtataaggaggccgagaagagcccacagctgggactgggctgcctctccttcccgccgccccgggccggggccggccctctcccgagctcagagagtaaatatgagatcgcctctgtcccagtctccttacagacactgaaacctgttaccgacagagcaaacccgaaaatcggcataggaatgctggcatttagtcctgacagctacttcctggcgacaaggaacgacaacattcccaatgccgtctgggtctgggacattcagaagctgaggctgttcgcggtgctcgagcagctgtccccagtgcgcgcgtttcagtgggacccgcagcagccgcggctggccatctgcacgggaggcagcaggctctacctgtggtccccagcgggctgcatgtcggtgcaggtgcctggggaaggcgactttgcagtgctctctctgtgctggcatttaagcggagactcgatggccctcctcagcaaggatcacttctgcctctgcttcctggagacagaggcagtggtcggcacagcctgcagacagctgggcggccacacgtagcagcggtgcactaacgtgtgcagaaacagggctactcttgtgttccagtgtgggaaaaaacacagctttaccaggaggttctccactgtggtggtctggattcagtgattgattctatttttctatagcaaagcatttttgtaaatatgtatggtataaaactgccctcttattatttaaaataaatacttgctgatttatacaaaa

SEQ ID NO: 441972 - DNA, 861 bp, Homo Sapiens
ataaatcagcaagtatttattttaaataataaaactacagttttataccatacatatttacaaaaatgctttgctatagaaaaatagaatcaatcactgaatccagaccaccacagtggagaacctcctggtgaagctgtgttttttcccacactggaaacacagagtagccctgtttctgcacacgttagtgcaccgctgctacgtgtggccgcccagctgtctgcaggctgtgcgaccactgcctctgtctccaggaagcagaggcagaagtgatccttgctgaggagggccatcgagtctccgcttaaatgccagcacagagagagcactgcaaagtcgcctagagagagacagggtggccagaggattgcagcaggggaggcccagattctggggggatggggcacccccttgtcctgcaggccagcacagtgcctggagtgacccacataggcagagccagggtggagccccagagctgcctcaagtcagggagaggctgcttctagcccataaagctgagggcagcgggtcccctgtgtgtccgtcttgaggtttacgcaaagactctgagggcagtttccctggagtgctgccggagacagcagctgggcttcaacagttcagcccgtgtgatgccagactgcacacagcaaggctgccacgtccgtggcctcggggatgtgcttaccttccccaggcacctgcaccgacatgcagcccgctggggaccacaggtagagcctgctgcctcccgtgcagatggccagccgcggctgctgcgggtcccactgaaacgcgcgcactggggacagctgctcgagcaccgcgaacagcctcagcttctgaatgtccccc

SEQ ID NO: 441973 - DNA, 701 bp, Homo Sapiens
  misc_feature (156)..(177): n is a, c, g, or t
actgcccttaatttgtctttctgtggcccataaaataaatcccagcagacagacagaggcccctgatctgaggtgatatcaggtgtctgaataagtaagctgggttcgttccacttcttgggtgttcatgattgtcttcttcaaatcgtaacaccnnnnnnnnnnnnnnnnnnnnnngtttgtgtctcttgatggtaatagagatttaacttcgaaaatctaggtacaataatacctcttttaagtagtatcttaaatgatttatttttttgacataatgaaatttagagagagcagaattttgagtatcaaatttaaaaaagaaaacatattgtgtagacaattttctggaatgtaaaacacgtttttgtaccttgaaaacagagactattgaatttttcttgaagactcactggccttcattcttgccagctgtttgtctctgtactatgtggctctaggcagctctgcttagagttttcatgtttgttttctgtagtgtctctgactgcttctggttggtttttctgcttctctgaaaagcagagaagctttgagttggggtgaagcggaagttctttgcgtatatgttgacccttctgctttaaaattccagacgatgattctaaatcccaagttttcctttttgggaatccatacaggaataaacctttgccttacagggcttgtagctgaaattt

SEQ ID NO: 441974 - DNA, 1666 bp, Homo Sapiens
agcggggtcttgccagttacataaatcccgtcagtagtgcggtaaatggagaagctcagtcatctcatgagactagagggcagaacagtaatgcccttcgttctgtacttctcgagcttctcaggtcagtcctgcctcatcccagccatgtcagtcttatctacgaaatgattcagttctggacatggcaagacatgtgccactctatcgggcactgctggaattgcttcgggccattgcgttcttgtgctgccatggtgcccctattgttgcccctttctacagagaacggtgaagcaggaagaagaacagtcagaatgtcaaacttctgttggtacattgttagccaaaatgaagacctgtgttgatacctataccaaccgtttaagatctaaaagggaaaatgttaaaacaggagtaaaaccagatgcgtctgatcaagaaccagaaggacttactcttttggtaccagacatccaaaagactgctgagatagtttatgcagccaccaccagtttgcggcaagcaaatcaggaacaaaaactgggtgaatactccaagaaggcggctatgaaacccaaacctttgtcagtattaaagtcacttgaagaaaaatatgtggctgttatgaagaaattacagtttgatacgtttgaaatggtttctgaagatgaagatgggaaattgggatttaaagtaaattaccactacatgtctcaggtgaacaaatgctaatgatgcgaacagtgctgccagagcttcgccgacttgccccaggaagctgtgacgctttcaacctcactgcctctgtcttcatcctctagtgtgttggtacgctgtgatgaggagcgacttgatatcatgaaggttctaataactggtccagcggacaccccttatgcaaatggctgctttgagtttgatgtgtattttcctcaagattatcccagttcaccccctcttgtgaatctagagacaactggtggtcatagcgtgcgattcaatccaaacctttataatgatggcaaggtttgtttaagcatcttaaacacgtggcatggaagaccagaagagaagtggaatcctcagacctcaagctttttgcaagtgttggtgtctgtccagtcccttatattagtagctgagccttattttaatgaaccgggatatgaacggtctagaggcactcccagtggcacacagagttctcgagaatatgatggaaacattcgacaagcaacagttaagtgggcaatgctagaacaaatcagaaacccttcaccatgttttaaagaggtaatacacaaacatttttacttgaaaagagttgagataatggcccaatgtgaggagtggattgcggatatccagcagtacagcagtgataagcgggtaggcaggactatgtctcaccatgcagcagctctcaagcgtcacactgctcagctccgcgaagagttgctgaaacttccctgccctgaaggcttggatcctgacactgacgatgccccagaggtgtggcagagccacaacaggtgctgagggagattctaatgcatgatcaggtttaaacccagcagcagcaaaagaactccccagtgacttccagttatgagctgcattgatgtggacttcatagacacaaaggcttcgaagcacaagccaa

SEQ ID NO: 441975 - DNA, 880 bp, Homo Sapiens
  misc_feature (143)..(403): n is a, c, g, or t
  misc_feature (838)..(838): n is a, c, g, or t
  misc_feature (845)..(845): n is a, c, g, or t
  misc_feature (865)..(865): n is a, c, g, or t
actcttgttccaaaatgtgagacaaacactcaaccccatatctcggtctaattctttttgatttaataacgggatttttgccgatttcgggcctaattgggtaaaaaaatgaagctgattttacgaaaaatttaacgggaaannnnnnnnnnnnnnnnnnnnnnnnnnnnnnnnnnnnnnnnnnnnnnnnnnnnnnnnnnnnnnnnnnnnnnnnnnnnnnnnnnnnnnnnnnnnnnnnnnnnnnnnnnnnnnnnnnnnnnnnnnnnnnnnnnnnnnnnnnnnnnnnnnnnnnnnnnnnnnnnnnnnnnnnnnnnnnnnnnnnnnnnnnnnnnnnnnnnnnnnnnnnnnnnnnnnnnnnnnnnnnnnnnnnnnnnnnnnnnnnnnnnnnnnnnnnnnnnnnnnncaggatatgaatacagtttattacagttttcagactcccattacgacacatatctaaagctgaacattgcaaactgaccttactagcagcaattctccctagacaggaagggtttcagttaatttagcaattaggagtaaagacaaacttacaagtcatggtttttcttgtagcagctggtatatgagcagtgaaactatagatacgtagagtcattcaggtttagccttgtctaaaaaaacattaataagttatggtgcagaggagtatccccagggttgccaaagagaaggctgatgtctttagatgtcagtatgaaacaagcaaatcacttttcaaggacatgggcttactatttgctttactgtcagggacaacagaaaaagaagtgggacagcctaccctaggtttctaggctcacacttatttcagccnggtaatncttcttttaattattacccntggaattttttcggc

SEQ ID NO: 441976 - DNA, 1359 bp, Homo Sapiens
  misc_feature (75)..(306): n is a, c, g, or t
  misc_feature (324)..(438): n is a, c, g, or t
  misc_feature (498)..(506): n is a, c, g, or t
gaaggaccaagaagtccttggcttctggtccaactccagggctgggagtcccagtgggctttggtctcaagctcnnnnnnnnnnnnnnnnnnnnnnnnnnnnnnnnnnnnnnnnnnnnnnnnnnnnnnnnnnnnnnnnnnnnnnnnnnnnnnnnnnnnnnnnnnnnnnnnnnnnnnnnnnnnnnnnnnnnnnnnnnnnnnnnnnnnnnnnnnnnnnnnnnnnnnnnnnnnnnnnnnnnnnnnnnnnnnnnnnnnnnnnnnnnnnnnnnnnnnnnnnnnnnnnnnnnnnnnnnnnnnnnnnnnnnnntgctgatttatttttcannnnnnnnnnnnnnnnnnnnnnnnnnnnnnnnnnnnnnnnnnnnnnnnnnnnnnnnnnnnnnnnnnnnnnnnnnnnnnnnnnnnnnnnnnnnnnnnnnnnnnnnnnnnnnnnnnncaagaagtagagtttcttttatactgactttggcctaaaaaaacagattttcatggaggnnnnnnnnncctagatttttagtaagactattttatatacttttttacattgatcaagtacattatttttaccaaacaacattgtttcccactacatccatggttatgtataaaaaaacgccattgtcaattaagatgttaaaaaattatttccataagagtattaaattctaatctatgattcacttaacttcctactttataaacactaggtaaagtaatctcacaagctgccaaagaacacatcccaagcagtaatcacagatgatgaagcaccttacagggcccctccaccctcaaacgcgcatgtccagagaagtattaaagctgtattacagtgctataaattctccttttaaggaaaaaagtaatagattgtttccttaccgtgtttgaaaggaaaaaaaataaatccatagtaactaatggtctgccgattttttccctgaatttttaaactccaacaaagcattattttgcaaaaagtcctttagcccaaagtcagtgtctctgttttgatctctttgtaaaagaactctctgttcatccattctctttccctgggaccgtaaaataaggctgaaaaagtcttcatctggtactgtcggaccctttgtggtagcaggtggtggagcacatctttgatcatctaatctggatccttgacattttacaaggatgtcaaagaaatcttcatcagcctctttgttgtcattagtcatcaggtggctaagtaccgactggctgttttgtgttagacgaagccctggcaaattactgaaactagccctctggtcatccagacggcgactctgtgagctggcaagaagatctaaaaactcatccgtgttgggggatacca

SEQ ID NO: 441977 - DNA, 801 bp, Homo Sapiens
  misc_feature (738)..(738): n is a, c, g, or t
ctttttaagatgctgaggtttcttcttaactaccaatgattaattaagctcagtgtaattttaatatgccttattatgttttacatctttaaaaatacaaaaaattattgagtgttaatgtatatttttactattcatattattccactagcgaaaatgacttctagttactgcaagtcagaaagagatttattccaggaagaatgatatttttctaggctttgaaatcatataaagagaaagtttaaaaaaactcacattataaacagtggagagtacaagggttgtaattaaaactttttcgtgctgctagattatactcaagcacatcccactcatcctctagtgttattcacatatctaaatcatgatgtcatagcttttacacaaactgaggcaccatagatatgaaactatccttgagcagcttaaaatctagatagggctaaaattctgtttatttttgttggaggttgctttttgtacatttatgctgaaggggaaaatgacatagatggctatttcagaatttctttgaaaattgtgctttaagcttaaaatcaggaattgatttagaaatgtagatgtgaaagatagcattaacggttgacttttttctcgtatttagaaaaattaaattgaatatacctttgagtatcattgaaaataacctccaaaggaaagtatatcttggatgccttctttttgttgagatactttaagaaaatgaaccattanattataaagattcatgggaacacggcttttactcaccttaagccataaacccttctgtactag

SEQ ID NO: 441978 - DNA, 754 bp, Homo Sapiens
  misc_feature (125)..(125): n is a, c, g, or t
  misc_feature (230)..(230): n is a, c, g, or t
  misc_feature (406)..(406): n is a, c, g, or t
aatgttccacccctggaagtgtaaaagcgggtgataagctgggaatgagggtagagagatactttagctcaaattatcacccaggtatttctaatataataccaaagcaaactagaacatacgcnttagtgaaatcaatgctctatctgttttggatgagtggaaaatagatactcaccccaagagattattcttacatgaatacaaaactctcactaggcaaaatacanaagcaggtagaccttggaaatatagaaagtttataaaaattgtgatgcttaaaaaaacctacagaaatgtgaacatgtatactttttataaaaagcagtgaaaatcagagaagtttcatgtgggatagacagctctactattttaggcttgggtactttagagtacaaatcagtanaactagctagcacagtattgtctcataagttgaaacttttctccatcaggtcaagtaagacatacaggtctggctactagtaatagaagaatacatgttatcaaactaagcccccaacagatatcaactgtaaactccagaattaatataaagacagctatctaaaaccacggagaacaaccaaaagcaagccaacactggaggagagcgcactcttggaggaaaggaatttccctgtaagtttccaatttcaaggaattttgccgaaaggcatcctcagtagtggctgaaaagtgggaggaaattcccacactgtagccaaccagacacgggaagcctgaatgaaat

SEQ ID NO: 441979 - DNA, 1003 bp, Homo Sapiens
cttgagcaaaaagccttcgtgtctgtaagtgcccgaggctcaggagagctggggctcccactcgcggcagacaggcccgcgtccaccctgcgtccaccccggcccggcggcagcacggtgccagtcatctgcatgtgctcctgcggcgtgggggtttgtagacttggaaaaccctgttggcagaaagttaagagctcccaggcctgaaggcaggacacagtgccagcagggggccgtttgcccccatgtgtaagggaggcagggcccagctctcccacggcgaggtgagctgagactttctgagaacagttagagtgggtgcgtgtctgaaatgggtactcctagcagctattgtgtacgcaaagcctgagtacagcctgctggtgtcatggccacgtgtgagcaggccagcgtcacacggctcgctgtgacccgtcccggagactgaaatgggcctgggtcttctccttgtcctgtgattaaagtcctctcttgaaagtggagagcaaaggcacacagaggtgcgcgctcacaagaattcctcccggtgactgggtaatcaatgttactgctgtttcctttgcaggaaagaccacagcaagattctttcattcgtctcctcctagcctgggggaccaggctcgaactgaccctggacatcaaaggagggattatgtggctgctaaagccatcggcccacagccctgttcacgtcttggtgcttctctttcccagaggctggtcccagccaggcacacacaaaaggcagattctcgtaaacgcagcctccctccctggaggctgcctcctgcccctggatctggagtggagctgctctgagattttgagttcttctgcagagatgattaaatatatccaagagacatttggaaacctgctgaacattttacattggtctgctcagcacatggctggatgcggatatttctataattccagaaagtcacacagctcctctgtatgagaccagtgggcgccattt

SEQ ID NO: 441980 - DNA, 503 bp, Homo Sapiens
tccattacatttattaataatatatcttagattctcatcctgttcttttaaatggcgcccactggtctcatacagaggagctgtgtgactttctggaattatagaaatatccgcatccagccatgtgctgagcagaccaatgtaaaatgttcagcaggttttccaatgtctcttggatatatttaatcatctctgcagaagaactcaaaatctcagagcagctccactccagatccagggcaggaggcagcctccagggagggaggctgcgtttacgagaatctgccttttgtgtgtgcctggctgggaccagcctctgggaaagagaagcaccaagacgtgaacagggctgtgggccgatggctttagcagccacataatccctcctttgatgtccagggtcagttcgagcctggtcccccaggctaggaggagacgaatgaaagaatcttgctgtggtctttcctcgttaaaataacatttcggccaccacctgggctccc

SEQ ID NO: 441981 - DNA, 2854 bp, Homo Sapiens
  misc_feature (1584)..(1593): n is a, c, g, or t
  misc_feature (2198)..(2198): n is a, c, g, or t
  misc_feature (2205)..(2205): n is a, c, g, or t
  misc_feature (2612)..(2622): n is a, c, g, or t
ttttttcagtctttatcatttattatttttatttggacaacatatatacatatgtacaaaatacctactgtcagaatcctcttttataatttcatttgatttacaaaaacgggacagcaaaataacttaggtcactaatactgtacaaaaataaaactgattaaacagttgtaaagatcagtatcttacagtgttacagatcatctgatgtgaaagaacatctcaatctatccgagtgatgagtactgtgctaaatctatctgcaaactgacaaactaatcagtttctgtaattgtaactaccaaatagaattctcaagagaagcatgatgtggagctaaaccttaaagccagggcatcattccacaatggtgaagggctttcttcttccctaaccaaagagaggagatatcttaactctaaaactattaaattttccagaatatgacaactacttacagtattagataaaacaacttttctttctttttaaacacctgcaatagtctttcaaaaattcagtttggttaaaaaagtaaacaaaaattactatcctgcatttggattttcataagttaaatccatggtctttttaatataaaaagtaattgtttcatagttttagtgttcaatgaactctagtagtcctatttgaaccatatcttgatatagtaaatctaattagaatgctggttcctgttttgtgacattttaaaacaggatttaatcacaaagaataaaaaggcttgagtttatacgttacattactataacatataagagaatatcaaatgtgtgtttgtcaacaacttgaaaaggcaagtaacaacttttttgggaagtaaattgtgcatttttttaaaacaagttgctgcatttatatccatctaagtgcttgacaaaagccacatttagatttactcctgaaactataaagattgtctttcactgactttgctttgctttctttcgtttctttctgtgagggaaagatgactttttacaagttagcaagttgctaggcaaccccaaactcctcactcactaaaaggcagcgtgcagagtatcataagcagaaccattccatgagctcagtgagaaataggcagcctaacctatttcgtatggaagaacagatgtccttaaaacttattttggacacagaaattaaaatttggtttaaaataagtgtttcaaaaatctgaaacagaggtagaaagtgttctttatttttcctgacatgttttctcgtgagaaaacactttcctttttatcccatggactgctcccagtccctaatgttaaaaagcagttctctttatagaactactaattacaactacgttggttaaacaaaaaaacactgtgctagtgatggctgttgtattggaagttggagtcagccgtgacccgcgcccactgcaggagcccacactgattctgaatcagaaacgagtatgggtcaggtgaaataggtaggcaccctatgtttacacatttcagagcgcaagtataaactagagtgcaccatagctccctgttttaaatatcagataaaatcatcagaaagcgttacttctgaagnnnnnnnnnntgtaaacatttcccccatgatcactgctgactcccctcatttgaggtcttaactacgaaaactcagttcacttttctgcctcataaaggccacagttaagttttcaggtcaatggcatagatggatgtagtggtttcagccattatagacacctagatacaagatatattagtggtgaggctattgatgtaaaagatacagtgatgtgatttcattcgtagtattccatgttgcctgcattctccacaagggacgattttgcagagtctcctctgaaatcattgtggtattttcccttggtgttcactagttataggggttgatttttctgttcctatttcagctccctttccttctacataactcttgcacctgagagtgggagttttgtaggaacacaggaaggagaccaacaaacctttttcccccaaaaaaataggtgttttccagatctcattactgttatgcacacattcaaataaaacccaacagagtcaaaagctctctcccctagtggcattaggatacaataatgatgttaactaaaagcataggaaaatttggaaaagttaatagagttaaaattctgttggttcttttctttntctttgncaaaacactaccctccttctccttcagcatctgttgtgtatattctgccctcacatctctgccatgatttcttagggaaacgtgtatattgtaaaataagcagattataacgtggtgccaaacagaacatctgcttctatcctcaaagcatgtatttaacttattcatcctctgcattagaaaataaaagtgcagcttatgttcaaaaagtacaactcatacaaagcaaggtttaaaagttctgtacttagtgtaacctttcaaaggtttgtcttgattagtataaattcagactctgcttacccattgactataagtaactgttttttgttttcaagtctttagatgacagatcatgctggagtagatgtgctcttgcttgcataaagacagctgtgctatggcgnnnnnnnnnnnaatctcaaaagttaacgtgattcaagagagtggttttgctaaacaaactgaagcacactcgtcattacattaaaaggtaagaaaacaattctgagagacagcaagcataaagggcccagaatcactgtgcgaggccacaggtcaactcacccagcggacatatgtacaccagtgttgaatctttaaaattctaccccagtcttggatcccgagaatccggaccggtaccagc

SEQ ID NO: 441982 - DNA, 872 bp, Homo Sapiens
  misc_feature (642)..(692): n is a, c, g, or t
gagattgaaaccagacatacttattttaatcatattttatataaaatagacatttacataaatttaattttggaaagacctaggcaaagtatacatcattagactcaatgggagaaatactttatggaagataaattctaacgggcacagccaaagtaacaaaaatgtacatttacatacaactgatccaaacaggaagtaaaagcattatgaaaaaagaacatgatgcaaatcatttccccctgacaaaaggagggatctgcgtgaattacagcaaatcaaatgatttccacattataaaagcaagccatggcttctacagatattttaattccttgggaggaagtttcacctcatcttttttccccagtaaagtaacaatcactgtaggaatttttaagtgcacaaactgcaaaataagagtaactacctctgccatgttcaagcacttgggcaattcagtcacttttagggttgtatcatttaaaaaaggggcaacatttatgaattatctcatcagatgcatggtgtttttcaatccagattcaagagtaactattagagttactcattgagcttaatggaaacatcaaaccgacgagtcctttcatgggtggtaaacatgactgggagacaatggcnnnnnnnnnnnnnnnnnnnnnnnnnnnnnnnnnnnnnnnnnnnnnnnnnnntagaactcagatgtcttgattcttggggtagtgtacccctcctatggaccagcaagataaataacccccaaaggacatcacacatactgaaaactaccaaatttgttacatatatatatatacaacgtgtactactgagaatgcaaagaaactactggatttttagaaatagacatgtcc

SEQ ID NO: 441983 - DNA, 846 bp, Homo Sapiens
  misc_feature (643)..(693): n is a, c, g, or t
  misc_feature (802)..(802): n is a, c, g, or t
tttaaatggtatcttttgacatttaaaaagaattaagtacctgtcaaatctagcattgaggttgcagttgaataagataaaagcttaggatgtcaaaaaataatatagagaaatattataagattttatgattattcttgacgtttttgatgcaaaaggaaaatatgctgaatagttcttccaaaaaatattatttccctcaatattttatttgtagccatgtaatttaaagagaacagagaataactgcaatcaaaagtatggtttaatatcaatcaaagtggcacaacagaattgataagatctttataacaatcaattggctgatattaaaatattgattttaattgatcttttcaattaaaatctttagggcctgtaactcataaaatcagcatccaccacaatatatggtcattattggtttgtaagcatagatcaccattgactcctaccgtggagagacatgtctatttctaaaaatccagtagtttctttgcattctcagtagtacacgttgtatatatatatatgtaacaaatttggtagttttcagtatgtgtgatgtcctttgggggttatttatcttgctggtccataggaggggtacactaccccaagaatcaagacatctgagttctannnnnnnnnnnnnnnnnnnnnnnnnnnnnnnnnnnnnnnnnnnnnnnnnnngccattgtctcccagtcatgtttaccacccatgagatgactcgtcggtttgatgtttccattaagctcaatgagtaactctaatagttactcttgaatctggagtgaanaacaccatgcatctgatgagtaattcatagatgttgcccctttt

SEQ ID NO: 441984 - DNA, 754 bp, Homo Sapiens
  misc_feature (558)..(558): n is a, c, g, or t
cattttccaaaagcaggctttaattgcatagttgagtctaggaaaaaataatgttaaaagtgaatatgccaccataattacttaattatgttagtatagaaactacagaatatttaccctggaaagaaaatattggaatgttattataaactcttagatatttatataattcaaaagaatgcatgtttcacattgtgacagataaagatgtatgatttctaaggctttaaaaattattcataaaacagtgggcaatagataaaggaaattctggagaaaatgaaggtatttaaagggtagtttcaaagctatatatattttgaaggatatattctttatgaacaaatatattgtaaaaatttatactaaggtcatctggtaactgtgggattaatatggtcgaaaacaaatgttatggagaagctgtcccaagcaaactaaattacctgtacttttttcccatttcaagggaagagtgcaaccacatgaagcaatacttcttacacatgcctaagaaacgttcattgaaaaaataaatttttaaaaggcatgtgtttnctatgccaccaatacttttgaaaaattgtgaaccttacccaaaaccatttatcatgtccattaagtatatttgggtatataattatgaagatatttacatggtccatcttcacagtggaaaaactatttgggctaccaaagtgtgcaagaaatgtaagtcctatagtattataaatgctgttttctcaaagcctgg

SEQ ID NO: 441985 - DNA, 631 bp, Homo Sapiens
  misc_feature (347)..(359): n is a, c, g, or t
aggggatgggaggtggtgtgtgtttttctcctcttggttttcatttgctcaagcacacaaaagggacttttgtttactctatcatgaacaaaggaactgtccacatactgtaaaccatgagcagtgttgttgttgtttttttaaacagtatatttggtggtctctttgtctgcttttatttccagttcgatcttctgggtttagttttgtctttaaaaagaattcaaaaaaagactgacaatgacagttttgagttggatagtgaaaaagtggagcctccataatcagtgtggttgccttcagacctgagtacttagctgagggtgggtgagagccctttgttcccnnnnnnnnnnnnnggcttttgtaatggaatccatgttcacatcctgtgaactctgtctcctgaaaccctgaagtatttcctagaacctgaaatattgttttcttccttgaattttctctagaaatgcagaaattatgaaggtgatgggtctgtatccccctgtccccttcttttccatgcttgacttccgagagtacttgcactgcagcacccatcattggcgtaagcggctttcttggtccatgtttttaggcattaattgcctagctgtttatgagacccttc

SEQ ID NO: 441986 - DNA, 943 bp, Homo Sapiens
  misc_feature (45)..(93): n is a, c, g, or t
  misc_feature (682)..(701): n is a, c, g, or t
aatatagaacagtcaggttttattacttttaagtaataaagagcnnnnnnnnnnnnnnnnnnnnnnnnnnnnnnnnnnnnnnnnnnnnnnnnncttacaacatacattaagtcgtgaatcagatgttaggggatgtggagatggaaggaaaattggtgacatcacaatatttttacaactttacaacaaatataaatctgagtttgttgcatctaccagtgtctagcaagggtggaaagcaaaggcacactcgggtttatggaccctccccccacacacagtgggggaaaaaaactggggagaaatacttaaatgcagaagaccagctcaatacatgtgggtattttagggttaacaccagaaagtgatggggttgtgggggtgtaggaatgtggatgtaagttttgacacaggtctccttaacagctgaggcagttatgcctacaaacactgggacaagacagccgcttacgtcaatggtgggtgctgcactgccagtactctcgggagtcaagcatgggaaagaagggggcagggggatacagacccatcaccttcctaatttctgcatttctagagaaaattcaaggaagaaaacaatatttcaggttctaggaaatacttcagggtttcaggagacagagttcacaggatgtgaacatggattccattacaaaagccnnnnnnnnnnnnnnnnnnnncaacaacaaccacctactcctaaacaacagcaaaactaatggacttttggaacaaagggctctcacccaccctcagctaagtactcaggtctgaaggcaaccacactgattatggaggctccactttttcactatccaactcaaaactgtcattgtcagtctttttttgaattctttttaaagacaaaactaaacccagaagatcgaactggaaataaaagcagacaaagagaccaccaacc

SEQ ID NO: 441987 - DNA, 955 bp, Homo Sapiens
  misc_feature (24)..(24): n is a, c, g, or t
  misc_feature (81)..(81): n is a, c, g, or t
  misc_feature (184)..(184): n is a, c, g, or t
tgccttactttcttctatcaacanaagtatggcatacttatatcaaaatacttatcaagatggttgaccagattatccaanctattttggtatcaacgggtacgtctctggaaggatcccttgggttggcactgagcactctgacttttctccgtgatcatgatcttcagcagtaccatgaagncagcagaactcaaagttcaaggaattttcatttttcaaccattcttcttctgtcttttctccactgacatcttccattgcaagtagatcatctttagtgtcttccagtcaaggggaaccacatagtcatcaggcaacaaggattccattggaacgcctggagatccaaaaagctttactaattgaaaggcaaacccttgtgataatggtagctcaagggaacggtagtcagtgcttgttaagtcttggctgtcctcagctggtaattccttaggttcttcccatcttttcagctttctatcaaacctttcatttaaaaagtgaaaatcagaagtgactcccaaagagcacgaagtatcaggatgactatgtaaaatttctggagaaataaaccctgcatcatttagtttattacctactcttgtctgagattcgaaagtcaaaaacagtttcttgtttgtaaaagatggcttccaaatactagataaattatgtagcacaaaagaaggaatataatttttgtataaagatgcagagcaccttagtctgttaaatgacaggcaatgagaataacgctgtccatcaatatttaaaggggtagctttgataatatcaaggtaaaaccacaatggatgatgatcaaaggtcataagtttttgtttattctcctcttcactgttcctttctgaaattctatctttttcttctcccaaagtaatttttagtccatggttttttgttaacaggtcacatttctccctttcttttaccc

SEQ ID NO: 441988 - DNA, 857 bp, Homo Sapiens
  misc_feature (648)..(648): n is a, c, g, or t
  misc_feature (671)..(671): n is a, c, g, or t
ggatagcgatagtaggcacctagggaggaagtggccgttagttttacactgactttttaagaatggagaatgcacgtgggtttctgttgcggatgattcatagtaagcaagcggttgatgctgttaataccggccctacccgattgacattaattttattcagcttttaaaaagatgaagaactaaggggaacaaatttaagtttgttgcaacttagccacacatgcttccctggtaccagctggaatcagcagctcacaggcatcttcaggacacttcagtgtatatgacacagtactttgttagcgtctgcgtgtgtatggaaagttgacaaaaaatggcatgaaaagatcatgattggattttcttttaaacctgcccttctgtaaaaaatagtttatatatttttaaattagtaggtatgtgtggcttccttttttcctaacattcccagcaaatttttgctgctaagactatcactgttaaagtgaaaattacagggaaaaatgtgatgaatataccgtaactcaaaatgtgatattttctttaaatcactcttttatgctttaggaactggttggtctccactttgatttttagtgtaaagagcctgagtatacgtggatttcattgtataaatttacttcnttgtcttttacttggggcacggngcccctggagggctttcctactttctcactatgtaacaggtaattctggattatgctttagtttgacttatttttaacaaaatattagaaggtatgctttggttcatatacgtgggctaaagcagggcgtgtattttgtaatcctgaaattggtttgcatctggacaaatcttaaatttcccatgg

SEQ ID NO: 441989 - DNA, 917 bp, Homo Sapiens
tttacaaagggccacagctccaggacccaggagcgggctatatactatcctcgacattcagggcccagccggcacctgaaactgccctggggatgggcctctcctggccaggccggggccaaacgcctcagcctcccctccccgggtccacatcgggggctggagagggagtggcctctctccactccaggtgctgccttaaagaaaatgggggaccatgcccacctggcgggcctctggaggggtctgcctgtctggccgtctggctctcgagctcccccaacttctttagtattagtaagtcaggaagaaaaggggcaaagcaggaaaatgcctcccagagccccttccccggagctggactgtgggggatggggctggtacttcctagaaacggggcccagttgagtcctgggacccctccctggctgagccctcagggtcctcccctccctatggcagggggctcaggccgggcgttgtgcataaagtggtgagggcatgatggggacctgggccctcggccccctgggcctcccttggccccactcaggccttcagctggtgccactgggccacgggctgccggggacgggcaatcatgtccttccagtgcttcacctcccctggcccgctcttccaggacaggtagatcttgccgatgacgtcattgcggctgagcttgtccttgtccatgacagtgatgatgatggtcgtctccctcagcttctccgtggggatatcgaaggcgaaggactcattgaagatggggttcaggttcctcttcatcgtcaccgtcttcttcttctccacccgcttgtccttgtacatcagccataccttcacgtaggggtctgatgtgcccccgcgccacccaggcctcgctacctataaccgcggagactacttgccccaga

SEQ ID NO: 441990 - DNA, 816 bp, Homo Sapiens
ctggaacgagaccttcctctttgaaggttttccctatgagaaggtggtgcagaggatcctctacctccaagtcctggactatgaccgcttcagccgcaacgaccccattgggaaggtgtccatcccccttaacaaggtggacctgacccagatgcagaccttctggaaggatctgaagccatgcagcgatgggagtgggagccgaggggagctgctcttgtctctctgctacaacccctctgccaactccatcatcgtgaacatcatcaaagcccggaacctcaaagccatggacatcgggggcacatcagacccctacgtgaaggtatggctgatgtacaaggacaagcgggtggagaagaagaagacggtgacgattgaagaggaacctgaaccccatcttcaatgagtccttcgccttcgatatccccacggagaagctgagggagacgaccatcatcatcactgtcatggacaaggacaagctcagccgcaatgacgtcatcggcaagatctacctgtcctggaagagcgggccaggggaggtgaagcactggaaggacatgattgcccgtccccggcagcccgtggcccagtggcaccagctgaaggcctgagtggggccaagggaggcccagggggcccgagggcccgggtccccatcatgccctcaccactttatgcacaaggcccgggctgagcccccctgccaatagggagggggaggaccctgagggctcacgcaggggaaggggtccccggactcaactgggccccgaagactaggaaagtaccagcaccgataccccagagccg

SEQ ID NO: 441991 - DNA, 515 bp, Homo Sapiens
  misc_feature (359)..(359): n is a, c, g, or t
  misc_feature (433)..(433): n is a, c, g, or t
  misc_feature (446)..(446): n is a, c, g, or t
  misc_feature (468)..(468): n is a, c, g, or t
  misc_feature (473)..(473): n is a, c, g, or t
  misc_feature (505)..(505): n is a, c, g, or t
tcctcttcatcgtcaccgtcttcttcttctccacccgcttgtccttgtacatcagccataccttcacgtaggggtctgatgtgcccccgatgtccatggctttgaggttccgggctttgatgatgttcacgatgatggagttggcagaggggttgtagcagagagacaagagcagctcccctcggctcccactcccatcgctgcatggcttcagatccttccagaaggtctgcatctgggtcaggtccaccttgttaagggggatggacacctccccaatggggttcgttgcggctgaagcggtcatagtccagggacttgggaggtaggagggatcctcttgcaccacctttttcatnagggggaaaacctttcaaaagagggaaggttttcgtttccagttgggggtttcaggtttttttccgtttcaacnttgggttttccancttgttgtttcttgttcggggnagcangtagatctttgaagaagggggttcgttggttncccttgaagt

SEQ ID NO: 441992 - DNA, 500 bp, Homo Sapiens
gcccttgtttcagggctgtggcctccctgctctatcctgaataaagcagacaggtgtgcagattttggccatgaaagcatggctaatagggccacagcccctttaaagaaacatggtttgactctggttttcttgggggaaaataccacaatcaccgatgcaaacattggaagattattgagagccctagaaagctgctgtgatcccagtagaaaatatgtcccagaaatgtcatgagattgctgtgtgttgcctgggacacagatcaagggcctatcttggagagctggggaccagcagtctgcctggaggccagggagcagtggctgagtagctctgcctttgctctggtctataccttaagaatgccaaagaatgaatttcaacgcctgcctttggcactctgacttaaagtgcaaaaagcttctgtggcgaggcatgctatcatggaatgagactggcttgccctaggcttaatggatgggcagtcattttaccga

SEQ ID NO: 441993 - DNA, 696 bp, Homo Sapiens
  misc_feature (177)..(177): n is a, c, g, or t
  misc_feature (190)..(191): n is a, c, g, or t
  misc_feature (194)..(194): n is a, c, g, or t
attgtggtgagggaaatcccaaagccccgttgtttcatggaccacgggattttccgtaggggagacaggtttatggcccatgtttccctttaccttacgggggccccgcgccgccaaaacgaatggttctagaaaggcttctggaggggccgaggcggccgacatgaaaggaagggntgagtgtaatttnngangtggtagcagggttttaaactttattttgcgctccgtgacccttcagatagtgatttgaatgattaagtgaaactcttcttaggttaagtgtcctagtccacgctaaaatcatcttgttggtctctttggcgctgtcagcgaccagtatcagcgcccggcttgtccccgctgcccgccgcgtccctggcccggatgtgggaggcgaaggcggtgagcatttccagagcggtgagatgagcgccgcgcataatcaggcgatgcccgtctccgaacagcacgtccacgcagggctcggagccgtcatgcctcacgtccgcaatcactgagcagttgagattagtggagcggaccttctcactgctcaccgtctgcaggaaggtcctcgtcgattccacgtttttctcgaagggacagaactgaacccgaacctgtttgacaggccgcagaccaagccgagccaaggcagctgccatggtgacctccgccccggaagaactcccc

SEQ ID NO: 441994 - DNA, 1286 bp, Homo Sapiens
  misc_feature (232)..(232): n is a, c, g, or t
tttattttatatgtaaatggtatatgatataaatgggatatgaaagagtaaaaggtgggggtaaagaaaggcaagggataagaaagggttaggtggtaacatctctatgatgtgatttcgttatgtgcaaaatgttctgaaaggaaacaaaaaaagagttattgggaaggtatatatcatattatatggagataagtctataatagaagttaaacaggtatgtttggatgantaaatctgattggtcatatctttattgatataagttctaatctagaatgatagctttttagagttggaagggactttggatattaattacgtggttcagtcttcctgtttcacagaagagacaagtgaaagttagggaggctgatttatttaaaattatatagagggaaaaaaaagtcaggagaaaatgcagataaaattcccagagtccaatgttctttctactgtactaaaatataaattttcatgttcttgacttgacctcctgattctttcaaagattttctttgagaataagtaagtaattattcagaatcttccaaattctgttccagcactggcacatacagacagcagtaaagcaacagcaaacaccttccctcacacaaacattcttggttcgcctagaaagactgccaggactcatccagtcaagacggctacaactgaggacagcttcccctgtgggtcaggaacaacatggagggtgatctgatttaaaaaactgccagaggagggtccatgaagtcatgagagatggaagagcctgtagccaatgtccaccctctagacaagggaagaagcagggcttttttgcacagcccgttcaccatccagaggccaaccttgctggaagaatgtcctggctcacatgagataatcagtctctaactaatattcctcttttctccacttgagctcgcagaacaccctctcgaagcactcatgcatgtaattgaaatatggcgtgaagattttaacccatcggggcttcttctctcctcgtgcatattcgaaacagaaggccatcccttcttcatctgtgtcccatcgctgcatctcatcccattcaaatgcaattacctggttctccagctgtccttcttcagtgcaggcatgcagtttaaagtgcgtgatgctgatggctgtgataacgtgccccttcctcctggagtcacaggcacagtggggaaagatgatttcattgtaggcctcacaagtccttagcatgttgaggtacatgaccatttttctttgttcgtatagcttctgta

SEQ ID NO: 441995 - DNA, 1199 bp, Homo Sapiens
  misc_feature (128)..(154): n is a, c, g, or t
caggtctgatttattagccactttagtttcataaaactcagcatttctattaaaataaaatgatgtccaaaaggtttgcttgtttttaagaaaattgcatttaatacagggcaagactttgttatggnnnnnnnnnnnnnnnnnnnnnnnnnnnaacaaagctcaaattctcctgacttcacgcctgttactacagctggagggaaaccgatttcagaatctatctgatatgtcggatttctttgtggcatccacttcatcgctcagcagccagccatgatgtcataagcccatcagatttccggtagggggaaaacgctggggaattggaaagaatggatgtttcttacccgtcaggaaggcaggggaaggagctgggtatgtttgggaggagaagccgcgtggctggtgggggacaggagcaggctcaatgtttgtgatattaaatgtcaggcagaaacctgaaaaccccagctacccagatgttttctcaatatccagatgtctggcactgagcagaccatgctcccgcctcccaggaggtgctcagcatttgggctttgacctcaggtctccgggtgagcgcacactgccaggagctgtacatcctcgcggctgcccacccttgggtttgggattttttttctaaatcttgtacacatagatgacacggagtaactaggtccagatttttaaaagctgttgaagcagtgatttgagaagttcagtctctggaacgctgcccccgggttgctgaagggtgcctcggtcacggggccgcgtctccacaggctcaacagctgcgagtccccgggactgccgacctcagccttggggatccgtcttgaccacccccggattcggaggcgcccgggccggaccacctgtgctggtctccacctcctcggcaaccccgggtcaccggagatgctgcagctcgagggtcccgcctgcaccatccatggctctcgagatccttcagagcgcggacccggccgagaccccgcggagccgctgcgcgtggctggtgcccgcggtcgccccgcagtcccgtatgcggcgaaaccgccggggctgcttacctggcccgcaccctcacgctcccgtccgggctgcgcagccgcttctctcacacattttgcgataacatcgatggcgaaagaaaatgttgtaaatcctcctgcggccacgtggctgtc

SEQ ID NO: 441996 - DNA, 472 bp, Homo Sapiens
  misc_feature (149)..(175): n is a, c, g, or t
  misc_feature (351)..(351): n is a, c, g, or t
  misc_feature (459)..(459): n is a, c, g, or t
ggaacactcacacaaagcttcaggtctgatttattagccactttaagtttcataaaactcagcatttctattaaaataaaatgatgtccaaaaggtttgcttgtttttaagaaaattgcatttaatacagggcaagactttgttatggnnnnnnnnnnnnnnnnnnnnnnnnnnnaacaaagctcaaattctcctgacttcacgcctgttactacagctggagggaaaccgatttcagaatctatctgatatgtcggatttctttgtggcatccacttcatcgctcagcagccagccatgatgtcataagcccatcagatttccggtagggggaaaacgctgcccccgggnttgctgaaggggtgcctccggtcacgggggccgcgtctcccacaggggtccaacagctgcgagtccccgggactggccgacctcagccttgggggatccgtctttganaaccccccgaatt

SEQ ID NO: 441997 - DNA, 773 bp, Homo Sapiens
  misc_feature (76)..(102): n is a, c, g, or t
  misc_feature (211)..(219): n is a, c, g, or t
  misc_feature (393)..(393): n is a, c, g, or t
  misc_feature (528)..(541): n is a, c, g, or t
taaaaaaggtatcaatccttggttcttacactgtggtccatctccagactctaccacttacagacagacagacagnnnnnnnnnnnnnnnnnnnnnnnnnnnttttgggacaagtggtgagcccaagaaagtaattagtaagtgagtggtcttttctgtaagctaatccacaacctgttaccacttcctgaatcagttattatttcttcannnnnnnnnctaccagaggacagattaatagatttaacccttcacaacagttcttgttagaatcatgggatgtgtggcccagaggtaagaatagaatttctttccctaaagaacataccttttgtagatgaactcttctcaactctgttttgctatgctataattccgaaacatacaagacanaaaatagaaacagatggaattagaaatatatcttctatttttaggcttctattttctttccacccactcttcacagggctattctactttaaaggaagcctttttattttgctgcacacaatctagcaggaatcnnnnnnnnnnnnnnaagagctgtgtcatccttatgtaggcaagagatgtttgcttttgttaaaagctttattgagatataattaacataaaataaactgaacatatttaaagtgtactatttgataagttttcacaccttgtggagaacatgcatactacaattaagagagtgaacatatccatcatccctcaaagtgtcacaatgctcctcctgatgactcctccccagatatagtatgtctttt

SEQ ID NO: 441998 - DNA, 439 bp, Homo Sapiens
  misc_feature (14)..(14): n is a, c, g, or t
taagtagtttcttntgtaagacatatcaagctgttaactatacacgtgaattccagaaacatgaaaattgttcagccagtaacgaccatgttactatgatgaattcttatttgatacactccagaaactttcccaaaggagttcagccagtactgcaaattgttactttcttctaagtatcaatgatagggagcaaggtgtgggtgaagaatagagctataacttccacttacaatggactataaagactggggtcaggctgtgatttaaagaggaaaccagagggagagaaagaaggtgggctccagtacctggtgttaagaaataccgaagttcattcaagcaattcaccagcacaaggcaaattgaagaagactgcccctctgagcttgcacacaacatacacaactttcagactgtgatttattgattctctttc

SEQ ID NO: 441999 - DNA, 1158 bp, Homo Sapiens
  misc_feature (686)..(699): n is a, c, g, or t
atgttcttttatggacaaatcagattaatactaatgttaaggagagccttaaaggagaaagagaatcaataaatcacagcctgaaagttgtgtatgttgtgtgcaagctcagaggggcagtcttcttcaatttgccttgtgctggtgaattgcttgaatgaacttcggtatttcttaacaccaggtactggagcccaccttctttctctccctctggtttcctctttaaatcacagcctgaccccagtctttatagtccattgtaagtggaagttatagctctattcttcacccacaccttgctccctatcattgatacttagaagaaagtaacaatttgcagtactggctgaactcctttgggaaagtttctggagtgtatcaaataagaattcatcatagtaacatggtcgttactggctgaacaaaattctttttgagactattgtacttagtcattaaataattgtttactaaggcaattttcatgtttctggaattcagtgtaatagttaacagctgtatatgtctcacaaaagaaactacttaggttggaaacaatggaaggttgtgtataattaattcaatcaggtcatgaatatttatttaacatatggcattttaatttatatgttcccattctcatacttcattactatacagcagcaacaagataaatttcaggnnnnnnnnnnnnnnattaagtgggccatgtctaaaagttgttacattcctggttgaatattatggacaaaatttccccattaaagtagttttgtctttctcaaggattatcctttagggttgggtggattaaaaacattacattagtgcttcttgagcatacaagtcactagggatcttgtgaaaatacagattccttttagtaggtttgggatgaggaatgaaggtcttcatctctcaaatctcccaggtgatgtggatgctgccagtccatcgaccacactttgagttgggagattctacatcttttgagaaatatccacactgaagcctatactcttacacttttcaaagactctgtgttcatgtctgtgttctgcaagaattttttcttttaagaaataaactgcataaagtaaaatcagaaaaccataacactggtttctccaaattggccacaaatactgtaatacc

SEQ ID NO: 442000 - DNA, 1023 bp, Homo Sapiens
  misc_feature (79)..(79): n is a, c, g, or t
  misc_feature (169)..(169): n is a, c, g, or t
  misc_feature (196)..(196): n is a, c, g, or t
  misc_feature (226)..(226): n is a, c, g, or t
  misc_feature (246)..(246): n is a, c, g, or t
  misc_feature (259)..(259): n is a, c, g, or t
  misc_feature (319)..(319): n is a, c, g, or t
  misc_feature (326)..(326): n is a, c, g, or t
  misc_feature (334)..(334): n is a, c, g, or t
  misc_feature (394)..(394): n is a, c, g, or t
tccaagtatataattagttcttctattagtgataagcaaccctgtaaactatccaccaactcccggaataggagtttcnttcgttcacggctttccaagttttaaggtcctctgactgccttttttaggactcacaagcacactttctgcccaagttcctgaaacggtnctttggtgaagtatcagcctaatgtancaagatttttcctggtcagctttctagcanttctgtgacatgacatcagnctgagtcttctgnccaagtgttactccggactgctgcagcgaaggatgcctgataagtagcagatgacgttgnactcgancattcatntgttgcatcggtgactaagggtatgcaagactcactaagttattatagatactctgactntgtgttttcagttcttcaaaggtgggagtgatttcctggagcatttcaacgtgtttcttgacttcgaacgtgacccatagcctggactaatgtaaatagacgtgtttgaatgttgtcttgccatgatttatattcacccaaaagctgcctaacactgttctcatagggaacatcttcaccatctgccagagcagcttcttcatccttagccatagctttcaagagatgtttgacatctccaagctgtcggttatgaccagtgagcacagtctttatattatcaaccagattctgaattgtttcacagaccgtttctatctgctgctctttctctgtctgaattgccctctgagtagacatatcctgggtcaactgtttgtgtgctgacaaaagccattcagagctgccaataggatgttcaagaccagtgtccactctctgtaataaacgaagctctaactcagacactgaactgttaaactgtgatgcaaacgaacacatctgctgacatcgcttgattagttcaaataacgccgcatccaggtttaaggcttctgcagttcttgttcgtaaactttcaagatgctcgtgccgaattcctgcagcccggggatcgcactagttctaga

SEQ ID NO: 442001 - DNA, 961 bp, Homo Sapiens
  misc_feature (292)..(292): n is a, c, g, or t
  misc_feature (660)..(660): n is a, c, g, or t
  misc_feature (663)..(663): n is a, c, g, or t
  misc_feature (670)..(670): n is a, c, g, or t
  misc_feature (679)..(679): n is a, c, g, or t
  misc_feature (682)..(682): n is a, c, g, or t
  misc_feature (703)..(703): n is a, c, g, or t
  misc_feature (705)..(705): n is a, c, g, or t
  misc_feature (713)..(713): n is a, c, g, or t
  misc_feature (718)..(719): n is a, c, g, or t
  misc_feature (738)..(738): n is a, c, g, or t
  misc_feature (746)..(746): n is a, c, g, or t
  misc_feature (753)..(754): n is a, c, g, or t
  misc_feature (761)..(761): n is a, c, g, or t
  misc_feature (771)..(771): n is a, c, g, or t
  misc_feature (774)..(774): n is a, c, g, or t
  misc_feature (781)..(783): n is a, c, g, or t
  misc_feature (794)..(794): n is a, c, g, or t
  misc_feature (799)..(799): n is a, c, g, or t
  misc_feature (802)..(802): n is a, c, g, or t
  misc_feature (807)..(807): n is a, c, g, or t
  misc_feature (809)..(809): n is a, c, g, or t
  misc_feature (852)..(852): n is a, c, g, or t
  misc_feature (874)..(874): n is a, c, g, or t
aggctgtgccacacattgaccattccttggaagttcttcttggatgcatctttatcagctgcagcagccataggggagtccctggaggcatgggcagaaaatttgaatggcccttcgtgatgaaaggaaggcagtcacctgaaaaggtatgaggaagagtttgtttctctgatcaaaccttcagagtttccacagcagagcagaaatataacttctgattgcagccatccttaggaccctgcatcaacccgggagcaaattactgagttatttctttttccatgcctgattntattaaacatttatttacttagagaaaaatcatcatattccttataagagtgaaataattatcaatattttgaatctatgtttagaaataaatattttaatttgtattttaaatcaacccctatagggcaggactttatgtagcatcttctgcatctgcttatacaaatgggctttacttttatagatttaccagttatgtaacttagatttcttaaaactgtatacagataactaatttttattttgaaatagcttttatgtttttgtgtttatgtaatagtcacattaattttgctcttttggctttgtgttgtgtttatttgatgacttgtttatttcggttaaacttcttccttgacttttganaantcacttntattcatcnttnaaagtggttggagttggccancnttcagctntgaannttattcaacctggcttccntcgtgccngaattcnnggacgangcaaggcttncangagcttnnncgaggaaacangaccnganagggnanggtgacccttgaagtaccagaataaatttttagagctgaccangaataggccatctaagatcttngcaattattcttgggaaggaaatgctcaagtcaagaaaccggaaggcccccatggctgtagtgattgggcaccactgtgattaactc

SEQ ID NO: 442002 - DNA, 770 bp, Homo Sapiens
ggggggggattaccaaggccctaagtccatggcccagggattttcctagggaaaacaggcttaggcccatggttcccgttgacctgggtggcccgcgcggggccaaacggaatggttttaaaaaagtttcttgaggggccgaaggcggccgaacagatttttaaagcggacaggtagggggtcatgggggtaaagaaacctttaatgaggattcaaggttaataaggaagacgcagagggccagcactcagccccaacctcctcacgtgtacatggctccatggaggttctccagtcggtgttgctgctgctgttttcgagccttatctcgtctgtgctcctcataagtgtcgtcatcagtgggcagctcatagcggcacaagggacaggaatttgtcttgcttagccagggcagaatgcagctggaatggaaaaggtgatggcaaggcatctcaatggcagtctcctcctcctcaaattccaaaagacacacggggcacttgagctcagcctgagagcctctgatgactgtcctggggaggttctcaaccacagtcttggcagctggtggaggcaggtggtggtcccaatctactaccaaccccaagtcttcaaagtccatcctattgaaaagtgaccttgcgagctccagcagcatgttggttcgcgtctcctgctcagggtccgacggctcgcagtcgtgttcatcgaaataggacgccatggctgcccagccttctgacacagccctcggaccctgctcgataccc

SEQ ID NO: 442003 - DNA, 726 bp, Homo Sapiens
  misc_feature (245)..(295): n is a, c, g, or t
  misc_feature (599)..(675): n is a, c, g, or t
ctgggagcataatgttttattgttgagcctcctaatttacaacatgtcttttgaaatttgcttataaaattttgtcacagggagcaacaatgttaacctaattattattcacttattttcattttttaaaataaatgactataaataactgtctcttcagttaggatcagggatatcataaaaacatcactagcgagacatattttagtattaatactgatgcaaaaaatgaaatagagaccaannnnnnnnnnnnnnnnnnnnnnnnnnnnnnnnnnnnnnnnnnnnnnnnnnncaaaacttgccatttctcttaagtagctgataagttgctttctaattttataaattacaccacacctgtgaaaatatggacaactattttatatttttgctgctatataagacatttaatgtttatacagagagctgaaaaattacagaggtgatgcaatgggaattgatgaacattttcacctgaatttccactggcctttttcagccagaatcatcttgatattctctgaatattcttttagaaatgagtatggtatctgtttcttcaataaatacacatacacacattataggtatatgtnnnnnnnnnnnnnnnnnnnnnnnnnnnnnnnnnnnnnnnnnnnnnnnnnnnnnnnnnnnnnnnnnnnnnnnnnnnnnttctgtgtgcacttatacacacatggcacacataatgtcctttgggtttat

SEQ ID NO: 442004 - DNA, 1096 bp, Homo Sapiens
cgttcaaaatgcattcataccacaaggagctgaaatctttaatatgttgcccagtcttccacaatccatgccaacaatgggttcaagagcttctctttccttccattcaagaaagctccttctagaaagcttggggtgggtaatttgattaatcaccccaagagattgatggtctgacaagtcttcaatgactcactggacaagtctctgctgaaagtctgctctcatacaggcacagagcatggtgcacaaattcatactgctcactggtttgcaccattccacctctatccatacgaagctggcagacaatgcttagtgcatccacaactccttcttctttcagctgttgacagccaatggatgtagcaataaaacaccctgttctacctattcctgcactgcagtggacaaccacaggccctcggccctgggaagcaagtctgtcttcttctacatccagcatgagctgtaggaggggctgggcactgtctggagtcttgtgatcaggccatgaggtgtaccagtaatgcttcacatgttgggtgtggcttccttgctttaagacaaggtttccatatatccctctcttttccggccagtatagcacacatttctcatttttttctttgagttttgtgatcataacaatcacagggctgtcttcctgccaaaccatctgccagaaatcatccacggtgttgatcatggggccctgcgtggcaatgaaggctttctccttgccactgtagcccctaatataattagcattaatgtaggtgctcaatgaatcggttacattttttggtcttaaacacactctgctgaggggatttggtaaaatggtcttatagcgatttttagttccatgacgcggaatatcaatttctttgggatccacaaagttcattggtatttccatgaattcactttggagtaaatgtgaacttgccacgacgtccctcagctgaggaccttgtgagaattcggctgggctgactgcaggatactccattggctaccttctcccgtggtgttggtatagacacaaagggttcaatgttccccaagctactcatgtccaatgtaagagata

SEQ ID NO: 442005 - DNA, 784 bp, Homo Sapiens
  misc_feature (180)..(180): n is a, c, g, or t
  misc_feature (223)..(223): n is a, c, g, or t
aaaaagcggtgtcaattcagatcctttcaatggaccgattagggcacttctaatgggggctcactgatagcatgccacccactgattttcagaagaaggatcacatatggatgcctcttcagattttagtctggttttctttgtagagagatctacacttccatccccctgctgagtatnttgttcctgcattcgattcacagtgaggtctaaggggctttcntgctcttcctgaagggagttttctgcttgattcatttggatacttttacatactatacttggtccaattgaaccatttctattctcttgagttttaccactttttgaaatgtactcaatcgcaaattgacgtatcatctttttcattaattcctgagcaactaggggaatgttaggatcacagttctgaggaagatctttctttcgaaagagtgcatttaggtaattttctgcttggcattcaatcttatcagtgttggactggccctgagatgatagctcctctgttggtgttgactgtgaagaatcaagagatggtatacaatcactgactgcttctctctgtaggttacaaaatgaacatttttcatccatagaccagtcagtcagctcttctggttcacagtcttcaaataaactgaggtctcttcgtagccgtggtccataaagcccttctaaaatactctcaaaacctacacagtgcatgaggcggtggcgccaagagtcgagttcccgccggaatcctcttctctccgccgcgcaccgagggctccggcactga

SEQ ID NO: 442006 - DNA, 536 bp, Homo Sapiens
cgctaaaaagggatggcctaaaaataagggcagagaaaaaggccagagtaaagtacctgaatagcttggcaagctggattggtgaaaagtgagggtgtcctcaaggaagaagaggacccccaccccagccaaggggtaatatgtggatacacgggtggttaatgggtcacctatcaagcagcagatcaagccatttgctgatttaaaaagaacaaagagtacagagcagctttggggaagtctgagaaaatgtgaaatagcccagatatggtgggggagaggcagctgagcagggcccactgggtccctcagaagccccaggacaggagcaggggagcccagagctaggctggcttcagatccaggataagatacagcaggagaggacaggaacagatgggggtgcaggggggagtgaggtcaggacaggttgacaggctggcagggtcaagaggtagagggactggaggaggcatggagggtctgaaaacagaggggcccccatggcctttcccgcattccaataccatgtgcta

SEQ ID NO: 442007 - DNA, 907 bp, Homo Sapiens
  misc_feature (137)..(137): n is a, c, g, or t
  misc_feature (168)..(170): n is a, c, g, or t
  misc_feature (712)..(712): n is a, c, g, or t
gccttaagcctacccactttaaaaagacctcttactgtatgacaaggatttgttatcccagagaaaaatcttcccatataatttttaaattttcattataaagtagcaaatggtaagaaataatgtaatttttttcntcaactttgccttagaattttgttttcattnnnctggctcctagaatctcaatttcctctaaataaataaaaggggaagaaaatatccaggtaaataacatcaaatatcctcttaagtcttacttgtatttaaagactactaacacctctaggaaacaaacagcaggttgaggtacacagactaaaatgcatttcttacacaaattagtatgtaaacacagagaaacagtatgataaacatccaagtacccacatttacgtagaataatacagtaacgttacatgaccacaaaatcacaaaaagtgaaggaagctttgagatcttccagttagcagatttcacacctggctggtcacgagattcccctggggattccctcacagatttcctaggcctctttctgaacagtcggattcagcaggcatggcctatgacccaggacacttgatttttttcccatacaattcagtaggctaaccctctcattatgcagaggagggaaactaaagctcaagaggtcaagctcgtgtctaagtgtacagagcaagtgacaagaaacaggcgtagaatgcangtctttcgtccctactctgcccactttttctggcacaagacaccaccctcccaaagcttcccctagacctggcaacctttacccttcaagtaagtaggcctttaatagatattctcgccgtaaaactaagtcgggccagggccacatttcatatttcctttgaaacaaatcctaggcactaataaagtgcccgta

SEQ ID NO: 442008 - DNA, 1351 bp, Homo Sapiens
cgccaggacctctacctgttctgtaatgtcacataaggtagtatagcacttcgtccagcactgacagcaggcatcaggtcaaatctcaatacttgcaaataaatcattaaaaagatataacagtttctctgttattttcaggacttcatgtagtgagtgggtaatcagagtgaaagagggctttctatcagtcatcagtgatacgttctgtcacacagtcagattttcagcatttgttcggctgctgctagatgataaaggaagttttctgttgctggtggaaatcgtttttgctttagcgcctccaaattaaggactctcttttctccatcagccgaaacttctgaaaatggtgctaggttggtaaagatttctcttgtttttagagcaatatcctgtataacgtggctctctgatttctctggatcttctgcagactgaacaattagctgacccatttctttgtgcagtttgcccattgccatggcctcttttgcaaggggagcaatggtaatctcactctctgccagattcacaaacacatcatagaggtctggtctgttgctcacctccaagtctacaaatccagcgacgtaacctgtgcacatctgcagggcttccagctcatcggcgttgaggtgcacgtaagagtgaaggatggtccagtcctgtcggtgccacaccagggcaggcagagtcctggtgaactcctggaccgcttctatcttggggtgatacaccacaattcttttctttagcatcagtgctgtgtgtaagataacagtttccattccaaactgagatacaatgtctttgatggagccagccaggtaggcctttcgggcatcaaaatccttactaaggaaagagccgttttcttcactctggcatatcccctttgtgagaactgcaatataactctccatcattttaactgggctcccatgtttcaggtacattctacacaatatcctagtgaaggcagcatacttctctgggttaaaatctttggcggtcaggacaatagaaaaatgagtcacctttttcaaaatggaagaatctggaacttcaattgttgtgatataaaaccatgttcttctgtactgaccaaagacaaagggatggagaagtttgttttcatctgtaaggcagcattttctcagcagcaggttccttaatgtggctgtcgtggaaggataacaccacacccacagaacttctccatttgtgtccttttctacggtggaaagatggtcacgatcagcccgactccaagcatcagctgagtgtccgccacctcggccgcagccatcttccgccgccgcggcgcgcagctctggctgccgcctgc

SEQ ID NO: 442009 - DNA, 752 bp, Homo Sapiens
cagaggacgtaacctgtgcacatctgcagggtttccagttcatcggcgttgaggtgccacgtaagagtgaaggatggtccagtcctgtcggtgccacaccagggcaggcagagtcctggtgaactcctggaccgcttctatcttggggtgatacaccacaattcttttctttagcatcagtgctgtgtgtaagataacagtttccattccaaactgagatacaatgtctttgatggagccagccaggtaggcctttcgggcatcaaaatccttactaaggaaagagccgttttcttcactctggcatatcccctttgtgagaactgcaatataactctccatcattttaactgggctcccatgtttcaggtacattctacacaatatcctagtgaaggcagcatacttctctgggttaaaatctttggcggtcaggacaatagaaaaatgagtcacctttttcaaaatggaagaatctggaacttcaattgttgtgatataaaaccatgttcttctgtactgaccaaagacaaagggatggagaagtttgttttcatctgtaaggcagcattttctcagcagcaggttccttaatgtggctgtcgtggaaggataacaccacacccacagaacttctccatttgtgtccttttcgatcagcccgactccaagcatcagctgagtgtccgccacctcggccgcagccatcttccgccgccgcggcgcgcagctctggctgccgcctgcaggac

SEQ ID NO: 442010 - DNA, 824 bp, Homo Sapiens
  misc_feature (383)..(436): n is a, c, g, or t
cgggttaaaatctttgcggtcaggaccaatagaaaaatgagtcaccgttgtttcaaaatggaagaatctggaactttcacttgttgtgatataaaaaccatgttctttctgtactgaccaaagacaaagggatggagaaagtttgttttcatctgtaaggcagcattttgctcagcagcaggttccttaatgtggctgtcgtggaaggataacaccacacccacagaacttctccatttgtgtccttttctacggtggaaagatggtcactggacaacatgtcggtatcccatctccacagaaaataccaaaattaatcgggtggtggtgcacgcctgaggtcccagccactcggaggccgaggcgggaggatggtttgggcnnnnnnnnnnnnnnnnnnnnnnnnnnnnnnnnnnnnnnnnnnnnnnnnnnnnnnataagagggagaccccgtattcctcagagctaaccgagattccaccacacaggattgtgtagaaactcctgctttatttatgcacaagctcgatcacatgatgcaggagctctccactggtgggggttgggggctctgggctacactgcgagggtcccactcccggctctgtacggcctatggtgtgtccgtgcacaatgacggcctgggcctccatttgctcctccgtgaagtgggcgtcagacgtttcccacggcccctcggtccttggtgagagcgatcagcccgactccaagcatcagctgagtgtccgccacctcggccgcagccatcttccgccgccgcggcgcgcagctctggctgccgcctgcaggaccgccctcccgct

SEQ ID NO: 442011 - DNA, 786 bp, Homo Sapiens
  misc_feature (452)..(481): n is a, c, g, or t
cccccgggctgcaggtttaatttcatctttatgataatctcatgaagtagggattgtcatacacatttggccatgggtaagtggtaaaattactactatagcccaggtaaatctgatggtaagatctttgattttaaatgataaaattgtatgatacaaaagaaccaaagccaaaggaagcaaaaataattcctataggttttaaagtgatattttgattttaaaatattaaaatagtattgcaagggactattaagctaaattatgatactcttcttttacatagacttgttaacctactaaattaagtgggagaagttaaaaacatgtttggtttagttgagagactgatattgggaaaaaagatagccagactctgagacaaaacagattatgctcagttatactgacccagtcaccctttaaaagaacattaaataataataatattnnnnnnnnnnnnnnnnnnnnnnnnnnnnnnacttcagatacagatctcttcagctcaccaaaactcatatatttgctttctgaaggatttcatcttgttctttactagctggcaattaatcacacactttttaatttaatctgggccctcttctgtctgcctgcccagtgctggtaggagtgtattcgtccaagacctattggacttcttatttttggttaaatatgtgctcccagctcttcctcttcatcttcttctgagggactaatatcgctttgagaactatggctaactatgcaggggatgggtctggtcgtacgccttctaacttgctt

SEQ ID NO: 442012 - DNA, 1619 bp, Homo Sapiens
  misc_feature (174)..(174): n is a, c, g, or t
  misc_feature (220)..(220): n is a, c, g, or t
ccggcttgctttcccaggccgcaagccgggttgttcttcgtcctcccatgcgcgaagagggcacttctcccagtttccaggtactccctgaatgagctcctgctgcctcatgttctgcaggctctccgtgtggtaccgctcgtacgtctccgagaagtcccgctgcagaaactngctgccgtcccctcccatcccatcgctgcccccatctccctcaccnccttcttccatgaagtcgtcatcgctgttgtcgtcggatttggcggcggcccgcttggagtacaggccggttttgagatccggctcctcctggtcgtgatcatccatgaggaactgcgtggtgttatagggcgcgaccggctggcccttggcgaacatctcggctcggatccttgaagctcgaaggctctgtttctcgtcgaactttttcttctcttcccaggtcagcttgtagtacggtttccaatgccgcttcttcttggacgggcgtctcctatgttttttcttccccagctgtctctgctgctgtccccactcctcttcgccccctgcggcaggagcccccaacttactggcctcggagtcatgacaaggctgggcgagcagctcggcctcgggcgtcggttccacttctgccggcggcgggaagtcgccgccagcggacgagtcgtccccattctggcccttctcgccctctctcaggcagctagattctggacaggcctgggtctgcaagggaggtggttgggattccaggctcccttccccctccggccccggacggccacccaactgggggaacgctctcgattgccacctactgtcctcctcgggcacccgctcctccgcgcctggggggcgctcagggttcagctcttcctggacagcagcagcacctgtacagttgctagtttgaggctggtgttgatattctgacaagaatggctcggccatggctagtagagtcctcgaagtttaagaaattttggctagtaagtccttaaggaaaaaaatgggtttttcttaaaaaaaagcatgaagtcaaataatacagtccaacagagtcctcttcagtttgtaattcctgcagtgacgcctttagctagtccttctatcagcaaaactccaacttgcaatctggggagctcaagtcagtaaagggttaagcgcccacagtgcggccagctagcgggtccaagggggtgcagcggcaggaacagtacgtaatgggcggaggtgggcctcaaaccttccaagcggagcacccctaataaaggagttggtgagcaaggtgatgagggtaagtccagtgcgtgaaacccagccccgaaggggttaaaactaccgatgacgctgcctccgaggggccagatccacaaagggttaaatcccctgccgcagagcccacaaggggttaaagtcccggcgccacctcctcccacttccacgggtgtcgcttccacccaagctcccagttccctaggcccggccgtagcctcagcagaggacagacaaactcatctcccctttggctcgatgctctgctctgctcagttctcctccgcctccctgacgcgtggtcgacgatatcccggaaactccgggccggtaccagcctg

SEQ ID NO: 442013 - DNA, 1678 bp, Homo Sapiens
  misc_feature (510)..(554): n is a, c, g, or t
  misc_feature (677)..(677): n is a, c, g, or t
  misc_feature (701)..(701): n is a, c, g, or t
  misc_feature (1577)..(1613): n is a, c, g, or t
  misc_feature (1643)..(1643): n is a, c, g, or t
  misc_feature (1649)..(1649): n is a, c, g, or t
  misc_feature (1658)..(1658): n is a, c, g, or t
tggagctttaaatccttcttctggttctctaacttctgtttctccagctgggcttggtattttcgacttttagttatttgggttggcttttgcttccatccttcccactaatgcctccgattcacactccaacttgtctttcagttcaacggtttggcgactcctggataagttttgcaagctgctggtgatcaaagctcatttgcccaaattcatcctgtaaagtctgtaagacttctgacaactcctcattaataccgttggaggagggaggtgttactgacaacttcttacttttaccacctcgtgaagatacttgctttgccaaaggaatactgttgatgactcgatcattgcacaaagctttactgtgttgcttcattagatgcaagacaagctgaacattggctaccacggcatggctagggcttgtggacttcccagctacaaatggcatatcacccaagcataatctataatgtggttgtgcaccaaaatagttcctagaannnnnnnnnnnnnnnnnnnnnnnnnnnnnnnnnnnnnnnnnnnnngcattgggaacacacgggagttgccttatcttcaaagataagtctatttgtttctagaccagtctgcaactcagctgccttagcttgcatgcgtttcctttcctgtttttcttcatggagttntgcttccaactcttgcattttttnttctgcaagggcctgcattgtggtaagtttgttatactcctgttcaagaagatccaatttttcaagttggctctgaacatgtgtttgatcatgttgtcgttctctttctagggaaacttgtttctctaagacagatgtcctctccatttcggcatgctttatcatatttcgcatgtattccaattgtttttctaatagattgcatttattttctgcagctaacaactgagatgtcagttcttgattgtgctttgattcctcattctttgaattctccctttcttgtatctgttcatccagtactttcttatattcaattgtttctctagacaaggttttcacactttcttctgcctgaatcctctcaagttccaagcgtcgaatcttatcttgaagattcttaagagcagaaaatatggctctgctgttgctttctggataggcaagtgtaggcttacttggggagcgtcgtagatcactattaaggaaaggcttatccgaaggatatactacatatggagatgaagaatgccgaaccatgcttccattagaccttgatggctcagcaaagctgttcgacaagtgagaaccagaagccgcagagacagacgccgccgccatctttcagcctgcccagggggtctccgcacttcgggggcggtctaggttctcgtgctcttctccaagactcgggagccgcccaccagcggggaccctaggctgaacccctgatggaaaagggcaagggtgctggtgctgggcttggaaacccctgcaacacaccccctcagggccgcctacgctcacagcttacacagaaagggcaacacgtcctccgctctcgacgaattcgagctcggccgatttggcctgatnnnnnnnnnnnnnnnnnnnnnnnnnnnnnnnnnnnnncgccgccaccgcgtgaactccgggttgccncgtatntatgtgganggtcagtagtcaagtttccc

SEQ ID NO: 442014 - DNA, 661 bp, Homo Sapiens
  misc_feature (502)..(502): n is a, c, g, or t
  misc_feature (518)..(518): n is a, c, g, or t
  misc_feature (564)..(564): n is a, c, g, or t
gtcacctatttttggcgttttaagcttttcctcctgaggattttatatcagtcaatgcagaaaaccccttcagaagccttgtggaaacccacccatgaggactcaaaaatcttactagtggattcgcctgggatgggcaatgctgacgatgaacagcaggaagaaggcacttcttccaaacaggtggtgaagcaaggcctgcaggagaggagcaaggaaggagatgtagaggaggccactgatgactcgctccccacgactggagatgctggaggccgtgagccaatggaagagaaactcctggaaatccaagggaaaatcgaagctgtggagatgcacttgaccagggaacacatgaagcgagtcttaggagaagtgtatctgcacacctggatcacagagtatgatgacagaactgcacgggtgctgattggacatatctcaaagaagatgaacaaacagactttccctgagcactgtagtttgtgtaaagagatcttgncattcacagatcgcanacaggcaagcctgttccaatggccacatttgggctccggtgctccntaccctaccagtcctgccagagtttgatatatagaacgtggttgcttcattacagcatttgtcggcttccagcttcagaagaacccgactggattaa

SEQ ID NO: 442015 - DNA, 487 bp, Homo Sapiens
  misc_feature (390)..(390): n is a, c, g, or t
tagacctagtacgctggaagattttaaaagataaacatatccctcaatttttacaagaagctttggaaaaaaagattgaaagcagtggagtcacctatttttggcgttttaagcttttcctcctgaggattttatatcagtcaatgcagaaaaccccttcagaagccttgtggaaacccacccatgaggactcaaaaatcttactagtggattcgcctgggatgggcaatgctgacgatgaacagcaggaagaaggcacttcttccaaacaggtggtgaagcaaggcctgcaggagaggagcaaggaaggagatgtagaggagcccactgatgactcgctccccacgactgggagatgctggaggccgtgagccaatgggaaggagaaantcctgggaaattccaaggggaaaattcgaagctgttgggagatgcatttggacccggggaacacttgaagccgatttttagggagaattttttctgc

SEQ ID NO: 442016 - DNA, 405 bp, Homo Sapiens
  misc_feature (61)..(69): n is a, c, g, or t
gcaagacagaagcaggcaccttttttcacaaggtggcaggagagagaagtgagtgcacagnnnnnnnnncctcctacttttaaaaccatcagatctcctaagaattcactcactatcatgaggatagcatgaagtaaacttcttcgacacatggcgattacaggtccctctgtcgatgtgtggggataataatttgagatgaggtttgggtggggacacagagccaaaccatattattctgctcctggcaccttccaaatctcatgtcttttatatatatttcaaaaccaatcatgctttcccaacagtcccccaaagtcttaactgattccagcataactcaaaactccaagtccaaagtcttatttgagacaagtcccttctggctatcagcctattaaattt

SEQ ID NO: 442017 - DNA, 1154 bp, Homo Sapiens
  misc_feature (247)..(247): n is a, c, g, or t
  misc_feature (295)..(295): n is a, c, g, or t
  misc_feature (371)..(371): n is a, c, g, or t
  misc_feature (380)..(381): n is a, c, g, or t
  misc_feature (947)..(973): n is a, c, g, or t
tttccgcaagtaaagggctcctaagtcaattaggtttggcccgacccaaactttataggatggtcgaagggctcccctaaacggtatcgccttagttgaggccgtcttaaaggggttgtgtcaagggaaaacataaccaatccgtcattcttattaaaaggatttccattcggctattggtaaaatgactatttacaaaattaccgaaatttacaaatatacggtacatttcaattgcatcagctgncaatgttgaaagcgatcgtccggcctatggtatagccacttgcaaagnggatgtctcaagcgattagttggtacgcagggtttccagtccgacgtgtaaacgacgccagtttatttttttaatntttttattnntatgcttttaaattgctttattaactttacagtatgcaataaacatctttccatgaaagttgatgaaagtcctcttctgacagaaaaacttacagactaggtcaaaatgcaatctccaatcagaaaattgcagaagaatgccaaaaggttcacattaaaggtacaccaggaaaaatgcgaatttagaaagcagggattttatgattattaacctcaagattcaaggcataaggcaaaactcatcatgatgatcatggtgaggagggtcccctataagaatgcgcagactgtacctcaactgaagttccctaattttcctccttagctctctcatctcctccatgaaccgttccatatcatctccatctccatctatcatatcaatgttatcgacaagcctattgggcacatcctctccaaaacccggggcaaggtggagcccaaacccctttaacatttcctccaggctcctggtattcaccacctcctaaagcgggggcttcattctgcactggggccttctccacaactttgttttccttggggacacttttccaatgttgagnnnnnnnnnnnnnnnnnnnnnnnnnnncttccttcagggatcagaggcagtctttctctcttagccttgaaatcggctgcacaaacgcacttaaagacctgccagggctcaggggtcagcttctaccactttccacctttcctgggcagctggctcgcctgccttcagggcaacagcgagccgtcacacggccagcgacaactccgct

SEQ ID NO: 442018 - DNA, 1021 bp, Homo Sapiens
  misc_feature (609)..(623): n is a, c, g, or t
  misc_feature (936)..(972): n is a, c, g, or t
cgtggttgcacatggaaggttggagtgagaagtcatctgtgcgctgaccaggaaaaagcgtaccaggaagtaggttccaaaaaggcccatcgtccccaattcacgaagatttgccccgaagaaattgcccccaaagggtttcaccactgtaagggtaacaccagcgaaaaaatgtgcggaattttatggaaatcagggatttttaagatgtagttaacgctccagattcaaggcataaggccaaactcactcatgatgatcatggtgaggagggtcccctataagaatgcgcagactgtacctccactgaagttcccgaattgttcctcccgtagctctctcatgctcctccctgagacccgtcgcatatcatctccatctcccatctatcatatccatgttatccgaccagccctattgggcacatcctctcccgaaaccccggggccaaggtggaagccccaaacccccgttaaccatttcctcccggctccctggtattcacccaccctcctaaacgggggcttcaattctgcaactggggccttctccacaactttgttttcccttggggacaattttccaatggttgaatttttttcccggtgnnnnnnnnnnnnnnncttccttcagggatcagaggcagtctttctctcttagccttgaaatcggctgcacaaacgcacttaaagacctgccagggctcaggggtcagcttctaccactttccacctttcctgggcagctggctcgcctgccttcagggcaacagcgagccgtcacacggccagcgacaactaccagactgcaactaggatgagggactaatccacgcattggctctgggtctcctaagggccacgtcactgtgagctcagatttccagttcccatccccgctctcgacgaattcgagctcggccgatttggcctgatnnnnnnnnnnnnnnnnnnnnnnnnnnnnnnnnnnnnncgccgccccgcgttgagctccggttcgccctatatgagtctatcattcc

SEQ ID NO: 442019 - DNA, 1054 bp, Homo Sapiens
  misc_feature (421)..(421): n is a, c, g, or t
cttgctgatatttgatacccatttttgcaattctttggctttttcaacatgttctttcttttcttcttccagtgacttctcctcctcttccagcctcttcaatgaatcaccagcaaatttaatatattgtgtcatgagagtgaccagggcagtatatcgagtccttaggtccatgaactcttgaataatgagatctgctgaactctgcattcttcggcgtttcactggagatttttgttgtgaatctaccatggcccggtaggtcattgtttgtaattcatagtccttcactgtagctgagtactgttctgcatatttttgacactcgtccattttgctctgtttcatttctatttcggacaccagcatcttctgttgattcaactgtgtggctagggttttactattttcaggctgattntcctgaatctttctctgagtagtttcaacctgctggatccaatgatctaaaggatggtaagtgtctctgtagtacttcagtgatttgccaatgccctctaagtcccgtaacctgttgtcaatctgcacatgaacattttgccacctttcaactaattgatctgctttttctttgtgccagtcaaaatcaaggtcccgttctttatacgttttaaacatttcatcactgatggctttagctttctgcaactcatcctctaaggcatggaatacctgtctcttttcatctacttcagatctccattgctttaaagtacttattagattctcaatattattcttgtcagctataactgcttcttcttcacacagtttagtgtcatagagttttagcgagggcttctgcagcttgagtgttatttaacaccaagttaacagttttcgactagtctatgtaagtggaagacatagaatagacttggttcatgttctgaaggaccacattaagctctgatcgtagggtagggactgagtgaagaggctgctgctgtgactgaagaactcctcacacttatttgtgattgttcccgaatcatctttaagtcgatcggattccatctgggggggaacctca

SEQ ID NO: 442020 - DNA, 2146 bp, Homo Sapiens
  misc_feature (781)..(781): n is a, c, g, or t
aaacagttccctagtagtctatttgagaaaaagtatcaaatgtgcatcaatatgttaaaactgacaaatacaagaaaagcattcagctagagaaaattcacagcattttattcaagttaatcaatttcattcaataatctgccatattgttcccagcaccactattactgttattatttctctttgaggaagaccaggtattaagaaatctggtttgaatttccatgatgcctaactctatggttaaaaatccttttccttaccaaaaaggaacttcttaatcaccagagaaacagagggaagactgagatatgtttgcagaaatttatctctactagagacaattcatagttcataatctttcagggttgtgctttacttgggggctccgttttcgggagcgggttgtttcccataaatgtttgcttaatacaaataatttgccccactgtaccacagaagggaaatgagggctagtgtccccagaaagcaagcaggcagtcctccagggaagaagccctaatggctcctagtggtgacaacattctgccagggtgaggggacacagtcattctgcctccccagcctgtgagcaataataaagtataaccaagtgaacaggagaggtactaactagccggataatccatgggctagaatctctaaacaggaatgtttgtgtgttttgaataaatcagagctggaaaaagacacttttggagaagtgatggagaatagaaaagtatgaaaaagataaaggtttctcaccaaggaacccacnaaaaagggtggtaccagtcagaggtagtcttgggcttttcttttgagatgagtgtaccccaaatgggttgtgccattttcacataaaaattggaatgataatgaacaagtgaaagtgaaatcagtttccctcctttgttccaaataaacatggatagagtacctgtgtgcaaggtagtgggacaggtgctgaggggaaaggtaaagctgtttaagctgtggccctgagctgaaggagcaatctagcagtgccatcaggccctgcacactgcagagtagagtgtctcaggggccaggtggagggaaggatgacttccggctgcagcatcagggaaggcactctgcagtctcccctgtaggttctcagtgtgcctctgtgcctgtgtgactgctcagcctgccccattccaggcacttgctcatcttccttatctttctctgtagcatgagaaatggaagtttgagaggataggatcctacttcacaggtacctaataaatgtgtgtggaattgacatatagtggaagtgtcactttatcttagtgcagcaaggtggaaagagctttggaaaggagaggaaagatggtggttgtgagggtaaggtgttttcatcagaaggcgggagcaagggtatacaaaccaaaaagtcagtttagtatgtggcttagctcagagcacacgagggtaccaacacagccaaagactgtaagaaggtagctgaagtcctctgccaaataggattgaaaagctaaaatctttctctgtttctttcttaagtaacaactggtctattcaagctcaaccagagcatataagagaaaaaactgactaacgagggggtcttaaagagctttgaaggacagtttctagaaagtagaaagatcactgagtaaattactgcacctcctctaccccacaaaaaaaagggtgaggatgaatgtaaaagtgtagagcaagctttcagacaacttcaagtttgtttttggcgcttccgtttgtaagcaatcaagatggtgagagacgctatcccaaagaagaaagtctgtaggaaccagagtagctgagcccgaccacttgtgatgcctttatgcttgcacaatactatggcatacaaggactctcccacatgaatcagccaggcaagccaatacccattgcaaaggagggtgtgatggtggtccaccaagtactgagtgaaggggcccaggggcccaaggttctgataagggatactctgaggccagaagacaacccatgtgtagtagccaaagctgagggtgatgactgtgaaccagaacagactgcctcgctgaaagtaggtcgcgccggctgccgtagccatggctgcaacacctccccgggagcg

SEQ ID NO: 442021 - DNA, 718 bp, Homo Sapiens
cttataaatatggaaaactttaattgtttaaagaaaaggcacaagtaaacatttcaggttatcatacaatgttacaataaaaaattccaatagcaaaatgaaacacattataactttgcttcttggtagtatactgaatgtattattctatcatctcctctttggagtaaaaagaagggataggcagatcaatggatgtgatgtaaaaacttggatcataaatagcatccactatacctttaaccagaaattaaacttcagtagaattaaaattaatttttaaaacttagttttgttaataatagagcagcagtaactttcaagctaaaactcattgttttagtaagtaaataactgatttcatgaaatgttcgctgtcaatgtctggtatgttaatatacattaatcaagctggtcatgaaacagttttaccaaaatataattcatatacttattttactttaaacctgaatattacagtacattatataaaagataaatgagaataaggaactaaattatttcttacgatgtcagaaataatatacttaaaaaggtgtagaccttattttcaatcaaaggcactatctggagagttaacaagctgcatcatgttcagaattgagaaaaagtttttctccttcccaaataactggctgattagtagaaacctgtcatctcagcaaacactgaatacctagtatctagccaaaaaaca

SEQ ID NO: 442022 - DNA, 463 bp, Homo Sapiens
cagagcaaggttgggttcgctcctctggcagaacctcggctctcaggaggtccttgttccagggaacagctgcttctctggggctgggctctactccctgcagcccctcgcactacccagctggaaccagggacaacgcctgagtccaaccctcgtgtctattttccagaaaacgggcaatgctgtgagagccattggaagactgtcctctatggcaatgatctcagggctcagtggcaggaaatcctcaacagggtcaccaaccagcccgctcaatgcagaaaaactagaatctgaagaagatgtgtcccaagctttccttgaggctgttgctgaggaaaagcctcatgttgctagatttgactgcaagattgaaggatacccagaccccgaggttgtctggttcaaagatgaccagtcaatcagggagtcccggcacttccagatagactacgatgaggac

SEQ ID NO: 442023 - DNA, 793 bp, Homo Sapiens
tgttggagttttagagaaatagtccttttaatatgacttagaaactgcttttctctggctttgtttcactcttcttcctcttccccttccccttcaccttcctccatcgtttccacaatgagctctgctgtgcaggtggcttctccaagactgttgacagccttgcaggtgtacttggcatcgtcatccccgcaaacatcactaataattaaagagcagttcccgtcctcatcgtagtctatctggaagtggcgggactccctgattgactggtcatctttgaaccagacaacctcggggtctgggtatccttcaatcttgcagtcaaatctagcagcacttccctccacaacttctaaatcgcgaatggtcttagagaaatagggttttacatgaggcttttcctcagcaacagcctcaaggaaagcttgggacacatcttcttcagattctagtttttctgcattgagcgggctggttggtgaccctgttgaggatttcctgccactgagccctgagatcattgccatagaggacagtcttccaatggctctcacagcattgcccgttttctggaaaatagacacgagggttggactcaggcgttgtccctggttccagctgggtagtgcgaggggctgcagggagtagagcccagccccagagaagcagctgttccctggaacaaggacctcctgagagccgaggttctgccagaggagcgaacccaaccttgctctgctcagcactgtcagtgtgtcagaagatatcgaagaatccggaccggtccagc

SEQ ID NO: 442024 - DNA, 1124 bp, Homo Sapiens
cgttgagtgcgaccgtttacccctcaagcccacgtagtcggataaggcctctacacgggtgggttcaaggttgtgaggtcaaatatggtctttaaggtaatgagttatagaagggcatcggaactgtttggggctttggggaattttacaacggcgattcccctataaaaagacgggaaggtgcacacaaccttcgctttgaggttgggagacacaaggtgaaaggaaagcgcttttcatttaaagctcccaagccaaaaaggacggcatttctacatggggacaaataagttttttggggagggggcccaaaatgaaccacttttaaggagctcagacaatgactagcctttgggctacgtgccaaatcaaaagctcccaggggggtagacaaatattcacagcccgggccttgatttccacctttcccagtgcatgttccacaggaactaactctacccaccaccacccgacaccaccaggctgttcgtattctcccccttcctccctctggcttgcagcagctcctccctggcagcagtcgaagcccagagatttttttccaaacacttggggtggccagcgaccaagtaaagagcgcttccggtgggtggacagcttccagttctaggaagaagagttgacgtttccagaagacataatggtctctgggttgtccccttcgtctttctgggggtgggaggaattgtccgatttgctgcggctgaattccatgccggcgatgatgggtcgcttgaatttgccagcagagtctccgctcgggcacttgcagcaggacatgatccggatgaaggcccgacgcatctccttgttggtcagagtgtaaatgatggggttggtgccggagttgagcacagctaacaccaggaagtactccgctctgaagaggatgtcacaggtcttcaccttgcagcccacatccagcaggagcaggatgaagagcggtgcccagcaggcgatgaagacgctcaggacgataattacggtcttgagcagcgccagcgacttctcagagctgcggctggccttggaaatgttcttgcggaacgtcaggcggcggctccgagtcctgaccaaggagtagattctgcagtacagaatga

SEQ ID NO: 442025 - DNA, 1709 bp, Homo Sapiens
aggcccttatacaaaaggcagattaccaggagaagaccaacataggtttataacggggtatatgtaatatatatgtgggaattccagggaaatgagcaaatctcaaagacctttagagaagcacaaaccaaagaaaaggagctttgagtctgtaggggcagcaatttggggaaagcaattatatgggagtttgccttgtagattcctctggtgctggtctccaggctgacaaggattcaaagttgtctctgaaactcctctttgtcatactgcacatataaaacgtcttttgtttccaacaagaggattttctttttcattctagaattatctccttgataacttgatcagatataggacatgacactgaatagagtccaacagtacaaaaaaaattcagtatgttctagctacttcacacatgtgtacgcgacagttatttttacagtaaggtattttcgagaaaaatgcattacgtgttttggaaaatagagtaatttaaaaaatatatttgaaatgaaaatctccaacacattagaagatgatgatgttagatgcccatcgtgtgccacaagtggttttttcattatgtaaagcacccgttgaattaaaagaatttgtttttgttcaacctcttcctgaggcccaagagcatatgggcaattcggatttcctgctggaccacaaggttctgttgatattacatagaacgggtattccagacacttcttatgatgaaagtccaaaagtggcatccaatttaaggccccatctttcgttgccattcttcattccgtacaaaggacgaacttggattacatcaactttggacccattggttttgtcgctgtcgtcaactgacagtgattcatcactggtgatgataaaaatgatggaagaagagttgaaagtcacttttttctttggcctgtccccatctttctgtgacatcacaatgggtctgatctgcatttcacttccagctgctggtaggtctttagcaggcctctggcacctcagcagtcggaggcacagaagctgcaaaagggatcttcgaaactttctgatcatgaagacataaatcactggattgtatacagtgttcgatttagcaaagaggtacgaaacaatagatattgttggagtgaccaggtgaccatgaccattaaccaccaagaagcagatcacgatataaggcatccaacagaccaggaaggtgaatatcattaaaaagcacattttggccagtttcttttcatattttaaaatcttgatcacttgaattgtctgaagatcttccacacaacgaagcgaagaggctgccgctaaacccgtcccacacgcagcccacggtgtcccacacccagccgttcctcaggcaggacacgaaggtaaaggtgaccccgaagagggacaccagcaggtcgctgaggctgatgttgaccaggaggaggtgagtgggagtgcggagccgctggaacgttgtagtagaggacgagcaccagcaggttgttgccgacgcccagcagcccaatggagcccagcagcagcgccaggcgctcgtaggtgccggggctgaagaggggcgcggggctcagtgtccccgccggcgccggcccactcagcgcccgcggccaccgccagcacgtcccagtagccgtggcacaccgctgcggttccccgagtacatggcccggcgccggcgcgcc

SEQ ID NO: 442026 - DNA, 958 bp, Homo Sapiens
  misc_feature (118)..(131): n is a, c, g, or t
  misc_feature (218)..(238): n is a, c, g, or t
agggttctagatatcagcacattttaagattaaatgcatggtaagaacttttgtactatatacacctagtttgaacttaaatttaataacaaactctttggagtctctctctctctcnnnnnnnnnnnnnncccaaacatagcttcccaaggagcagaagggctgaattttctctagttccaggaagaccgcaagctactgtgctctggatgtctcgnnnnnnnnnnnnnnnnnnnnnattctccagatctcaagccggtgtctggcacataccattcaatacaagtttggtacctggacccccttgaatatgcatgtccagtaactattaactacatgtgttggtgcaagggagaaggtcgagcaacccggatctgctccatcatagcccgtctcagtcgcttcattcaagtcagcggggtaaggttgaggggattccaacttcacaagggcagatttctcatggactctctttctctggttgtactggaacactttctggcgttattcctctgctgggacagcatgaacttatgaaacgtggtcctgtctgccctaaagccagggtctcaccgacaaggacagcgatgctggggcgagaaataaagttcgtcctgggcctgcgtacggtacagcgcccttgggaagcccttgtggagttaagggtgatgcccacttctttgtctccctcattctgtttcggtggctctctcgttcccagttccaagctgcccacttgttagaggagccactgcttaccaggcatctttagtgggcacatcagcacattccacgattaatcacagctcctcacagttgcctctaagtagtgacactaccgaaggacgggagttcctcctcctgcagtctgaggacttgcactctctaacggagtagattccaataaacttgcttccttcactgcgctctgtgactcgcctccaattcttccctgaag

SEQ ID NO: 442027 - DNA, 1230 bp, Homo Sapiens
  misc_feature (129)..(129): n is a, c, g, or t
gcacacagcttttagtctgtttgttaagcgttaccacttagcattagaacagaaatgaaacaccagttggaattatacaagctgcttcttttcatcatgtgacagaccgtttgtgagaactgctggaantcacaaagctgcggcagaggtgactgaagcatttccactccgttcacatatagcgccccagcttggcacagtaggttttgcctttgataacgaattttgacactgaccctgacagaagggcacagctgtgagaaaaatcattaagaattgtaattgttgaggagccacttggatgctttctaccttttataaattgtaccctaggaaaaccacatgaagtaattcttatacttaactggttttgaatcctaacagtatgtcagtagatacgttgttaatactaaaggtaaatcctaaaatcctttaaaatccattttaattgaagcttgtgatataaatgtaacacagtagtgaactgagtgttcttcacaatctattcctagctgtctataaaactaaggatgtgacaccactaacttctcaagggcagtggggggcagggagtgatgggcgtgaccgtgaggctgccagcgctgtgtgtgtggctgcgcctccgaaacaccctttcctcaggtggccgagctgcgcctggggaaggcccccactgaggctgtgcccgaggaacatgccgtgtccaccccttgggacttggacgtcctctcaggccatcctacattactggagtctccaattcttaagtattctgtgactcagtgtttccttaccaatctgacaaaaataggtgctgtaaaaaacagctgcatctaagttctgcagcctccacggaattccaggatatgaccaaagggctggggaatccaaacagctccagtgctccacagagccgtgcccagtgagtggtcttgaaggttctcataagctgcacatttagaccctgatcccagaactgtgccttcaaccaagtctccgtattcattatcgtgattttccttaaggactatggctctaccaagaagaggcaatagagaattctttcaatgaaacaatgtatggatacagggctatcgttattttggatattgtacactttaaaaccatctgttagatgaccaaacgttttacaaagatgcagcagtcattaagaacatttccttataatgctgggcgggcttcaacggtgcagtcaaccctgttctcccc

SEQ ID NO: 442028 - DNA, 649 bp, Homo Sapiens
cccccaaaactcagttaatatttacccactatgattattgatgtcctgccttgaacagttttaaagaaaacaatttttggaatagctcaaatttcaattgatggcacaaatcagcattttgttgttgttactgtattacaattagtattctaaaggcagaagcagaagtagctgctttttagcaatagaattgtttcagtattttgctgctgtttaatgcgcatcttcagaaaacttcccagtggcttcaaggaatttggggatctctctggcaacaaattgtgaaacatgaaatttctgctgactttaatatatgaaacctaatcctacccccttttttaacaaaaaggaaactagtacatttgtgaaaattgtgttgtgttgtccattgttgctctagttctgacccagaggtagctctggagtgattttagacctactcactcagttgcgtgtaggtttttttgttttgctttgagagagaatttttctctccttaatagaagcatcctttttaaagagaagtttgccttgttccacacactaagcagaagtgagttggtatttttaaagcaggtactaattttttcttacctaaacttttgggagtttgctcgttggtataaccttttagttaacctgaagatcc

SEQ ID NO: 442029 - DNA, 426 bp, Homo Sapiens
cccccaaaactcagttaatatttacccactatgattattgatgtcctgccttgaacagttttaaagaaaacaatttttggaatagctcaaatttcaattgatggcacaaatcagcattttgttgttgttactgtattacaattagtattctaaaggcagaagcagaagtagctgctttttagcaatagaattgtttcagtattttgctgctgtttaatgcgcatcttcagaaaacttcccagtggcttcaaggaatttggggatctctctggcaacaaattgtgaaacatgaaatttctgctgactttaatatatgaaacctaatcctacccccttttttaacaaaaagaaactagtacatttgtgggagtgattttagacctactcactcagttgtgtgtaggtttttttgctttggtttgagag

SEQ ID NO: 442030 - DNA, 1075 bp, Homo Sapiens
  misc_feature (65)..(95): n is a, c, g, or t
  misc_feature (148)..(166): n is a, c, g, or t
  misc_feature (668)..(688): n is a, c, g, or t
  misc_feature (1039)..(1039): n is a, c, g, or t
  misc_feature (1058)..(1058): n is a, c, g, or t
tatttaaatctaccatcacttcgtagttaccacatcatgaaaaagaaactaaaactttgtacttnnnnnnnnnnnnnnnnnnnnnnnnnnnnnnntgagggtatgtttaatgtacaacttctatatacatcacagcccataggcagtnnnnnnnnnnnnnnnnnnntgatgaaaggaattgtgaagaactgtcacgtggaaggtcaaacgccgacagcaggcatgacgggagtggtgaggagcagtttccggatcgttgtcaggtatgtattctcaatcttaaaaaacattgtttttgctcccagcctaatggaaccatattcctgtggagaaaccagtatcatttcatagttttgactactgaccgacatacctccttgagcccctatacctgtatctgtagaaatttctattgcacagaactttgggtgatgggatgcagtttttttcattctctgaggagtaaaacgcataggaaatggataatttttcacctttttgactcagtgtggtgaaattttcgcatcttagcatcttttgccacaacttttttctttaaagtcaatttgcttcccccaaaaatgcaatacaacatgggaaagaacattaaaaagatctgtgaagaacaaaaagtgacctttgaatgcactagacagcaactttggttnnnnnnnnnnnnnnnnnnnnnccccaaaggatgtacttatacacacagacagcaaatattaatttcataactgttcaaattaattatttctttaattcccaattggtaaatagtgaatggggcagaggagcaaagattttcttttccttcttcctacgctggataaacaagaacagaaaacagccagttatatgtgaccctctaatcttcactcacacatgcttgccttctcacttatgtcataactgcccaatctgaaacagtacatcacagatgacagatgcaaccagagagttcaggacagctgatatcgagatatccaggcaaccggccctcgtgcaaaaggatttccgaggcggttttcgtccactntgggccatggctaggcaangccttggccggccctgg

SEQ ID NO: 442031 - DNA, 265 bp, Homo Sapiens
atagacacattatatttattcagaaagattaagtatttcaaaggtaaaaaatgaagctaacatttgaagattaggtaagtttcatgttacagaatataaagatgaaaatggataaaaaattattatgaagtacacacattagaatttgacttgcttagtttgcctctttgtgcctctacctttatcaaagataattatgtgactaagtatcataagtaagctggtacatggaatggacaagtgaaaataggtgggacattagaat

SEQ ID NO: 442032 - DNA, 1144 bp, Homo Sapiens
  misc_feature (116)..(116): n is a, c, g, or t
  misc_feature (136)..(136): n is a, c, g, or t
  misc_feature (159)..(159): n is a, c, g, or t
aaacggggggatggttgtttgccaggggggggaagcagctttttcctgcattttggggggtgcacaggacgtagtcagggggccacgcagttcgggccggcatgaaagtagcaganccagggccaccgcggttggnccacgtctggggggtcgcagtgntcgtccacgtagcaggggttcttgccccccagctcccagggtgacaggcgtcaggtgcttgtgggcagcagtcatgacaatcttgcccaacacgagggctccctgtgaagaagatgtagtccaacttgtgctctagcagctgccctgtctcctggggtccgcccagcaccacggcaaagcagctctggtccaggtactggggcagcacctcagccaggaccttctctgtgccctggctgatttctgacggcttcagcaccacgcaaattccctggggcgagggcgcccaccaggagcaccaagggtcaggtttcagtgggtagttccagggtgcgatgatgaggaccaggccaaagggttccttccagatgaagcccgagtccagcttcatgaacaggttcgtggaccgtggttcatccttcatccaggcctgaaggttcttgagagcgtagtcaacctcgttctggcaaaggatgagctcagatatgtctgtctcgaaagctggcttatgcaggtcctgggccagcacgtcgcgcagaagctgcttgttttcttgaaggaagtggcccaggccctggagctgcgcagcccggaactcggccggccgcgtgcgccctcagttgaaggcctcacgcagccgccgcagcgtgtcctcgaaggggtccatcctcttccatggctccctggtgcctttggagggatgaccgcctccggcctgaatcaagacccggattggaggagtctgggatgagctatggcacacaggtgtcctgatgttcatcccaggaacctggcctcagcgtggtcacagctttcccaggtgaggcaggtggggcagaggaacccctgccctttctgggcagtcgtcgcctgtcctcacatgtgcacatctggtgctcggtgaaataatcacggagccagcagcatccagttggaaggacagggaaaccgaggctcccagagacgacttgatttgccctcctca

SEQ ID NO: 442033 - DNA, 525 bp, Homo Sapiens
  misc_feature (199)..(209): n is a, c, g, or t
taatttagttatgtaatttaattattattttaatttcttttcctatctgttaagaaacactattaattctgtaagatggaataatctgattcttcacaccttacaagaatagtcactgccaaatgaatgtgaattctgtagaaattttaagagacaaagaaaacaaattgttggattgataagctaactaagagctcannnnnnnnnnnaaatcaggcctccatacaaataatcctggcttcttctaagccatacattaagtcttgcatttaagaaatatgagacttattttccttttccaaatggaagacataatataatcagaatataatagtataagaaaatgaaatatttcaagataccccaaaaattcagtttcctggtgatgaatgttttattatagcatcttttgtcagtatcaacttctagaaggaggaccaagaaaggcagcctaagccatccttatacctatattctgtaacacacatatgcacaccagcacaaaagcacattaaagcaagacag

SEQ ID NO: 442034 - DNA, 735 bp, Homo Sapiens
  misc_feature (609)..(609): n is a, c, g, or t
acaactagtggtatcccccgggctgcaggctggcggtacccaagaggttttcctcgctcttctggcacaccttcaacaggctcacccccttccggaaatgaaaacaggaggctgtgcttccatggagctgggtgtcaagagaagaactgtctttgtttcttgtgtgcttcaatccagggaaagtttcttggacccagtgatatctttggagacccagctgcctttgtggaagggaggagacggtcatgacacaaagctttatcctacacagaaacacccgtgacccactatgagatggcccagatgtgggacccggtaccatgctctaaagcgagtgattaggcagcagctgaagccacccctgctgatgatgagcaagtgcctgctgcaggtccaaacacagcatccagggctttgcagttcctaaggagtgatgaggttagaggatcacttctgcatttgattttcaaggatgccgtcaagacggggttgacacaatgctgcacgtgtctggtcacacttagaaattgagctcttactctctttctggtatacttggggacctacagctgcccgtggggcttacccacggtgtttcctggcattgtnctgtgtcacacagatgctaacttgtagtgcaaatgtcatcccgcaaggttcctccttctgcaagccaagtggagagaaagaagatgcatctgtcacccttaatacgggtcctcagtgcaagagaac

SEQ ID NO: 442035 - DNA, 1420 bp, Homo Sapiens
  misc_feature (92)..(92): n is a, c, g, or t
  misc_feature (98)..(98): n is a, c, g, or t
  misc_feature (149)..(218): n is a, c, g, or t
attcaaaagttgttttttattcagctgttcttcagcaatatacaatccagtttataaacgagtgtctgaccttgtttccaatctttatttanaaatanatattattgacagtgaattttaattatgataagatgtgtcttttttaatcnnnnnnnnnnnnnnnnnnnnnnnnnnnnnnnnnnnnnnnnnnnnnnnnnnnnnnnnnnnnnnnnnnnnnntcctaaacacaataatctactaaaaatattttgctttgtcaaaaggctttgaccccaacaatttgtacaatattaatcctaaagataactgctcaacagttcgtgcaaaatgaagacttggagggaaaagtgtagaaaagaaaactacattgaagtagagaaatcattgattcccatgcagactgcatgggccaaactccaaattatttggaaactagatgcattattttaggtgttctacatttgtgtaactttcccaaaaatattagttagtgtagttttccatgtggactttttcatgcgtctctcagtctctctgtgtccatccagcgacatggtcctcaccgagggccccgggcaggtcatgtgcggcctctgagatgctcgggttggtcttgtctgtcaatgtcccaagagcaggcgcaggaacttatgcagagctaacaggagcaggggacaagagtgggtctgtggtgtagctacggccggtggcccgagccgttgcctctggcgcagcaggaccgcctgtcccgatggcggcgacgctgacgaggcagcagcagctgccgcgactgtggtggtgggcgtgtgggccgccgaggctgccgcggcctcggggactgcgggatcgatggcggcgggagggctcccgggcggcgggctcttgtcgccgcggccgggctcggaggtggtacggctcgcggcgcccgcgttgttggcgttggcggcgctggctgggccgtggcgacgcgggccgctgctctggattgtgggacacggcctcggcggcctgcatgttgggcggcgcgaagcgcgagagcacgcgcagcatcgcctgggccttgtgctcctgcgtgtcgtcgtcgctgtagtccgacacgcggcactcgtacacgccctcgtcctgcagccgcacggcagacagccgaagccggtgtgagatgtcattgccctggacgcgtacggtgctgattttagttgcatccttatttgttaccttgctccgggcgcccggcactctgagcgccagctcttgcagcagctcccggggtggctccttgaggtaccaccactgaatctccagcgaatacgaggtggcagcgctggcccggaacgcgcagggcatttcgatgtcgtctcaaatgccgtactgtcacatctttggggacttaggtgaatgcagcgtcggccacgaagagcag

SEQ ID NO: 442036 - DNA, 774 bp, Homo Sapiens
aaaacagttcttgccatgtaattccataaacaatatacagaagcagatgaacaaattagtgaatattatgtttctgcatatctttaatactgatgcacagttgcttcccagtagtgaagataaaccacagtttagagttcaatggtactgttatcattatattgtcaatggacaattacataagtttattgaatagaaattgagaggtgttccatcaaagcacattacaaactttcaactcaaatcctgttgaaaacatatttaaatacccagagcattaaactatgacatagaacaccattaaatctgttttgtactcaacgcaagtaaacttgcaatggttttacttttcttgggttgtgtgataccttatatgttgggttttgaattttctacattctcccttgaactggattcaaatcctgtgaaggaatcaattcttttcatgcccctgtactatcccatcttattttaaaaatctcacaggacatgtttggaagaggggtagggcgactccacctgcatacactggcatacctgagtttgggcaccaatagagctattttcccaaagaagacgtttcctgttatgaatgaagctgtgcttgtattggacatgattgcattgcagcattgcctatgagtgcaagatcagattacattctctcccacccagatttcctcttgcagtccttatgcaggcctccatttaaacctgcaagagtgagctcagtgaatttctaatcatattcattgaatcggctatgaaatgaga

SEQ ID NO: 442037 - DNA, 1367 bp, Homo Sapiens
  misc_feature (78)..(78): n is a, c, g, or t
  misc_feature (91)..(91): n is a, c, g, or t
  misc_feature (160)..(160): n is a, c, g, or t
  misc_feature (164)..(164): n is a, c, g, or t
  misc_feature (962)..(962): n is a, c, g, or t
tttcacttctaaagtaatgtggaaagcaatgttgctttagaacagttcttgccatgtattcccataagccatatcagnaagcagatgaacnaattagtgaatattatgtttctgcatatctttaatactgatgcacagtgctttcccagtagtgaagatnaacnacagtttagagttcaatggtactgttatcattatattgtcaatggacaattacataagtttattgaatagaaattgagaggtgttccatcaaagcacattacaaactttcaactcaaatcctgttgaaaacatgtactcaacgcaagtaaacttgcaatggttttacttttcttggttgtgtgataccttatatgttggttttgaattttctacattctcccttgaactggattcaaatcctgtgaaggaatcaattcttttcatgcccctgtactatcccatcttattttaaaaatctcacaggacatgtttggaagaggggtagggcgactccacctgcatacactggcatacctgagtttgggcaccaatagagctattttcccaaagaagacgtttcctgttatgaatgaagctgtgcttgtattggacatgattgcattgcagcattgcctatgagtgcaagatcagattacattctctcccacccagatttcctcttgcagtccttatgcaggcctccatttaaacctgcaagagtgagctcagtgaatttctaatcatattcattgaatcggctatgaaatgagaaactgctgtggctctcataggtatttgtatttttctgttgacatctgactcaacactgattagtagctttttactactttgtcagtagcaagctgacaaaggctttgctttccagtaatgtttctgaattcctttgtatagctacatacagcattttatcttgccctcaatctacctgagggtgatattttgggtgcataaattgnactgccccaatgtgttttaaaactaggtttaataggcaacatggactattctgaaagaacattcccaagtaacccacaagctctgcactgacataattttaactacaacagttaatttttatatgctgaagacaatcaggaaggtatgatgctatgcccacgttattccaaaagtcatctgcacacacatacttcactttgaagccttggtttattaatcaccaacacctgccagttaccagggatcaaaggctatgtgttgtatatgtaatgaactaaggttttagactaaactgggtcatagagaaacataaagagggaacacaaaacctcttcgaaatttgtttgcctttaaatagaaagaggttaggcagggaacttcataaagagatatttaaagtcctc

SEQ ID NO: 442038 - DNA, 1979 bp, Homo Sapiens
  misc_feature (308)..(331): n is a, c, g, or t
gtttggctgtcgtgcttctagaagggctggagcgtgtcttccgaatggtctgtgcagcgccgactgcgggaagtatcggaggaggaagcagagtcagcagaagttgaacggtgggcccggcggctcttgggggctggtgttgtacttcgagaccgctttcgctttttgtccttagatttacgtttgctctttggagtgggagacctatgcttacgtttcttggactcagattctgacctgtgcttcttcttctttgagcttttctttctctcccgtcgaggagagctgctctctgaccgtcctctacnnnnnnnnnnnnnnnnnnnnnnnngctttggggttggtgagcgagaactgctagactcccgaacaaggctgtaaggtttgggaggctcaggagctggttgtttagcttctcgggcacgacgctgaggatcaaaagagctgccatctacgtaagaatcactgatgccaaaggcagcacggagtctttcattcttcttctcatttaattctgccaactggtgagtctccgtgaccgctggcctctgccctggggtctcctccttgcccccagggttcacatccttctccagcaacatgagtcgaaaggtcgccactttttcctgaatttgctgttcctcgtacccctgctcttccatcatctcctccagctcgaggcatcgcagctcgacgcgccgcttgcgctcgtggtccaggatgtcaggattaggccgcttcaccagggcagcctccaggcgccgcagttcctcctctcccttgtagtcaggccgctcaccccggcggccccgcaccagggacaggttgcgctggacgtagccgttggtgccgctgccccggggcgtcggcagcccgatcccgttgtacatggccccgtgcccggggggggcaccaccgctcccgccgcctccgcccgccgcctccgagggggagaggtcttgccgccgccgctgctcgagctcccgagtccctcgggcctggggccgccgcctcgcctcgccggtccgcccgcctcagccgacgccgacgcctcctcgcttcctcaggggccgcaacgggctccgactgcgccactcgcaccccgcctgggccgcgctgcacgtcagcacgactaactgcgtgcgttagcacgcaaacgcgcgtcgcggggcctgccgggaactggagtgcgccccgcggccttttgcgcacgcgccgaagccacaccgcgaagtaccgttttttcaggcacgaggaaggtttcaccccgttgccgaaagactaagcgtcccgttggccagtgccacgaagaacggaggaagcgacgtaagacaccgcgtattcctaggccttccgctgcggggaggagcacagggcctagtggcagcaaagcgatccccgagcgcgtctcgtctcccgctgtcgatgcagagcattctgggagtcgcgcttcgggcgtgtcccggagcccggatgcactttcggctccgggcgtgccagccattttgtctccccatgttcggacacgatatcccagtcccgccggtgctgccgctctcgtgcgaactcgggttcctcgagcgagccctcagctgcacagcattcggcccttcctcactccagagaacctgcctccaaatccctgcacggcggtacccctcgaacggcccgaaccttgggtggcaggcacctaacacccccaccatgggccccaactctgttaccccccatttagcgccttctgcaccctccctctttgcacaccccgctggaccctcctaaccggttatccctcctgggacgatcgaccacctttcccctattcccctgccgcgctccttcccccctcatccttcactcacaccgccttgttgcgcgtaccgccgccgcgaacgctttatacaatcgccaccccgaacaggtgcccccagtgcggggcccctcgatatatccttagtcgccgctctcgccccgctccg

SEQ ID NO: 442039 - DNA, 645 bp, Homo Sapiens
ttttttggaattagggtaatcgttgaagattaccaaaggtttatttggaatgacacagcactgaaaacataattgttacagatgatttgtggatacagcatacaccatctattttactttagaacaatctgtgaagatgagttgcataaatagaaagaggtggaaatatagaggagctgtttttatagtgttcttttgggggtagatgaatatgccccatctttctacccaatctcataaaggcagaagagaagactgcttagctgcccatcccaactagcctacctccagccacagcggctggacagctagataaatcaggccctgccttctctgagggtgcctcagtgtagtcgtgctatctgtcatctcatcctgaaaactgcacagtacaaacacagatactgttgactcttttgggcaatgggatggctggtttttgccattaggcaaaactgcaattgtaatgccagacagaataagagcaatgcatgtatcaatgacaattgagaggcaaagagctacaatggaaaggaaagaagcaactatgtatatgtagccttctgcatacacatagatccaggagtcatgggaactagcttgcgtgactgtgtgtccatatatataaggatgtggtggaaaaga

SEQ ID NO: 442040 - DNA, 462 bp, Homo Sapiens
agctgcgctccagccttgtcatttgctgagggtgggtggcggtgcccaaggaagtgaacttattttgttccttcacaaagactggaccaggcggtgcctttcacgcgaagaggttacgaccacggacacaacctcctttgatgcattgtgcgaggcagcacctcgggccccggacagtagtcatttcacagaaaatgcaccgccccgagtgtcttattgctgtgatgaaatggaaatttaaatcagcagccaatcagataactccagtcgtgtttatacttctacaaccaccttgtgagtattacagtatgtcataacgttataaatattaggcagggttttccccaggagcggggaggagtctgcttctacggacgttgtgagcggctccgaagattgtgtgtttaaagtcaacaatttcatttttaagacttttttcgaactggttacattacatggact

SEQ ID NO: 442041 - DNA, 1877 bp, Homo Sapiens
  misc_feature (406)..(464): n is a, c, g, or t
  misc_feature (1276)..(1445): n is a, c, g, or t
ggaacgagggaaaaaggagtataaggagtggtataaaaaggaggtagagagtaaacaggatagaaaatatgtaaagaggggaagttgttgaaaggaaagattgtgcgaaaagagagaaatgcgatgagagtgtaagaattgtggagataaaacgaggttcgtagaagagtaggtacttgatgtaaaaaataatggagtgtctgaaatatatgagagggtgtaaaggagcagaggattagagaggagctaaaaagaaatagaggttgatgcgaaggggatatggtaaaaagggagtttttcgagtgaaggaaagggttttaaagagcgaatggtgtggaagaaggcgaagtaaggggaaactaggagtgtagaggatgagtaggtgttaatagtttgggtttagtgnnnnnnnnnnnnnnnnnnnnnnnnnnnnnnnnnnnnnnnnnnnnnnnnnnnnnnnnnnnataaagcactgtttatttttatgtattgaaaatgtccattttaaaagtcttcaaaataaaaacaagttagaaaatttgagcttgtgttaagaaggggaaggacagaaaaggaactgaaaggcctctacgggcagcagtttaattacagggcaacaggaacccatttatagagtattgtaaacaacacaactatggcgacactgctctcagattaacatggcttcatttcctttatattatagtttagtgtgtaagcatggttaccactctgcacaagcttcgttatccagagtaccgagggcccctcatcagaagggccaagtccccgaaacatgcatatgtactcatcactgtaaaatgaagacctttcaatattttcagcaatcaactaaagtattccgtaatcacaaaaatgtttcctatagatgcagtttgcacatttattgcaagccattgactaaccacagaatgggcagatgtgaagatctgtgttgatgtttttggtggtggtggtagtactgatgtttttaatttttaagtgaaggatgttatatctaaatggctgtgctaaaaaacagaacaacagccattcctagaaatttctttactcttcagcttccaaacacggctgtgtgtggttggctgatgttggactgcaaaaatagtccatttcctgtggatggtgtaatttctgctgtgcagcaagcagacaacagccctgtaccatgtagctatgggaccttgagactctcagtaccaaaaataaaaagggctcctcagcaagctgggggtttcaaacttcaagttttgtnnnnnnnnnnnnnnnnnnnnnnnnnnnnnnnnnnnnnnnnnnnnnnnnnnnnnnnnnnnnnnnnnnnnnnnnnnnnnnnnnnnnnnnnnnnnnnnnnnnnnnnnnnnnnnnnnnnnnnnnnnnnnnnnnnnnnnnnnnnnnnnnnnnnnnnnnnnnnnnnnnnnnnnnnnaaacaatatttgcaaaacccacatttataggcatccatcaaatatattataaaggcaattctgatcagccctttggcctcaatttccagtgaccttccccatctggccaaatttctcttgtcttttggggagggaggggtgagtggcactgagccttaggccaactttcaatggcgctgaatttggatgtgtgctgttctgtgactgtcttctaaacctggtttctcacagttctagtttctgggataaagtggatgatgtgattcaatgagcaacttgagttaatcagtcctgaataatccagcacacagctactagaggggcccttttgttctggatgtacaagttggaccagaagcatatttctgcaaatactgcttagagtcccacccaaagaggccaattaatattacaacttctcacagcatatat

SEQ ID NO: 442042 - DNA, 396 bp, Homo Sapiens
acatagaagggcagatgtgaagatctgtgttgatgttgttggtggtggtggtagtactgatgtttttaatttttaagtgaaggatgttatatctaaatggctgtgctaaaaaacagaacaacagccattcctagaaatttctttactcttcagcttccaaacacggctgtgtgtggttggctgatgttggactgcaaaaatagtccattttctgtggatggtgtaatttctgctgtgcagcaagcagacaacagccctgtaccatgtagctatgggaccttgagactctcagtaccaaaaataaaaagggctcctcagcaagctgggggtttcaaacttcaagttttgttttttcagagacagaggtgtctctctgttacctcggaagtatgtagt

SEQ ID NO: 442043 - DNA, 778 bp, Homo Sapiens
  misc_feature (250)..(250): n is a, c, g, or t
cgatactaccaggggattttttggaaagtagtatgcctatcttccctggaaagccctaataacccttattataccaccattcacaacgttttccttctttgaggtgtgctgctttttgcaagacagaaaaaacacattactagattttgaaaacttaatttctgggcctgtttaagtcataactacaagatcttcggtcatatattctccacaggcacttgtttctccaccgcaaaaagtaattcttatntgcttggtcctttgtagtcctttattatttatcttcatgataacccttacatttagggtagcattatgcttattttatagaagaaactcaatctccaagaagatatagtctcccaaagatcccccaagtagtaatatattaggcagagctaaactcacacactcactcaagatcctagtactggtacatgctatgctaattaaatttgctaaaatggatgaaatggcaatttctcaggtcccttccaatgatcctgttctctgcttctacttgctatctttttctcttctctcaactagcattaacatccgaaactatatgtaatcaccaaatttcatctaccatggttttttaattattctttaaatttttgtctatttccacattaaatccagagaaatgttacttttttgaaagtttctgcttcctgcctgtctgaaggccatgggacttaactatttgtcaaagcagaaattcccatgggacttacctatctgtcaaagcagaaattcccaacattttgtaaac

SEQ ID NO: 442044 - DNA, 632 bp, Homo Sapiens
  misc_feature (110)..(192): n is a, c, g, or t
atattttttgttgttagatatttgttctcttttatttatttactaacaaaatagtaataaaggcgttacatttaggctacactagatttaatatttatttaataagatcnnnnnnnnnnnnnnnnnnnnnnnnnnnnnnnnnnnnnnnnnnnnnnnnnnnnnnnnnnnnnnnnnnnnnnnnnnnnnnnnnnnttttctcccaatgctcaagtagatccaagccccccacttttggcaggagagttgcagtgttttaccccgacagggtgactgcttaataaaagaagacacatctgcttactcttttacaactaaatggttacattgattacatttagttacaacttttatttttttacttgggctatgaataaaccatttttgtccagagtaaaatataaaatttctgtaggatatcttctgtctttatgtccttctcttgttgcatttttataaattatttcttaggctgaaatgacctaagctttcaagtacatgctgtaggagcaatactgacatttgttccatcccagtctttcctcggagaaagtgtcacaatgtaaatatcctagaagacctcaggctgcaaaggaaaaaccttcaagtgtgccttgctctgccaatatcacaca

SEQ ID NO: 442045 - DNA, 1892 bp, Homo Sapiens
ggttcaaatcttttattattagaaaagtgctgccagaaacatccttgccatgcttctgtatgtactggtgctagtgtttctatcagataaatttttagacatgaagtgaattactaggcataggaaatataatttacacttttgatagatactgagtttttgctcatttgctacatgaagcagaggcagagtattctgtgtggggtttgggacaggaacactgacccctgaagtcgagcctgggggtctaacatagtggtcatttgtccagcctgttttatggaaggaactggactctgagctttggggaatttcctgcaagataaatgtatatcccacctatactggtaacaggtaagttatgcgcaaagatgaaaagacaaagccctagctagatcagctcttgctctcagcactacaatggccagcggtaattctttcagttaaaatgacaattaatacagtttcattgaagcttcaaacagagcagccagatcctcttctgactggggaccgggtgcaagcttggtgaccctttcctggggcagcgttcctttcactagtgcggggatatcagctttggagtaaccaacagctgctaggccatcatcaacatccagatcgaataagaatttccggagcgtgtctgccaacaccagccctgcatcttggatcctggcagtgcgggtgtcggctcccagtatttctgccatctccaggtgtcgctctggaaacatctgggccgtgaaagtgaacaccgctggggacgtgagcaccacagaaaggccatggggcaccagtgggtgatccacattgtaagtcctttgctttatacatacttcactaaacctgaaaattgggtaagacattccatggcacagatgaacaccagcatttccaaagccgatgccagcaaaagcacttgccaagtgcatatgagaccttgcttcaagatcatcgggatttctgacagccctcttcagatacttagccacgatccgcagcgcgtggatagcccaaatgtcactgattgggttgctgccctggtacgcaggccgtgtgatgggatttgaagggcaggggtccgcaggtggtagggcaggttggtgtatgactccagggcatggcaaagcacatcaaagccactgttggcgaccactcgggcaggcatgtggagggtgtgcagaggatcaatcagtcccagtgtgggtttgatggctctcgaagtgatgccaatttttactttcaagtgttcatagtcaaaaatggcaaccccagtagtttcactcccggttcctgaggtagttggcactgcaatcagaggcttaagaggcacagacacaggctttcccttgccaatgggggcactgacataatctaggaaatcagaatgagggctggatgcatacagattagcagccttacaggtgtccatggtagagccaccaccgacagcaacataggcatcaaaagctcccttttgggcaaactcaatagcttccatgaagcttgaatccgttggttccactctcacattatcataaaccgtaaaggggatgccattcttcactagggaatccatagctacttgcacaggagggagcttggagaggttcttgtctgtcatcaagcacacatttttagcacccatgttttttaggtccattcctacttcctttgtaactgctgctccatatctaatatttgaaacagccatctcaaaggcataatctgttgttttcccagaaggtgaaagtccaggggcttgggagtaagtatgagaatgagttgggcactggcacgctgcgcgttgcagttgcctcagcaagtacgcgacccgggctcgggcggcagcggccatggcgcttggagtcctcttccctcatcccgct

SEQ ID NO: 442046 - DNA, 1100 bp, Homo Sapiens
  misc_feature (59)..(59): n is a, c, g, or t
ttaattcaaaacgaacgcccttgtcctcctaaaatgaaaaactgaaaggaaaacaatanttcctccatcaactgtttcaagcaaaggccataataaataacgctgtcagctgcctcatgtgatgtaaaagcgccgggggaggcaacgcgctggtcccctggatggcgagggccactcccaggaaggtgccctgagactcattcttcttcttcatttgtcagtgctgttgacggccctcttcagatacttagccacgatccgcagcgcgtggatagcccaaatgtcactgattgggttgctgccctggtacgcaggccgtgtgatgggatttgaagggcaggggctccgcaggtggtagggcagggtggtgtatgactccagggcatggcaaagcacatcaaagccactgttggcgaccactcgggcaggcatgtggagggtgtgcagaggatcaatcagtcccagtgtgggtttgatggctctcgaagtgatgccaatttttacttttcaagtgttcatagtcaaaaatggcaaccccagtagtttcactcccggttcctgaggtagttggcactgcaataagaggcttaagaggcacagacacaggctttcccttgccaatgggggcactgacataatctaggaaatcagaatgagggctggatgcatacagattagcagccttacaggtgtccatggtagagccaccaccgacagcaacataggcatcaaaagctcccttttgggcaaactcaatagcttccatgaagcttgaatccgttggttccactctcacattatcataaaccgtaaaggggatgccattcttcactagggaatccatagctacttgcacaggagggagcttggagaggttcttgtctgtcatcaagcacacatttttagcacccatgttttctaggtccattcctacttcctttgtaactgctgctccatatctaatatttgaaacagccatcttgggagtaagtatgagaatgagttgggcactggcacgctgcgcgttgcagttgcctcagcaagtacgcgacccgggctcgggcggcagcggccatggcgcttggagtcctcatcccgct

SEQ ID NO: 442047 - DNA, 725 bp, Homo Sapiens
tatcatgcaaatgctgtttattgattttcagattgtagaatcaacctatggacaaaagcacagaagatttagttttgcttacagagcagaaggtagatgttagcaacaaggaagatggaaaagtaaagtacatcagaactttagggatacagttagcgctgggggaacccctgctgggtggagacaagctctggggcagaagagaagcccaggaagcccttggcagttgactacgtggccctgggctggatacttcgtcgcccccctgccccaccccacacacctgggtggtgctagaggatgtcgctggcgtgatagcccctcctcgtacccgtcctttagggaggacgaagaggagggagagagttggaaggggaaggtcccaacgctgccatgctcatcagacacagaaggaggtcaccagactgaggcaggcggtggagcttggacaccagactaacttgaagatgagctaaaacaggggcgagtgtaagcggctttccctaaggcatgacccccagggtgccatgtcagtttaccattgccgtggcaacaccctggcatactgccctgttccgtggcaaagaccccaggacccagaagttactactccttccctagaaatctttgtatatgcagctccttaatctacatgtaattaaaagtgggtataaatctgactgcagaactgccctgagctgctgctcgctgcctatggggtagcc

SEQ ID NO: 442048 - DNA, 1510 bp, Homo Sapiens
  misc_feature (786)..(794): n is a, c, g, or t
  misc_feature (858)..(892): n is a, c, g, or t
  misc_feature (1345)..(1423): n is a, c, g, or t
  misc_feature (1435)..(1447): n is a, c, g, or t
cgcacaccacagatatatatcttttatttgtcaattaaaggatcagcatagactccatgaaacttgagagacctgattaacatctgaaggcaacatctctgcaaaacaactaacttgagtactttaattatatatgtatctagcagaagagaaaaaaacaacacagttttaattttaaattttattaaagtacagagttaacaagttttgagttttttatataggaaaagcctagtcaattcagatgctttctagaaaaattaacattaaaaaacaaatagaaatccatgactaaagggggaaaataactttcaaaagttaccaaaattcgaatcatatcagagaccattataaatttcaaacagtagatttaccacacatattgcattttcaaattctaatgtagcaaaacgtaaccacataatttggctacagctaatcgtttcagaaaagtttaaaaaattagcaaagttatatctataaaacttttgtagttttctttttgcaaagtaaaaaggcttaaatctttaataaaggaaaacaaaacaatcctcttaaatttcttataaatagctctccagacatatattacaaatctgctgtaagctttctttacctgagagaacttcccaggatcctttatcccaaaggattaccttaaagagttcttccatcattttactcatgtgaatatgattaaactcgtatagaagtggattgggacatatgcattcttaatctgcccttcccccatttgtttctttctgaaaggattttgcttaaggnnnnnnnnngctctttggtaaaggccaaatatttcaacctttcaaaatgactgcctctgtgaaagagttgttnnnnnnnnnnnnnnnnnnnnnnnnnnnnnnnnnnngtctaaacatctgtgtgaacagctctccagtactgtgaagtcaaaggcccaacattacagagcgcacctctgcctgaaatacaaaactaagttaactagcaagttacaggaaatagccttcagtaaattccacaagccaagtggctactgcattgtccctgaagaaggagggcccagtgttctttctgggtgtgtaaggtcttacttagttcaaggtttgtcccttcttagttgtaggttgggccctctttcgtttccaagaggtataggacactagagtacaccaaatgagatactatttggaaaggcaataaagggagtgtaaaagcctaggtagcttaaatacaggctctggaatttccttcgcaggaaggtgaagcaccaatgatggcaaaaattaaataaatacatcatcttaaaaaggcagagggtaggctgcgtgcagtggtttannnnnnnnnnnnnnnnnnnnnnnnnnnnnnnnnnnnnnnnnnnnnnnnnnnnnnnnnnnnnnnnnnnnnnnnnnnnnnncccatctctacnnnnnnnnnnnnntcggccaggtgtgatggggcaaacctgtggtctcagctacttgggaggtggtccttgagccca

SEQ ID NO: 442049 - DNA, 687 bp, Homo Sapiens
  misc_feature (363)..(363): n is a, c, g, or t
  misc_feature (581)..(581): n is a, c, g, or t
  misc_feature (619)..(619): n is a, c, g, or t
  misc_feature (627)..(627): n is a, c, g, or t
tctccgttgaccattttgcaaaatagtttattgagattaggggtctgatcttttgtataacctgttgtagtgaactgatcatatgcgacttgactttggccaatagtacctcgtgcagtgtacagtactactatttagacttactgatttgggtaatagaaaagctatgatgttagaaatgttgtcgttgtatattggagaaattttgaagttgcatattggagtaatttagtcctgtatgctttgtaaatgagtgcattctattgtcgagagtaaatacagtattttgtagtataaacttaagcttttagctgaagaaattggcagcatagttggagtgtggagactattcttaaaacgcanatgttttaaattacaaggaactgtagtggtgtgtaggctgtaacaattcctggtgccaaatttgggagattatttggttgagctactttctataaagaaacatattaagtatctgcaataaaagtggatttgtagctatacacaagggattttacattgataaatataactcaataaggcaccttctttgctctttggtatctgccagttaagaccanaacatctcatattttcactggagctttctgccaaacanatactggntttgcattggctttgctgctcagtttgaaagctagggggatctcttagagcctactctgg

SEQ ID NO: 442050 - DNA, 945 bp, Homo Sapiens
  misc_feature (675)..(675): n is a, c, g, or t
  misc_feature (685)..(685): n is a, c, g, or t
  misc_feature (816)..(816): n is a, c, g, or t
  misc_feature (859)..(859): n is a, c, g, or t
  misc_feature (885)..(885): n is a, c, g, or t
  misc_feature (899)..(899): n is a, c, g, or t
ccgccccgtgccctctggagacctgcactcctgcccgctaacccgcctggctacacgggcgagagcccatgcgcggctctggttcctgttcctctaacgacgccggggctgcgggatgcgaactcagcggaccgcccagacccggaactgctgaggcagcagcgggcatgcggcgcttggctcatcccgggattcccagctctcgcgctgggcccgccgcgttcgcaccaagcacgccaggcggccctggcctacctcccttcctcgtcccagcagctggcacgagggaacctggccgtcaggtttcccctgggatcctgggacggtatcaggcggggaatctgtgcggccgcggcgaggtgatttatttggcataaaagtattctttcaaggatggcagaagctgttttgattgatctttttggtttgaaattgaactctcaaaaaaactgccatcagacattactgaagactttgaatgctgtccaataccaccatgctgccaaggccaagtttctctgtataatgtgttgcagtaacatcagctatgaaagggatggagaacaagataattgtgaaatagaaacaagcaatggattatcagctctcttggaagaatttgagattgttagctgtcccagcatggctgccactttgtataccattaaacagaancatgatgaanaaaatctgagcagcattaagatattttcatacatggacttactatcagaacaggtgggatatcttatataccaactcttagctcaatcaatctcttcagtagttccaaacggagagatcccaggtagtggntcaagataaggactcatattccattgcatcttggatatggaangaaaggagcctgactctatgatggantaccccccaatcanagaggagtcacaataccaactctttgtgcaaactgattaccgaagg

SEQ ID NO: 442051 - DNA, 831 bp, Homo Sapiens
gtgtgagccaccgcacccggccaaacttattgttttaatccgagcatttatgtttagaagaattaatttaaatatttcttactatttctctgtcgaatgtttactctcatcttatctcaatgaaagaagtattaaaagtcttatggccccaaaagaaacaagccaaactgtactgtcttaaaagtgattcattctgagcttgaaacgactctgtcagtgtttgacattgtcatttctagtggcatgtatcttaacattcttttcctgcttcaggaatgaaatcacttgtcctgctgagaaaataaggggaaaacaagatagaagtaaaaaacaacacacctgttgaactattttcataaagatggcgttttcacttttcaaagaaatgaaaaccagatggtctatgctaagaagtgaaggcattttgttgtcttcagaactgatcaacatggtcatgatcatcatcaaatttcttgtttccaaaggccactattgtagtacagtctccagcaggattttgtaccatgtgctgcctttggaataaagtattataatgtatcttgtcaccttcatcaacaccaccattaaatatgtaagttcctatatgtgactttttctgggcatatttgcatcaaaaatcacagtccttgcctccttgcttgcttttactccatgaaacgcttcatgaagcagagcatgattgtcaagtgaccaggagggatggacatttgtaagtggaacgtgggtatacttcacacatggcttattacttcatacttacattaacttaggttttctcccaaatccaactggcagtccgtttttttctat

SEQ ID NO: 442052 - DNA, 609 bp, Homo Sapiens
tgtgggagaaaaattatctccatttattttgtttcatatacatccatagttgaattttaatacaaaagaaaaaaattagaatctgacaaatgtttacaaacaagataccttcaaatagattttactcactttagcctggtgcagagtaattgacaaattgtactgttatattcaaggcaacagagtctgtagtccaggaccacttagcccaacctttatgcaagcttaattttaatctaccatgaacaataaactcattgttgattcccagttgtgtgtgtgtgcacatgtgtacatagcagctcctttcatagaaagaaaagacatctagaggtcgtcttgtacttttacctacaggaatcatgataagatacagatgattatatgtaaccggggctggattttataagaaaaaatacttagctgacaaatgagggcagcaataaaaaagcgtcttttttgcaacaataaataaatacagtcaaaagttttctgtgagactctaaaccagcttcttcactgaagagcagacgtggcatttccatggagttacacttgaccccatagtatctttttcctggcttcctttcctttttttcaataacaagt

SEQ ID NO: 442053 - DNA, 1531 bp, Homo Sapiens
  misc_feature (565)..(840): n is a, c, g, or t
  misc_feature (1259)..(1472): n is a, c, g, or t
aaaaaaaaggcctggatactgcttttgctgtctctgttatgagatggaagacttacatgtttgtgataaaaggggaccatgagaatgaattggcttggcttactttccccctgaaatcctctctcctgcagactgtcttgaagacctggtgactggtaaataaagccctgcatggaggctgcacagcaggggcaagaggcccatcccccagcatctcactgaggacagcttcaggctgccttcctctgaacgtggtccacaccttcctctcctccacagagagggtgccgccagaatcccctgtcgctttctgtgtctgcaatggggggcagcacagggatcaaagccatctaaagagtttccagagaaagtattaattcagaacaagccaaagaccctgagcctcaccacaaacaggccttttggagtgtgaatttgagttgaagatacaagatcggagaatgattttctggtcttaactaatcctcatcttcatgtttgatctttaagaagtcatcacccattgatttcagttttgctgtacctcttgaaagttaaagagacnnnnnnnnnnnnnnnnnnnnnnnnnnnnnnnnnnnnnnnnnnnnnnnnnnnnnnnnnnnnnnnnnnnnnnnnnnnnnnnnnnnnnnnnnnnnnnnnnnnnnnnnnnnnnnnnnnnnnnnnnnnnnnnnnnnnnnnnnnnnnnnnnnnnnnnnnnnnnnnnnnnnnnnnnnnnnnnnnnnnnnnnnnnnnnnnnnnnnnnnnnnnnnnnnnnnnnnnnnnnnnnnnnnnnnnnnnnnnnnnnnnnnnnnnnnnnnnnnnnnnnnnnnnnnnnnnnnncttaaagaggtaatttagccatcattcttatgccagcagatataaataaacttggacccatctggtcttcagctaaacctgagacattttaaagtgcatggacagccatggacagcaggccctcctctaacaggggatgcaaggcatggagaaagacaatcagtacccaagctcagccacagaagacaggagtcactcatataacttgtgtttagaagtttttggcagccacgcacactttctgaaatcccctatctggtggcttatcctatctttacagacgaatccctgagggctgagcagattctccaaaccccttctaaaatcctgaaactagaaagatccctggccccaatcatctggccaccccccctcccaacgggggtaacactctcgaaaggagcggggtgcccgccccnnnnnnnnnnnnnnnnnnnnnnnnnnnnnnnnnnnnnnnnnnnnnnnnnnnnnnnnnnnnnnnnnnnnnnnnnnnnnnnnnnnnnnnnnnnnnnnnnnnnnnnnnnnnnnnnnnnnnnnnnnnnnnnnnnnnnnnnnnnnnnnnnnnnnnnnnnnnnnnnnnnnnnnnnnnnnnnnnnnnnnnnnnnnnnnnnnnnnnnnnnnnnnnnnnnnnntaccgaccgcctctcccccgctcgcgacgccagggctgtgggtggaccgccccctaccc

SEQ ID NO: 442054 - DNA, 831 bp, Homo Sapiens
  misc_feature (622)..(622): n is a, c, g, or t
  misc_feature (711)..(711): n is a, c, g, or t
  misc_feature (771)..(771): n is a, c, g, or t
ggcagtccaaggctgaattttcaagtctgagaacctgggggtgggatgggggagtgatagttttaagtcctggagtcccaaggttagaggatctggggtcctaatgtccatgggcagttggagaagagtgtatccctgctgcaggggagagagagaagccaattctcctttcttctgtttttattctacccaggcctccagtggattggaggtgcctgcccatattgagggcagatcttctctgcctagtccacgctaactcacatgccaatctcctctggaaacaccctcacagacacaccccaaaataatgccttaccagttctctagatattccttaatccagtcaagttgatgcctaaaattaaccatcacaggctttatggctctattacccaagaattctgttactttcagctgaaaacatttctaatggacatattccaattctgtatagatcagatctcagtttcatttcccattatatccttctctctcttgatttagaattctctttttctccactcttctgtgtatgctaaaatactgtcaatctcgtctttgaaggttttgctcatctttaatatttttatttcagtagcttttggggtacaagtggttnttggttgcatggatgaattgtatagtggggaagtctgaaattttagtgcacctgtcaccagaatagtgtgcattgtacccaatatatangtttttattccttcccttcttgagtctcatagtccattatatcactctggatacccttgngatccataggctagctccacctacaggtgggacattcggaaattgatttctatttcgagg

SEQ ID NO: 442055 - DNA, 921 bp, Homo Sapiens
ttgagaaagaataaaatgtgatcatttgaattttggaatataactgaatgaaacagaatgaagcttgaaaatctggctggtcttcatgacttttatgtgattaaataaattcatgctaatattttgcatgggtcaattgcatttggggtgacaaaagcactttcatacttcagtctttatcttttaaaaactaattcatggggcaaagtctgatcagataggtattattatctccatattttatagaggaataattgagaggtacagatggcaaagtgatttgtaaagtcttacaactagttagcagcataccaaaccaaacatcatttcttctaagccccacagtagcattttccaacaatgctcttttgaatcacatgccactcctctccaacaaaataatttttaaaatgtatttttcatccttggggacttaaatcagcatttcaaattgatactggttaagtcttccaaataatgctattataatgggaaaatagcatttgaattaaatgaaagagtttttcaatgtaaaaagaaattctcatgcgtgtgtgtgtacatgtgagagtgtgtgagtctttatccataggcagtgcttaaactcatagtttaagaacatttatatcaaaagtctgaagtatgtaatatgtaaattcctttggtttatcaagttaatattaaggcatttcagattcccctaaaaggatttactgtttttttaattatattcatatttacctataatgaagtagaaagttaaaaataagagttgaaaaaaacatgcataatcactgcatttcatgaaagcactttttttggtaaccaaataactttccaataaataataaaaaggagttaatatcaccacaggacatatacaattaagaacagtactataggcatataacttgacatagg

SEQ ID NO: 442056 - DNA, 910 bp, Homo Sapiens
  misc_feature (147)..(202): n is a, c, g, or t
  misc_feature (314)..(354): n is a, c, g, or t
tcgctgcgccgcgtctgcttcgctgtttgtgtatacgctgccctctgtgtcgtctcgttctctcgtctaccattctgcttgcgctgtgtgttgtgcctcccttcgcagatttactttatcctaagatcccctccttgtcttgttgcnnnnnnnnnnnnnnnnnnnnnnnnnnnnnnnnnnnnnnnnnnnnnnnnnnnnnnnntggcctggacgggcgcgtgtgtgcagctgaccgccgtcttctatggcttgtaaacaccaggcggctttattggtagcattgcaatctggggtggagcagctttactctgacnnnnnnnnnnnnnnnnnnnnnnnnnnnnnnnnnnnnnnnnncaggccctgtcctggctgatcaggtctggtgcagaggagctggaagcctggtccttccttctggtcctcggttccccaggttaggtaataattcacaatgcttgactcggactccgggctccctctgcacggtcataggttaactgctgcggcgcttcatcttggctgaggtcctctgcagtctctggatgatgcgttctacccagggctggtctgggggtgcacagagctggcggcccctcagtgtggtgaacactacagcaggcaccctgcagccatccttgatgagaaggtagtggaagttcctcacgatgtacccagggatgggtttctgggtcacagacaggcagcagtcttcagcatcattggtgccactcagagttggggctggggaagtccagagaaccagcaggctgagggccagtagcagggccatggagggtgaacagaggcaggccaacggtgaatgtgtgagcgccagctgtctgggtgtgtgcaggatctgtgtgaggctgcagggcgactgggatgcaggggtgaaatgcaaggtgtgagt

SEQ ID NO: 442057 - DNA, 622 bp, Homo Sapiens
  misc_feature (50)..(50): n is a, c, g, or t
  misc_feature (79)..(79): n is a, c, g, or t
  misc_feature (225)..(225): n is a, c, g, or t
  misc_feature (238)..(238): n is a, c, g, or t
  misc_feature (244)..(244): n is a, c, g, or t
cctgcaaaagcaatgtgcgggtcctatatacgctaaaatcccaggctcgntgccggcataaagtgtatagtaattttcncagccttaaagcacttccgaagagatgctttgagcgctcgcggtaccagtgcgtaaacgccgctccccggctggcgcgggtgtgcgccaactccaacctgcgcgcaagtctgccggtgcgcgctccagtcccacagctccgagtcnccgcagtgaaagnaggggncggtgtaccggggtagatgggcccctgaggactcccggggttcagttttccgcggaactctgcctgcagcagtctggcgggaacgtgctgcggagctcatcccatcttggcttctccaaaagggtttatacggactggcgagtctttgccctgcctcctccaagtgtctggcaccagttctaccgtttgaaatggtcttggactgggatacgaggcctcaaagtcagaagacggcagggcaggatggaggcgggcagagaaggctggctgacctgtcctccagcccctatgcaaacctggaaggggaacagggagaaggaccaccgatgccaccccgagcccggctctggcctgcaggcttggcaggcgcggaggcgg

SEQ ID NO: 442058 - DNA, 902 bp, Homo Sapiens
agtttccacgagggctttttcatccatttttccattggtaagaaggcagtctttatattcccagttagtttttggtgttatactttccataaataacaagaatggattacaggtctctgatatgcccagcatatgaagcagacatgccccctataaaatccttttagtccatctgtctgatacactttgcgaacacattcagaagcacccattcgcctttccccgcggttccttgcatcaagctgtaaccgagtctttataagccaaatggggttggttgctgtgattgcagtaaaacctgccattgcagctgaaatcatatgtacttgggtagaatcaggatcaaatacatcattcaacttttccttgcagtttgaataagcagcaaagtatattgctctggaaggggctacccccactaaattggggcctagtcctctaaacaaggaacgaggcccttctttttccaagatcacctttaggcaatgaagaggtccgggagacactactcggttgacactggctccagccatggtgttcagctgaacttcagaaatataaagcgtcacagaagatgactgcagtcgtgtttttacaacttccagtggacatgtcagaatagctcccactgtaccaccacatcctccggcaaacagatgcaccagcgtgtccctctggctcattctctctcccgcatgtcctccggccgctgaggcgggacgcggatctggccgcccgctacggcaggcggcttcggtcccggactggagacgcacagcgccccggggacggcgaggagagctggccgagatgcggctgcagaaagcaaccggcacagccctccccgcggcactccagccgcgccaccgcctgcctaagcgcgccagcccttcaccccgctc

SEQ ID NO: 442059 - DNA, 578 bp, Homo Sapiens
ctttataagccaaatggggttggttgctgtgattgcagtaaaacctgccattgcagctgaaatcatatgtacttgggtagaatcaggatcaaatacatcattcaacttttccttgcagtttgaataagcagcaaagtatattgcttttaggcaatgaagaggtccgggagacactactcggttgacactggctccagccatggtgttcagctgaacttcagaaatataaagcgtcacagaagatgactgcagtcgtgtttttacaacttccagtggacatgtcagaatagctcccactgtaccaccacatcttgcaaagccgagcccggaaatgagcggcccgaggtccgaggtggggcgtgagtgacgtgcagaggcccaagcgagcgctgcaaggagcgagggctaaaggagtctccggcgcccattttgtcctcagcctccgcactttccgccccgtccccttgggccatgcaacctacgcgaaatccgaagccaggctcctcaaagcggccctggatccccgacgcctgctagattgcggcgtgcggccaggtccagcggcgtccgggtaatca

SEQ ID NO: 442060 - DNA, 700 bp, Homo Sapiens
aatggttgtatccattaaaaaataaaatgttcatattaaaccctaaaatgtttcaattttattaaagtatgttttctgctatcttttctacatttgaactcatcaaagtaccaaagtttagtaagtctgggcacatctgctttcttttcactaatacataaaaacacagaaacgttatctcatgagtaaccagatgtatgtttttaaaagtctttagaaaataccagtaaaaggaggggatttttattaatactatgataataacattgtgagtgaacattttctacacattagccacagtagtgtgcgcccgtcaaggtttttgaaccctccagtgactggatctacagaagtctgcttttggtgtagactccagcttttgctgttttctctctctctttacccttttctccttttcccattcccatcccaagtttatgcctttgctctcttagattttcacagggatatataataataagctttttactttgacattggtagtaatattggtatagaattctaagttgtttaactgcctttctttccagaattcttagcttttgacctgtcctgtgatgttaaagcgtcttgttaactgcctcttttgctttttgtcagcagaattgtgtagattaaccttctggtatttgtaaatgaagaattaattcattcacatgttacatagatgaattagtat

SEQ ID NO: 442061 - DNA, 1452 bp, Homo Sapiens
attcggcacgaggctaaaactatttttatataattttaagaatgtgggaaagttgtctgatttaaagttgtaatacatgatttctcactttcatgtaaggttatccacttttgctgaagatattttttattgaatcaaagattgagttacaattatacttttcttacctaagtggataaaatgtacttttgatgaatcagggaatttttttaaagttggagtttagttctaaattgactttacgtattactgcagttaattccttttttggctagggatggtttgataaaccacaattggctgatattgaaaatgaaagaaacttaaaaggtgggatggatcatgattactgtcgataactgcagataaatttgattagagtaataattttgtcatttaaaaacacagttgtttatactgcccatcctaggatgctcaccttccaagattcaacgtggctaaaacatcttctggtaaattgtgcgtccatattcattttgtcagtagccaggagaaatggggatgggggaaatacgacttagtgaggcatagacatccctggtccatcctttctgtctccagctgtttcttggaacctgctctcctgcttgctggtccctgacgcagagaccgttgcctcccccacagccgtttgactgaaggctgctctggagacctagagtaaaacggctgatggaagttgtgggacccacttccatttccttcagtcattagaggtggaagggaggggtctccaagtttggagattgagcagatgaggcttgggatgcccctgctttgacttcagccatggatgaggagtgggatggcagcaaggtggctcctgtggcagtggagttgtgccagaaacagtggccagttgtatcgcctataagacagggtaaggtctgaagagctgagcctgtaattctgctgtaataatgatagtgctcaagaagtgccttgagttggtgtacagtgccatggccatcaagaatcccagatttcaggttttattacaaaatgtaagtggtcacttggcgattttgtagtacatgcatgagttaccttttttctctatgtctgagaactgtcagattaaaacaggatggcaaagagatcgttagagtgcacaacaaaatcactatcccattagacacatcatcaaaagcttatttttattcttgcactggaagaatcgtaagtcaactgtttcttgaccatggcagtgttcttgctccaaatggtagtgattccaaataatggttcttgttaccactttggcagaaaatgccagctcagatattttgagatactaaggattatctttggacatgtactgcagcttcttgtctctgttttggattactggaatacccatgggccctctcaagagtgctggacttctaggacattaagatgattgtcaggtacattaaacttttcaatccc

SEQ ID NO: 442062 - DNA, 790 bp, Homo Sapiens
  misc_feature (437)..(739): n is a, c, g, or t
  misc_feature (757)..(757): n is a, c, g, or t
cctggggaggccgcccacaattaccacagtttgggagtttgttagttcccacccctgtaagacttgacacgtagtcttcatttctggggaattggcttaaaggggcagcatcacccaaaacctgggcacttggctaaacccccacctctgttatgggggccccttccccaggagaggggaggctgtgccccatgacagcagagcttggacccatctgcattcttagggacgcttagagcatggtttggtccttattacaacctgggggtggaggaaagcagcagctcttctgtctagtccccattcagagagggacaggggctggcctgtggtcacacagccacaggtcacataggtaggtatctgcccacctaacgaaggtaaccagggaatgcaccaggtgtgatccttaaagtcgaggtacttttcatctttcnnnnnnnnnnnnnnnnnnnnnnnnnnnnnnnnnnnnnnnnnnnnnnnnnnnnnnnnnnnnnnnnnnnnnnnnnnnnnnnnnnnnnnnnnnnnnnnnnnnnnnnnnnnnnnnnnnnnnnnnnnnnnnnnnnnnnnnnnnnnnnnnnnnnnnnnnnnnnnnnnnnnnnnnnnnnnnnnnnnnnnnnnnnnnnnnnnnnnnnnnnnnnnnnnnnnnnnnnnnnnnnnnnnnnnnnnnnnnnnnnnnnnnnnnnnnnnnnnnnnnnnnnnnnnnnnnnnnnnnnnnnnnnnnnnnnnnnnnnnnnnngggagacgtgaagcccanagaagatggacttgcctgaggcacacagcaggc

SEQ ID NO: 442063 - DNA, 690 bp, Homo Sapiens
  misc_feature (66)..(66): n is a, c, g, or t
tggtgttttctcaactttattgtggacaggagaagggtaagtagacttgaaggtttttaatttttnaatgaagaaacaatttatcctgtgtttgataccagatgagactgtaagggtcacatactccttaagcctacacatcaattccaggtgaagtgcttcaggcttggctcattctgacacctaagaagggccctctaggccacggttgggaagactgtttttgccttagcgccgtgcaggtttgggcattatataaacttttacaggcttgctgaagggaatggtgccctcgatgctggtttccacctgtggtgacatctcaccaccctccatccaggggcattttggaatgcgagcactggagttgtaggccagcagcagcctcacttccacctggcatgcctctgtccaagcggtgtgggagagataaacctgagtgatgagccggtgccgccctgggccaggattccggaagtctgcaggcttggggtgaatcatctgagcctggccatctggatataagacctggaccttaacagtgttctgaggatcctgcacatgctccagggttgcatcgacatccatggcaaccaccaactcagaggtaaatccgcaaggggtgtctgactcggacgctggctcgatgatgtggctgatgctttgttgatctgctctagaaagcgggag

SEQ ID NO: 442064 - DNA, 665 bp, Homo Sapiens
  misc_feature (193)..(193): n is a, c, g, or t
tacaataacataaatgatgtgtcacaagggtactgttgggtgccacaagcacctctcactgaatcgagtatcaatgtgtgaagagaaatgggcaatcagagattaaacataacttctcctggttggaaaaccatttcttgagactgtgctgctgaattcactcattaaagtgctcaaaggaaaagctctaccntgatttctgagagtctacagcaatatatgtaacacaattatatatgaagactattgactaacaggacaatagcacatgaacctttccttcagagaattcaaccaagagaagagagtgggtggcataagctgggggccaaaaggaaggctctcaggaatattctctaccatccaaaatcaacagcaaagccagaaaaggggcatgagctctaattcattgaagagaacaccacaaaacagttaacaaagggatctctttccaacacatgctcctctccatgaggctcaaccgtcagtgcagggcttgcctgatgtggacaatgtggatacctcagccctgagttgaacttggcatgccacctttgattccccatgctgcaaaaagaattggaacgctgtcaaaagtctcccttcctcaagctattaaatagaaccctctagggatcctgtatgcagtgagggtctgaactgat

SEQ ID NO: 442065 - DNA, 1728 bp, Homo Sapiens
  misc_feature (1062)..(1086): n is a, c, g, or t
  misc_feature (1553)..(1553): n is a, c, g, or t
  misc_feature (1562)..(1562): n is a, c, g, or t
gtcatcctcctccaactactgattgacatatggatcatcagttcagaccctcactgcatacaggatccctagagggttctatttaatagcttgaggaagggagactttaaaaggacgtgtgtgagtgaaataggatatagccattaccacggtgccaggacctgacagcgttccaattctttttgcagcatggggaatcaaaggtggcatgccaagttcaactcagggctgaggtatccacattgtccacatcaggcaagccctgcactgacggttgagcctcatggagaggagcatgtgttggaaagagatccctttgttaactgttttgtggtgttctcttcaatgaattagagctcatgccccttttctggctttgctgttgattttggatggtagagaatattcctgagagccttccttttggcccccagcttatgccacccactctcttctcttggttgaattctctgaaggaaaggttcatgtgctattgtcctgttagtcaatagtcttcatatataattgtgttacatatattgctgtagactctcagaaatcagggtagagcttttcctttgagcagtttaatgagtgaattcagcagcaaagtcgcaagaaatggttctccagccaggagaggttatgtttatcctctgattgcccgttttctctgcacacagtgatatcgtattcagtgagaggtgctgttggcacccagcagcaccctgggcacacagcatttcatgtcatgtcacagtgtacaagctaccctctaattcagaaagaagagcattttgcacagagaaaaataaaaagatccatgaatgtcatcttttatcttttattttcagttggctgatgttggaatttttgttcttgtcatgaacttgtaaaccaatcttgccaagatacaagttgttttggtttttcactacaatgacctcttgttcctcctgtcttgactgctgacgttcctcaatgattctattgtctattttatgggaagcagccttcccataggtttccttttacacactgcagggctatctttatactttnnnnnnnnnnnnnnnnnnnnnnnnnggacaagaactgtcactaacctcatggaggggtttgcgtaaaaccatttagcccaccttgagcaaagggtagattccgtgttgtttttttaagctcactgtaataaaataaatctaattcagcattattgtgctacctcaaaggtaaaaaatgttttaaggtcttcttttggtcctgagttctatatacagtgtttgaaatgtctttcatttggaattattttttaaattcttggagtgaattttattttaatctgttttaatcttgtattttaatctcagaagaataagtgattgaaacgtgatcaattcttgctctgtggtgttaaacatataatgaacagtcattaagaattaagtcactgtttgccataaacaaggttgatgttctttttgttgttgttaaggaaaccctagggctcggctttactcttgattaataaaggctgacaaagcaaaacccaatancaaataaanttaccgtgttcggccgccctcgggccctcgaagaaccttttctagaacctttccgttttgggcgccccgggcccccacttaggtaaagtggaacctggggcccttaaccttgttttcctaagggaaaaaccctggggcccatggaattaagcgggcttggggaatt

SEQ ID NO: 442066 - DNA, 1622 bp, Homo Sapiens
  misc_feature (127)..(127): n is a, c, g, or t
  misc_feature (149)..(149): n is a, c, g, or t
  misc_feature (1263)..(1327): n is a, c, g, or t
ttttttcttaattactatgtttaattcactgaacgcaagattagattgaggcatatgccaaaaacgctattgcaaaatgctttaagggacagtaaaaaatgttgtcatagtaacattatctttagantattgctgaacacaagactttnccctgaggtgtaaacatcaaataacttgaacagctttacacatcagccccattaaacagtttattacaacactacatctattgtaatcaaagtgatgctgtttacagacattatcatataaacatttttaacaagaacaaactactacaaaaacaagcatttacttgactttttttccaattgcttgcacatcataatggccaaatgtatataaccagtaataaagttgcaaaagctataactttttaaatcacacaggtttccttcaaataaaacagttaagcaacataaaaaataaaagtagagctactggttaccatttatgcagatttgctttattcagatctattcctgttcattttatccatgaatccttacaggttcagttcaatcacaagaagcaaactgctggacaagcgtcatttttcccccatgaagactgttttgtcttggaaggtgatcctcttccttcagcttctaacgatgacgatattcgcgctctcggtcacgctctcggtcacggtctcggtcacgatcccggtgcctctctcgttctctgcttctctctctgtaataatcgtcatgacggtctcggtcactatcccggtgcctctctcgttctctgcttctctctcctcgtgatctactatggtccctctctcttgatcgttcacgtcttgatccagaaccataagacttggactcaattccatgaaggcaatcttgcaaagaactaataagaactttgcaacgatcatcagcagatactttggattgtttaattaaagaaattgcagttaccagtgtctcaatagcactcccataatcaccagcactggcatcagacacagctctcgaaatagcactgcttgagattgccctatttctattcatgatttcttcaaattcagcttcactcaatggcgttcttgcagtatccatttcccttccaggggggccatagtcacccctatcatatggtggaggtcgcccatatggatctgttggtggtggacctcggctatctgatgtaggcatgccactgttagttggtggaggaaagaaagctgggttcacatgcggagctggcggtggggcacctggaggtggtccnnnnnnnnnnnnnnnnnnnnnnnnnnnnnnnnnnnnnnnnnnnnnnnnnnnnnnnnnnnnnnnnnatgctgcacgggaactgcccctggactgcatttcaaattgactcaggaactgtttattgcatggagttacaacaggattctgaccatgaagttctcttttaggtaacagatccattaacttttttgaagatgcttcagatccaacaccaacaagggcaaacccctttgactggccatttgctcgattttcaaaaaattttatctccaaaatatcatttactcccaaagaatgaactgcttcagttaagtcttcatctgttgtccaccatgttagatttccaatatataatgcaat

SEQ ID NO: 442067 - DNA, 1294 bp, Homo Sapiens
  misc_feature (233)..(316): n is a, c, g, or t
ttcaatcatgatttcttcaaattcagcttcacgtcaatggcgttcttgcaagtatccattttcccttccaggggggccatagtcacccctatcatatgttggagttcgccccatatggatctgttgctggtggacctcggctatctgatgtaggcatgccactgttagttgctggaggaaagaaagctgggttcacatgcggagctgtcggtggggcacctggaggtggtccnnnnnnnnnnnnnnnnnnnnnnnnnnnnnnnnnnnnnnnnnnnnnnnnnnnnnnnnnnnnnnnnnnnnnnnnnnnnnnnnnnnntggtccctgttgtggagtcggtgggccaggagggggccgtagcctggaactggaggtggagggccaggaggaagtggacccaatggaggctgcccaacaggttgtccaggaaaaagaacttgtgttggagggcgatctccttcgattaggaggcccagctagaggaggaggcagtacctgaccaggaggtggaggacctggtggaccaggtgggcctggaggacctaagggtggacgtggtggagtctgtccagctggaaaaggtgggggtggccctcctggtcctgctggcccaggaaatctgtccccaccaggaacagcccctggaaaacggccccgtcctctaccaccttgtggaaatgctgcacgggaactgcctcctggaggaccagctttaccttccccagacatttgtcctgattgtgtagttttcctggactgcatttcaaattgactcaggaactgtttattgcatggagttacaacaggattctgaccatgaagttctcttttaggtaacagatccattaacttttttgaagatgcttcagatccaacaccaacaagggcaaacccctttgactggccatttgctcgattttcaaaaaattttatctccaaaatatcatttactcccaaagaatgaactgcttcagttaagtcttcatctgttgtccaccatgttagatttccaatatataatgcaattctctttccagtatatgtatagacaacatttggtgctgctcctttacccacatcatcaccaacagttggtgggagagtatccatgtaatctcggtcttctggggcatctccattatttgcagatggagatatgacatcgtcatacaaatctatctgatcatgcccaccatattcagcttcctggttgaactcttcgccgacatccgcgtaaatgtctatgtggtccacgccgtccgccatcttccttcagcctcggccgccgccgccgcc

SEQ ID NO: 442068 - DNA, 438 bp, Homo Sapiens
  misc_feature (80)..(88): n is a, c, g, or t
  misc_feature (425)..(425): n is a, c, g, or t
cacttagaaaaggggtttacttgcaaaagatgcgaggagttagacggaaggactagtttgccacgcagtacttaaagggnnnnnnnnntcccctaaaattaccaggattaccggttgacagtagtctgttcatggtggaaaaacagtaactttctcacatggttattatactcacaaaggtcagacaaattaatgtcacaaaggtcagagattagcaaggtaaatattagggattaaactgtttaagggagtccagggaaatattcaaggttttattgttttggagatcagaaaatcaggatgatcctgcagtttttgggttatctccttttaagcttagtcatattggaagcaggcagaaggctcagatattgcttttacataccctcaagccaccgagctgctcgtgccgaattcctgcagcncggggatcgcact

SEQ ID NO: 442069 - DNA, 385 bp, Homo Sapiens
aaacgttaatgtgatctttattatacagcacatctggtatttgtgtatcccaacaagtatacagaatactctataaaaccaaacccaacccttcaatattacactaatgaagattaacccagagtcgcatctcttcaaaatgcacacaattaagacggtcctgctgtaacaatattatggaaagagccaggtagcacaagaaaggagagaggataaagactgaagtgtgtgccaaagtcattgtcttttgttattgcacttttattctacacacttagtatcttacacttttatttaacactgtaataaacattagtcctttaaaacaaagaaaaaacatacatgagagtctccgtcgaactgggatcctctagatcaccgcagc

SEQ ID NO: 442070 - DNA, 946 bp, Homo Sapiens
gggagcactgtgccattctcttgcctgatccagtgccattcccttcacttgatatctgtttactttagaggaggcagtttttgagaaaggatcataaatatcctggcccagtgccccaggagctatgacaagcaaaggaacatacttgcctggagatagcctttgcgatatttaaatgtccgtggatacagaaatctctgcaggcaagttgctccagagcatattgcaggacaagcctgtaacgaatagttaaattcacggcatctggattcctaatccttttccgaaatggcaggtgtgagtgcctgtataaaatattctatgtttaccttcaacttcttgttctggctatgtggtatcttgatcctagcattagcaatatgggtacgagtaagcaatgactctcaagcaatttttggttctgaagatgtaggctctagctcctacgttgctgtggacatattgattgctgtaggtgccatcatcatgattctgggcttcctgggatgctgcggtgctataaaagaaagtcgctgcatgcttctgttgtttttcataggcttgcttctgatcctgctcctgcaggtggcgacaggtatcctaggagctgttttcaaatctaagtctgatcgcattgtgaatgaaactctctatgaaaacacaaagcttttgagcgccacaggggaaagtgaaaaacaattccaggaagccataattgtgtttcaagaagagtttaaatgctgcggtttggtcaatggagctgctgattggggaaataattttcaacactatcctgaattatgtgcctgtctagataagcagagaccatgccaaagctataatggaaaacaagtttacaaagagacctgttatttcttttcataaaaagactttctttggcaaaaaattttgatttataagttatttggaaatatccttttgggaa

SEQ ID NO: 442071 - DNA, 1148 bp, Homo Sapiens
tataggaggtgttcaatacatatttgttgaatgaagaaaagaatgatggattaataaagacgttcatgcctaacaaagaactgatacacagtaatcaatgaaggggtatcaagaactcctatgcattattgcccaagattacagaaatagagattgaaacattagtgactcctcctaccatccacttctcataaggtctccctagctaggaaggagctccatctgttaccaaaggagcccagagggcaattctggatgaagaaaagctctcactttgcttgcttcttcctccctgctatttacattcagctatttccaaaaaaattcaagtgaaaaatatgtgatgcagccactacaaaataagtctaacagagacagtgatgagcagaatccacacaaataaaaaaggttcaaggacatatatgtctgccaatgacttttctgataggctaagtgaatgggaattatgagtcacctaaaatctaaaatgaaagttaatgccatctaggaagggatggatatttatggggattttgaggacatatattcagaaataataggatatatggaaagatatgtaggggctaaatcaagtgttaacctcagaaataccagaacgtgatcttagtgggagctgtctgttttccaatgcattgccagtatgctcgaataaagaggaaggaagggcatgagctcctcaagggggagtatctgggatagcttttaagcaaagtatagatagaaggtgactcaggaggccgggcaatgattgtggctttttgtgtagtctttcaactatggaggcatcgtgctggaatcccaggaagcgacgtctgtgactgggacctgagagccatcctgcgtggatgctcagaggtccacattcaaagtcaacctgtggaacacacttggcatgaaccaacaaatcaatctcacatatgcctcctcagaaacaatgttctgctagggattgcgtaaatatttcttgggtcaatgtaggtatatacagggtttccttcctagtggcacttatgggttttaagattttaaactcttagcaaaacgttttatataactgatattttgagatggtttctctcctttgtgtggactctctggtggatgcagaggctcgtactctgactgaa

SEQ ID NO: 442072 - DNA, 724 bp, Homo Sapiens
  misc_feature (139)..(139): n is a, c, g, or t
  misc_feature (161)..(161): n is a, c, g, or t
tctcatatgcttctgtggtctaatgtgtcattttataaatccatggcaaaatcgagtggcatcttgattttctgttgaaattactacttttattatgtacattatgtagcatatcctagagttttgaagagttgtacanaatggtgagtaagaattttttnttctgaatgcattttcaagtacctctaggcaaataaaaaataatggataggaaatagagacaatttagaagactgaggttcaaataaattaaaaccagcaatagaagcaatatggaactctgaatcaggaaatacagccagcagtgaattcgaattaaatagtggttagttataattaaacttcaaacaaaatttgtaagtcatgtataaggccactgaatggaacatataacaaagtttggattttgtgtatttttatttactttttcttcctcagctcctaccctgacattggtgttgttctatgagaagccattttgtatgacaaacagaagatagtttaagactatagtaatgttaggggctagaaaggaatcttggggagaaaaaaatcattaactcaaaatttaaccaatatccttctaaaagatggaaagtgatgatgatggcataattgctgtctcagcctaaagaaaacaaaactattgaacaaaatacctctgttctttccaaagccaaatgattttattgactattccaacctgcagcccgggggatccact

SEQ ID NO: 442073 - DNA, 939 bp, Homo Sapiens
cggggaggtttttttgttgttcgtgtgtaatgaattgaaaacactttaataatgtataatttgtccatgcttcaatttgtgtcactttagggtgatttattttccaggttgtaatgacatctaccgagattagctagatctaatgtttcattctgccatgccacatacaaaatacaattttcaaacaaagcttcccttctttacacaaaggtacacaagagtttgtcagacaaataaaataagaatacttcacacacgtatcaacaccatacaaggcattattcttcacacagtaacatctaatgtgttcttttatttttgaaacagcaggaaaagagccctttcccttcagaggaaaataaaaactttatctgttgcttaagccaaactccagggaggaaggtgtggtcctctggggaaagtagagggatggggatgtatggaggagaatggacgccccttcataagcacttcaggaggaaggaattgcaggaggttcctcggggacagtcacacagcttcccgatccttgcccctttcctcactgcacactgctcaccggcgtcacacatggggacttggccatacttcttctcatagatgggaacacgtttactcttgagcttcttcaagacttcttgcagcgcttcgatcagctccttctcgtgggaggcatcatccacggcagagtagatgtccagggctcggggctggagctcggcgtcctcctgggcacgggtacccaacagaggtagcatcagcagcagggcggcgcccaggaggggcagcagcctcacgcgggagctctccatcgttctgaaactcgtcgttgctggggcaccacgcgctcccaccttttatagtgagcccgagcccccgtgcaggaaagagggaggaggcgaagaaggaagggggtgtggaggagggcccgggtcaacc

SEQ ID NO: 442074 - DNA, 748 bp, Homo Sapiens
ttaaaaagaccatgttcttagttttcaaatcaagtgatcaactgtattaaccatagggaatgacttctataaaccacttgaataagaagcccagctgatcgattggtgccagaacatgaaggtgcaagtgggaaatggaacagaatggtggcatatggaaacccatcctcacattcgtgaagtcagtgaaattatgtctttcaagaatggtttttccaacagttaccatgttctcaaccagttctacttgatctttccttagagttctgcagtttccaatatgcttcttggcaccacaagataatgatgagttgctgctggtttgatatctttgaagcaaattaggtcctcattctcgcagtgcaggagttcggtgcccgggtcctgccgccccgcgatccggcagaacacgcaggtgctgtcgtagtccttgggctctggtgacttggcagcggcttcacaggtccccactgaggaaaccgtagtttctgcagtcgccgaggcctcacagtcgggggccaggccggcgctgcggttcacctgttcctccgccattgcacccgcccctcgcggcctagagcctcggcctctccagggctaccgggcccgcgcagtctccgcgtcccgcacctcctccgttttacctcgagacgtcgcccctcgcctgacgctgggcggtgatccaggctttggggagagggaaggagacgcggtgaggaacttcaaagccggaggccgccctcccgct

SEQ ID NO: 442075 - DNA, 830 bp, Homo Sapiens
tagacgttaaaagggacctagataccacttcatgctgaaccaagattagagaaatcttccactcttgacattttcatgttcgttagtttgttcaatgcaagtgatcagctgtgataaacccataggaagatgactctataaaccgacttggataagaagccaagctgatccactgggtgccagaacatgaaggtgcaagtgggaaatggaacagaatggtggcatatgaaaaccccatcctgcacattcgtgaagtcagtgaaattatttctttcaagaatggtttttccaacagttaccatgttctcaaccagttctacttgatctttcctttagagttctgcagtttccgatatgcttctttggcaccacaagataatgatgagttgctgctggtttgatatctttgaagcaaattagggtcctcattctcgcagtgcaggagttcggtgcccgggtcctgccgccccgcgatccggcagaacacgcaggtagctgtcgtagtccttgggctcatggtgaccttaggcagcggcttcagcaggtccgccactgaggaaaccgtagtttctgcagtcgccgaggcctcacagtcgggggccagtccgtcgctgcggttcacctgttcctccgccattgcacccgcccctcgcggcctagagcctcggcctctccagggctaccgggcccgcgcagtctccgcgtcccgcacctcctccgttttacctcgagacgtcgcccctcgcctgacgctgggcggtgatccaggctttggggagagggaaggagacgcggtgaggaacttcaaagccggaggccgaccccccgct

SEQ ID NO: 442076 - DNA, 772 bp, Homo Sapiens
gggggggagaaagagacctttattcagcaaacaggaagcactacagacgctgggaatccccctccctatgacaggggcagctcccgccccctcagccccgtgactctggggctgctctaggtgtttcctgcatctgccccctcagtcataggcctcatcttcatcctcttcctcatcaccaaagaagaaagtctcttggtccaggttctcagactcatcgtaggagaagctgtcattgtccagctcctcatcaaactcatcctgctgccactcgggcacatcatcctcatcgtcttcctcctcctcttctgcctctggccctgaggaggcctggggctgactgccaggcatgttgggtccttttgcctcccaggcctctactgatggactctgaagaccaacccggaaatcctgggcagaatgctgcaggatggcaagcagcctctcctggatccgccggagcagctccatgcccgtgctgaggcagtcggcccgcaggaggcgcagggaggaggccaggtctctgcaccgcagcagggtttcctccaggaggatgtgcagggcattggtgtgcagctccaggttctctgtctgctgctccaccacatccatgtactctgcgtcctggctgtagaagctgtacacgcaggcgtaggccagcaccttccgagcctgctccagtccctggcaggcatcattgaggaaggtgaaggatctgggcgggggcacttcatggatggcagacacccggttccgcaagttcacagcaaac

SEQ ID NO: 442077 - DNA, 701 bp, Homo Sapiens
  misc_feature (269)..(293): n is a, c, g, or t
  misc_feature (646)..(646): n is a, c, g, or t
  misc_feature (663)..(663): n is a, c, g, or t
  misc_feature (691)..(691): n is a, c, g, or t
ttttttcctctaaaatacttagctttattaaagacatggtactaaaaataccagattccaacatttgctctatttctacttatatatcataattaagacagctgttgatgcaagacacactctttcacaatctttccatatgcacccaagcattcttgtatcagaataagctgtttaccagcccaaccgtatgtggctgaatgattaaaatgaccatctatactttacatagtaaagcatcttccaaaattttaatgtacacagtgacnnnnnnnnnnnnnnnnnnnnnnnnncagtaattctgaacacatgaagagtgattaagcagcttcataatcaaatcaggcttcattacttgcaacaagggcaactctttccattccccactaaatactaaagtttcaatcttattaacattaaaagaaaactcaagttgaaaccaagtaactaacatgctattcagctttttagatctaaaaaagtaactcttcccatgaggtaaggcaactgagtaatctgattgtattagattgcattaaaataattatacttaacttttaatacactaattaaaaggtattacttttttggaaatacaacaataatgagttcaggaaaccacaagttatagtactgggggaaaaancattagcagtgctgggnccttttactatttggcatactttccggnaaaaaggtgg

SEQ ID NO: 442078 - DNA, 894 bp, Homo Sapiens
gtaggagttttcaccatcttcggacagagggaaatatttcggagtctcctcttggaacaccagtttcgtttcgccaactgctggatgccctgaatttattttgtggtaatatttcactccacactgtgatagcatggcaaaagtcctggctgtaaaagtgttctctccagaggctttccaacatggacaatcggactttttaggtgctccagcaaaccactaaatttaaagtactagaagacatttcttttcttgttgggttaacaacatattctccatcgattattcctattcgtactgccccaacaggtccattccaaggaatatctgataatgagagggctacggaagcgccattaattgctaggacatcaggctcatttacaccatctactgctaacagattacacagaacctgtgtatcatagaagtagccagctggaaagagcggtctaattgaacgatctattattcgacttgttagaatttctttatcagaagtaccaatctctcttctcagatagtttgtgggaattctacctgctgcagcagctttttgtctgtagtcaaccaccaaaggcataaactgggaaggggaaggttttgttttactgaccgctgtgaccattactgcagtgtcacctgactgtactacagcagagccatctgcaaatctggccagctttccagaagatatttctaatttcctgttgcctaagtccacggccacagctcgagaccctgcgctactccatagtgctcgcacttgcaactgggtgagtgcccgatcccgccgtggcagaaggaaaggaccatcgctcaggggccggagccggaggcacgagcagcagtacctgcaggccgccatgacacccggcacgcggtcaacccgct

SEQ ID NO: 442079 - DNA, 525 bp, Homo Sapiens
gtttctttgatgcgacctcaggaaggagatgagggccggtgcataaacttctcccgagttccatctcagtaaaagggaagcaggaagaccaagaaggtacgaagatggcacattttcacatagctgattttcaaccaaatgaaaaaaatcaagtgcatttcagaagcttttggaagagcagcttaattcctctcagtcgggaaatgttttctctgccttctgctttgcttgcaccaaacatttctaaacacttgttctgccatctacatgggaggtgatgaaactcagtggtaactcatgatttatgacattgaaaataaagaggaacattgacctgcagactatggtttgtacaagaaagtttgtttgaatgtgtagaagaggaaaaagcaacaacagcaacaacacgaagatgataccaaaacaaggaccacaaaacaactagccatgatgggagacaggagttttttacatggaaacatggcacttgtgtttttatgtggcaagatctttatccataggcag

SEQ ID NO: 442080 - DNA, 697 bp, Homo Sapiens
cactcgcgtactgtgaatttgggaggaggtaaagttgacttctcctcgtgggcagttttccaatcaccttgtgagtagacacctgccaatattgtttgaaacctttttttaatatgacatcctctcttgtcattctcttctcccctttcccacagacttccctcctactgggtccaggttcagaaccaagacttctgtacctagtgctgcctgattggtgaacattgacttcaagtagcatagcccttgtgtgactcacaactccgtgtccttcctaaagtttcgggaagcagggttgtctaatatgcacatttcttattttggtcatatttttactttagtgtcaccttttacaaagtgactttgtactcatttagggctctatcggaaatgcttccattttgcctttcctacagttaggccaattttgaaatatataaattctatgcaacatttatgttgagttaccaatggaagccaaaagttctcttcccaaactgccaagaatgatacaggccataattgaaatgggaataccttttaagtttcattaggggtggggtgggagtgggacaggaacaagacttgcctagatcttttgtggatcttggggacttttactttggtgtttgatgcttaaactttcaaaattctctgtattcaaaatttgatgtggcgaatctactcaaaaaaggtt

SEQ ID NO: 442081 - DNA, 1284 bp, Homo Sapiens
gctggagctgttggagccactgctgtgtatcctatcgatcttgtaaaaactcgaatgcagaaccaacgatcaactggctctttgtgggagaactcatgtataaaaacagcttggactgttttatgaaagtgctacgctatgaaggcttctttggactgtatagaggtctgttgccacagttgtcgggagttgccccagagaaggccataaaacttacagtgaacgattttgtgagggataaatttatgcacaaagatggttcggtcccacgttgcacgcagaaattcttgctggaggctgcgctggaggctcccaggtgattttcacaaatcctttagaaatcgtcaagatccgtttgcaagtggcaggagaaatcaccactggtcctcgagtcagtgctctgtctgtcgtgcgggacctggggttcttgggatctacaagggtgccaaagcatgctttctgcgggacattcctttctcggccatctactttccgtgctatgctcatgtgaaggcttcctttgcgaatgaagatgggcaggttagcccaggaagcctgctcttagctggtgccatagctggtatgcctgcagcgatctttagtgaccccgtgctgatgttatcaagacgagattacatggtggctgcccggggctgggcaaagcacttacagcggagttgatagactgctttagaaagatactgcgtgaagagggaccaaaagctctgtggaagggagctggtgctcgtgtatttcgatcctcacccgagtttggtgtaactttgctgaacttacgaattgctacagcgatggttctacattgattttggaggagtaaaacccatgggatcagagccagttcctaaatccaggatcaacctgcctgccccgaatcctgatcacgttgggggctacaaactggcagttgctacatttgcagggattgaaaacaaatttggactttacctacctctcttcaagccatcagtatctacctcaaaggctattggtggaggcccataggaagatcagccctgggatagtgctgtctttttgtgggtactgcagtaaagaacatccctcctgggaatgaagcaatgcttcatcccttttacgtccatctcttgtttaaattcaagtccaggtttttttatcatgtgaaatcattcattttctgggtgttttctttaaccagatcattgtggaaattatttcattatttatttattttgggccctctgcccaggaaacctttgttttgcattctggaaaatttgatgggga

SEQ ID NO: 442082 - DNA, 1086 bp, Homo Sapiens
  misc_feature (20)..(20): n is a, c, g, or t
aaggtttcctccccctgtangtggtcctccggtgaacccttccaggtgaagaacttttgtgtaacactttgttgcatcccctcaaaatcacatctgtggaatacgccgttttcctggagtctggggattcagaccgtctctggcgtcttgtgctctcaatactaaatggtgaaattgaacaaggaaacttttgattattcattcgattgccccggacccttgatactggggacggatgtacctcttgtactgctctggctatggaaagggccgtagatccagtttcattaacgctatctaaggtcacatttggcaggtcatcatcatcactgtcacttttactttgtctgggagataggcctcgggggtccatttgtgctttgccatggcctctcccatcctccaaaagcggcacgacaatagtgttgttcacatttccaggtgaccttacagctgtgtagacaacaggcaccgactgtaccaccacggggatgcggtgaacatgactcagtttgttagactgtaaattcatgggacttgaaggcggtacgggatggataatgtgcaaatcctgctggcctcctacaccagatgcagaggccacaaggggccctggagttaatactgttgacgaagatgacgctgaagatactgatgtgataacagcttggggatgaggctagacgacctagaagacgatgaagaggttgaagttgaagaaggtgaggagtcagatgctgtcatggaaactggggaggatgaaacggcagtacggggacgttcctggctttgtttattgacaagtccactggctcagtttgtgtttggaagtgatctacagataacgagtcctccgggggctcccctttcacattatttagcaacaggggaacggcttccatatcgactctgactgccggcatcccatcaagcattaacattctgttctcaaaggtgttgatattctttattgtttttctcttcatatggatattcattcatccatttgttcttagagtcacattgatcctgaacagaagctgcagagcaggagaaattgttttctttccctcacacagagtcccc

SEQ ID NO: 442083 - DNA, 489 bp, Homo Sapiens
aaaaattccacacaggcaaatctactgccttgttagtccaagttgcagtgacaagcttatagaaaggacaatatagctgttctcctttactttatgtactctatcgagagtttaatccacatttttaaaatcacacttataaaagaggtttccgggattgcctccgaggatgagctgtggcagagttgggtctcatgaagggtatctgacaagattttcattgtctccagttcccttgcaagttgcacattcagttcttaaatcttcagccttgggcttcttttgcaacacagactgtctttgtcttctctctctaggaactctttcctcatgtttttcttcctcaggaacgaagcttcgttttcgtcctctggttctcgtgtttcttatcggaatcttcttgggttctggtggcacatcctgtggaacaaatttcactggttccttaatctgcctccttgatcgtttggttccatctggtagggtttc

SEQ ID NO: 442084 - DNA, 1200 bp, Homo Sapiens
  misc_feature (892)..(892): n is a, c, g, or t
ttcattttgaatgactttattgagaacattttgcaaattagattttacaatttaacattttacaattagaaattttatctgctattacataagctgcaaacttttcaaaaacactacagaaaatcttttatttctttggatttttctgttccatgttgagctcctgagatatattttttctttcagcttcattttcatcttccttggaagatgaagaatcacattcctgacatatccatccgtagcctgtctgtttaggagactttttcaaaggaggatccaaacagccaaaatggtagcagagtctgcattcatcacacctgacaagattttcattgtctccagttcccttgcaagttgcacattcagttcttaaatcttcagccttgggcttcttttgcaacacagactgtctttgtcttctctctctaggaactctttcctcatgtttttcttcctcaggaacgaaagcttcgtttttcgtccctctgggttctcgtgtttcttaatcgggatcttctttggttctggtggcacatcctgtggaacaaatttcactgggttccttaatctgcttccttgatcgtttggttccatctggtagggtttccatggccatatctgcttccatgtcactgctccctgccttggtcacattccgagcactgccaataactgtttttggtctttcttggcatccttgtaagaggaggatccagacatccaagatggtaatgtagtttacaggtatcacacaataaaagaagatgctgatcatggttcttcttacaaatcccacaactataaagtactgcaggaagagtagatgtcttttgtgtgcctccttcttttttacttggttttctctccttgggtgctcgcaaaattgccnggtatattcaacttctgccctgtgattctgcctagtaaagcccatattccttgtccttcacttcgaagttttccattcaggttttgtagttcttctaaagattcacatagcttattatattctacatgaagcttttcttgttcattctctaatttatcttttatattcttttgttcagccatattttcctgaatttgaatcatgcgcatatttctctcaaaataataattcacaaaatctgcagtgagagctggttgcttatgttttctccttccatccacactagaactagtatctgaattgtcccc

SEQ ID NO: 442085 - DNA, 649 bp, Homo Sapiens
  misc_feature (13)..(13): n is a, c, g, or t
  misc_feature (86)..(117): n is a, c, g, or t
ttaagctggactnctatcgcggtggcggccgctctagaactagtgcgatccccgtgctgcaggaattcggcacgaggccccccccnnnnnnnnnnnnnnnnnnnnnnnnnnnnnnnncctggtaagagttggtttctttttatttggaaataactatggtcaactttcattaatgtggaagttgactgataatgttaagagtcaaagtgaaaaagaaagccgatacccatattcaacagtgctttcagttacaacattttttgaatttccttctctaaaacattcacagcagaggtgtccatttcacttgcctgtttcacctctagataccaccacagttgctggggtcatgtgaggtaaaggaatatatccaattgactgttagcccaacatgactatctgcaattctgatagaaaagctactttcagccatgtcttacaaagtgcttaaagctggacagaagactttaaataaagctaaaatcgcttattgcctgagttgaacaagttacaaaccacagctcttcctcctcccctgctgtctcaccaccaattagccttcttgtgaggacaacattagaaatggaactggtttttgagccaagaaacataaaaatttaggtgttcttagccaagcgtggtggctcat

SEQ ID NO: 442086 - DNA, 1388 bp, Homo Sapiens
  misc_feature (429)..(663): n is a, c, g, or t
  misc_feature (687)..(695): n is a, c, g, or t
cccactagaacagaaataaattttaattcattgaaaagtgcagcagtgaacagggtccttttgaagggcactttctaagtcaaatgactgagatgacacagagcaagggcagaataggaacagaggatgcaaacacaggaagttacaaaattcagtgggaactaagtggtggtaaaactcaagaacccaactctacccatctaattccattggtggatcagttgaattaacttttgctttctttaggatgaatcctgggacaactttcctttaaaaaagcactaaaccttagtttagacacttaataagtttaagaacacttctcacagaataaggtaaaacttccatggctatcattactattttgtacaacagccctagtgttgtcaattaaaatgtgtttgcaggccgggcacggtggctcacacnnnnnnnnnnnnnnnnnnnnnnnnnnnnnnnnnnnnnnnnnnnnnnnnnnnnnnnnnnnnnnnnnnnnnnnnnnnnnnnnnnnnnnnnnnnnnnnnnnnnnnnnnnnnnnnnnnnnnnnnnnnnnnnnnnnnnnnnnnnnnnnnnnnnnnnnnnnnnnnnnnnnnnnnnnnnnnnnnnnnnnnnnnnnnnnnnnnnnnnnnnnnnnnnnnnnnnnnnnnnnnnnnnnnnnnnnnntgacaaccgcgagacttcatctcnnnnnnnnngtgtttgcaacagcaccatttgtcaaattcaaagatgctcaaaaggtgttccctactttgcatgagagggagagctttgtaacaggaaattgtataaggcaaactctctattcattcctaaggcctctgttcattcctaatgtttacatggttctctactctgaagggcaccaacatggacctcaccttcttaacatggaaaatcaaaatctaaatgaatacaattaaaaggaggcagcaagcttcttgcagtgggtcccttaaacattatgaaaacatcagtgcattgtgtagtctgttacgctataaactgaggtctctttatgaaagattattttagcacaaattcagaatgaagccagtccaagaaaaaaagaattggaagctatttgaaggttagataggaaatataccaaaaatagaagagcgtagagagggctgcaccacatcctaccacgcaagcacacccactgaactgagtaagagtggcgtggctgaggtgccgcagcagctgactatgtcactcttatgagttctgctcaggaacaagcataaaactgaataatatgacatcacagtccaagacctggtaagagttggtttctttttatttggaaataactatggtcaactttcattaatgtggaagttgactgataatgttaagagtcaaagtgaaaaagaaagccgacc

SEQ ID NO: 442087 - DNA, 790 bp, Homo Sapiens
tccataaccatatcatggtcccaatgtaaacatgttgtacgtatatttcttatcatcataaaaattcctccaaagacgaattttgccatccatgtgaccagatgcgatgcagtcttccgttgggtgacatgctacacatgtaaaattgtttttagcatgcttcttatttcttgatgatgataaagtaaaccttgatgttgttttctttttgaaaaaataaacagacaagtaaaattcccgtactgcagcaacatatactccctcgtttccaaaggcaatgcacttgggtgactggtttatgtaatccaaaacaaaggacagctccttggcttctacttcctggcttgaggattttggcagtttcactgaaaccagctgaaatatatctggtttttctttattcactataacaaagacagaatcctcagcttgggcaagagtaaagagggcatgaagtttacatccaactatgaaagtctttattaagatgccatctatatagtcccacagtttaattgtgccatcaagggaacaagaatacagctgtagatggttgttggggttaagctggattccagtcaccagatttctgtgtccatgcagtatgtgtacacactcttctgtaactgtgctgtaaactttaacaaagtctccagagacacagaagatatacttagaatctgcagagaacacagctctcctaaagttcaactcgctgccgccacaacgaaccacgcggatgttctcctcctccaccatctttgcgcagtagcggaatggccaatctctg

SEQ ID NO: 442088 - DNA, 469 bp, Homo Sapiens
ctgcatttcaagtgttggcttattcttgttctttatgagtacctcaactagctaattaaggactgacttctgtttctcctttccaggaatgcatttattccgaaggatatacttcacaaagtaaatacatttggtataactgtggctttttaaaaaatctaacacaatgtagtaagtttctaactggcttcttttgtcttcgttaaaaaggaagtgaagcttcttttcgcttgtgatttgttagctgagaaaactaatatttaaattctgttcaactatttgagaaatcaatgctggatttcaaataggaatgataaagattgcctttttattagccacatagttgctcaatctcataacttgtatcatttctggcttctgtccctaaaaagtatagataatccctaacttactttcgacttaatgatttttcaactttacagtgggtgtattgagaggtaaccccatc

SEQ ID NO: 442089 - DNA, 1192 bp, Homo Sapiens
cagctcgaaagtcgctatttattttattacccattatgaatcagccatctcctgatttatcttttacagttttctatgttttgaattgatatcaattcttagaataaaatgcagtacctgcatctaaaatagaatttatttttcttgagacacgtctttcaggcagaggaaaggtaatgggcacacaaaccttgatcatcttcttataaaacaaggcagcatccacatttcaatactgtagcatatgaaataatttctcaattcctactctgtcatagcttaaatgacttactgattaaaatatgagtaacaataactttaaatttaatgtcatgtagggtcactaaaaacaaaatgtaagggataaatgtaagtgcataaaacagagataataccaatttccacaaatacaacttttattatccaaaatcatcttggaaggactttttctaatatgcccattttctaaataagattaaccatttgatgggaatatttccaattgtatcacctccttccttgactttttcttcatcaacttagggcctgggttgtaggcactgtggctctttgggatagttaaatgggtgcaatttggctgagaccgcccctgtcttaaatggcccaggctacagggcttgccaaatggctttggtttgcaacctcttcctttgatatccattgaagaacacatgtcctaccctcttgattgcaagcttctatctgctattggctatcaggagcataacagataagttctaaggtccttccagttccaaaagccattgaccaaccctgtgaggcactatgagagattggagattactgaggaatctcttccaataacatatgatatataaaggtaattgtgattctatgaagagtgaataaaaattgaaaacaaaaccaatcttgtttaaactattaaatgaagttttaaaaaataatggagtgggtagatgtattgcctatcaaattaaaattcagggaacacgtgtcagttatcaccttcataagtatgatctataaggttgaattaactaaagatctaaccctaaactaagtgagatattactgggttactaaatatagatgaatggcttcctttttcctttaaagatggaagaatcccaaaagtatgcctgaatcagaagcagaggactcatgttctaatgacacgtctgatcatcac

SEQ ID NO: 442090 - DNA, 654 bp, Homo Sapiens
  misc_feature (15)..(15): n is a, c, g, or t
  misc_feature (34)..(34): n is a, c, g, or t
  misc_feature (61)..(61): n is a, c, g, or t
  misc_feature (173)..(173): n is a, c, g, or t
  misc_feature (190)..(190): n is a, c, g, or t
  misc_feature (198)..(198): n is a, c, g, or t
atcctaatactattntgtgagttggtatatatcnagccctatttacgagagggtaaaagtngggacctgaaaaggttaagtacttgcccaagatggtgcagctactaagtgtccataagtcatcaaatgctgatgctcatctggtttaataaactttttttccaccacttganataatattataatttgnaagtatanagtctgaaagtttaggttttcatatggcccacagtcaataagcacttttcaagaaatattgaagaaaataaatgagattattagtactaaaatttctctactacatcaagaatgcctgaattacttcccatatgccaatatgtgatacattttctcacatttggactcaactccaccctaacaaacacaggcaagatgaatcaaacttaaaaaaaattactttggcttttttttctcatttggaaggtaactattagaaaagaccaccaaatattataccaagtattatcattggggagagaattctgatttttaagaagtaataggcatttagtggcatgattcaccaaatgcaaaccctggggatccaagtccagccctaagatgacagtgagcagccacactggctgatttcttgctgggaaagaaggccagtgctgctgactcgtgtcccag

SEQ ID NO: 442091 - DNA, 878 bp, Homo Sapiens
  misc_feature (577)..(590): n is a, c, g, or t
acagttagcattctgagaagcgatctaacaactggagttgtaataaaagtacgcttttggtcacttaatagccatgggtaactttttatactatacgattgttaaaataatttggttacaatgagagaattataacagacccgaaatgaacataagtatatgcttctgattgaatacaaagtcattttgtatcataaaaagaagaaatttatttgtctgtgtactggcctcccaaaagatcgaaagcattaacaatttcaatttttccttaaggtttcaacctagtgttatacttttatgaagttattgtatcagttgttaaaaagttgaagtacattttaagtaagcgaggaaataacattctaatcaaagtataaaacagaaaaggatagtcgtattagttccagttctgaagaaatagctagcagacaattgtagtttgtctttgagcatgttgtgacaacttcccaatgttgcttgttcccttggcatcttgaggtattcagcatctacttctttccatatagacactggtacaaagtgcattttaaaattctgtattatctcagcctgccannnnnnnnnnnnnnagatttgggataggacatttaagacagttttaatgtaattctaaaagtactccaatattgttaacctgtggttttatacttacctagtttgtacatttacttaagtttgctcatttagtctaatgctggaattaatctgaattcaatttaatttggcttttcccatatataagatataaaaatgtgaaaatcataggaattatatgtcttacaaagtattgcacttgagttcactgcaataatgtatcatgatttcatttacctgaggacaatcctgattcactaggt

SEQ ID NO: 442092 - DNA, 1016 bp, Homo Sapiens
  misc_feature (226)..(226): n is a, c, g, or t
  misc_feature (240)..(240): n is a, c, g, or t
  misc_feature (308)..(536): n is a, c, g, or t
agagttaggaattccagaaggcccttagacctaaagacttacgagggtttgtgtaaggaagttacgtaacttcaggcctaggcgtacgtagttctcctcgtctgcacgttgcgcttcccgcaagttaatggggtccttagggtcgattagtcttaagccgctttaagtgagtcacgtcttatagtgacctggtccagtggacacattcaacctatctggtcatctntgattataggattntgcgattcggctattggtcaaaatgagtgatttacaagatttacgggattttacaaaatataacgctnnnnnnnnnnnnnnnnnnnnnnnnnnnnnnnnnnnnnnnnnnnnnnnnnnnnnnnnnnnnnnnnnnnnnnnnnnnnnnnnnnnnnnnnnnnnnnnnnnnnnnnnnnnnnnnnnnnnnnnnnnnnnnnnnnnnnnnnnnnnnnnnnnnnnnnnnnnnnnnnnnnnnnnnnnnnnnnnnnnnnnnnnnnnnnnnnnnnnnnnnnnnnnnnnnnnnnnnnnnnnnnnnnnnntgtaagctttttaaaatataatttaaaactattttgtaccagtacaatatattaattttacaaatgtaaaatttttatcagctgttaaagcatttgcaaaaaccacacattctacttcagctttattgcacaatatctataagaaaatattaatttttaaattagaaaacataaaaatgctttcaatatagaagagacaatctgattttaaagacaatactctataagaatgtctactcagaaaataacaaactttcacaggataccagctggacagatgcttcagcagatccggtacaaagcactgtttaaaaccagtccaagatacttaatccaaactgtatcatgattcttcattagaaatctagacaccactcatggtggtttcttacactttaaaaagttgaggcattttcagtgtgagcattctgaatatctcttacatatcaaaaacaatacttccaactcaatagccatttg

SEQ ID NO: 442093 - DNA, 806 bp, Homo Sapiens
  misc_feature (785)..(785): n is a, c, g, or t
taattccccgtcttttcaggaatgtatgtatttgcattaaatttcttagttcatatcttgactatttctagagagagtggtcagctgagtgcatactgtccactgagagggattctgcaaatgcccttggcgtccttaaacacaaaaaccttctttcccatcaaaatcccagttgggtgaaaacttcactggccttacaatcaatgttccagttgcccatccactgaatttggtcctcctaaaattagattataagcttcccacctctatttgtcactaaatctcaaaccagaacatgacgggttaagtccatgattctgtgtcatactgaaccccgtgtattgacaagaaactgctttggtcataaaaacataaagaaaacgtacagcttctttctcagaaccatgacttaaccattccagtaatcttaatatgcaactcacaagatgctaggagactgagaattcaaactggcatactggcccatggaattattcatctctttgttcaggtagaggaagcaaaagttaccaacattaaaaaaaatgtttttaaagaacaaatacaaaggttctatccaacaagaaagaacatccagttttgtcttcccttcaaggccacatatgtcctgttgagtccaaagcatccagtaagtgtgcaggatgggcttcagctagaaggccactgatgagtaagcttctagtagtagctgcctaagtgtgaaggcacgtgggtgttaggatggcgggggacgttggggttggggtagattccccatccctacntcccgggccggtaccagctgg

SEQ ID NO: 442094 - DNA, 436 bp, Homo Sapiens
atacttaaatgttcatagtaacttttatttttaaaataataatagtctgtatcttgaatgaacacaaacgtctatgcccagttgggtggattcagacattctggtatattcatgtaatagaatactactcactgtggtaggcagcttctacactagctccttctgatctcagcctcctggtattcactacattgtgtaatcccctcctgttgagtaatttctttctaattaataaaatatctcattgctaaggggatgtcatttctgtagctacattactagagattgtagccaactctctcccttgctggttttgatgaagtaaattgccaccttagggaggcccacacggcaacaaactgagggtgaaatctagctaatagctacctagttatctgaggccatcaatccaactacccaagagcaactgaatcct

SEQ ID NO: 442095 - DNA, 379 bp, Homo Sapiens
  misc_feature (364)..(364): n is a, c, g, or t
aaacagctggcctgacctagggtatacacagctggttagtggacgagctggttaacagcaagcgtggttcctgccaaggctgttttcaacgtgctatactctcaacacgggagcagctacacaagacgacggggcccttcacacagccacacggaccctgcccactcagcttggggaggttctacgtgctcccaatgaggatggcagacaagccacacttcaatgagagtaacttgctaggttggcctctttatctgattttaatggccaaatactcatgtaacatcggcccaggtaacatttgttctgagtttcaaagaccacatcagtgcaccaaggaacctcgtgccgaattcctgcagcncggggatcgcactag

SEQ ID NO: 442096 - DNA, 746 bp, Homo Sapiens
ccaaaaggctggattgcaggcatgagccctgtgccagccaggaagtcacacacttgagtataacaaaagttgcaaaattaatgctttaaatttcagcatgaaaggccagaattatttggctgttgaactggtattctggtttagagattattccattaatttaagattcccaactttcccaaaagtgttgcaaaatcaataattaaaggagaaaatattgtttaaggtaagggtgctctaagtttgcaatcaagctcaatattggacttttctaattttcatcagcatacaaaaaatattaactttgccaagcaacattattgagagaacattacaaaatccttacttagctaagggatggttcatgcatttttatggaaatatataatggtaagttctcaatgtgaagttttccatggggataatgcaactagtgaaacaaagtcaaatacatttcaaatgataaaatggaaatcttgtttccttatacagatagttcctgacttaagaggatgtgacttacagtttctcaacattacaatggtatccatacactactatttttcaccttcagtattcaataattacatcagatattcaacacctttttataaaatagatgatgcattagaatgtgttctgagaatgtttaaggtaggctacgctaagctatgatgtttggtaagttgggtgtattaaatgcatttttgacttacaatgttttcaacttacaatgggtttattgg

SEQ ID NO: 442097 - DNA, 592 bp, Homo Sapiens
  misc_feature (48)..(118): n is a, c, g, or t
aggcgttatattactatgttttaaagccagaaaatggtgtttaatagnnnnnnnnnnnnnnnnnnnnnnnnnnnnnnnnnnnnnnnnnnnnnnnnnnnnnnnnnnnnnnnnnnnnnnngactgttgtgctagcgtatctattcttggtcgtcttatctctaatctgctccatcctttatactgtgataagattaagttgtttaaaatagggctcttatgttgtcatttccctcctcaagagcctttcctttggtggtgttgtctatagcatcaaagaagagcccactcagccctgcccttccaggactcctgtgatgtggacccgtttcacctattcagtctcctcccactgttcctcagtgtgatgttcttattgtctgggacattcaattgattcttacctctttgctgttccttctacctttctgccagtctgaattcttgaaacacttaagatgtgtctcataactaacctctgtatgaaatgtttcaaaactaaccttatccatagtgagctttcctttaatttgattacctgaacgtccctagcatagaaaagaaaaaagaagaactcgagactagttcctcgtgc

SEQ ID NO: 442098 - DNA, 1045 bp, Homo Sapiens
actttcttgaatttatttttatttcaatggttttaatgaatatttccgagaaagttcacaatactcatttttatgtttcaatttatattcaaatttactcaaagataatatcacccggtattattagagaagtctctctaaatactagaactgacatttcagatccatttgtaataatactgcccccataaaatatgcataggttacagaagtttatcttgaatagtcctcctgctcctcatccctgactttgatatattacatcttggcaatttctggcaatcaattctaagacaatagacaaaatttcagccacttcaacttctaaaataaccactaaaaaatacaccaaaaaataatgtgggtaagcaaagcaccatgaataaaaggaaaatgggtatttcattaacctaaaattatcttaatattcttaggatcacaatatttccttgggcaatttgaaagtgatctgaaaattataaggtagattatgatacatgtatcaacctattcttatcactgcaatttagacatcaggacaaaaaaaatagcttacaatttctcaatagttgagtaacaccatgctggtttttactataactgatgacaggtaaagtgtggtaaactggatgcatgtaacaaacatgggaggtcgtaatatgtttccaggatatggcatcttgccattggccacagcctcttggaaccagataaagtcactgaaatagttacagatgttagccatacttggaactataacacagttcttattgctaaaattatgtaggtccgatggagattggctttgggtcatacatactgactttggcaatgagttgtgagatcagaggctatgtataatatgaggcccacatctgatacttgcggagccataagtatgacattttcacgggttagctgcttatcagttcaccgattgactgtggaaacacgccttcccccccattaagttccttgaacaagaatttccgtcaaatacgttttacccccgaaccagagatcttgacacaccatgagagctcct

SEQ ID NO: 442099 - DNA, 1069 bp, Homo Sapiens
  misc_feature (350)..(362): n is a, c, g, or t
aagtggctggggattaacagggcgtgaggccacccgtggcccagcttttccaagtttcctaaaatccatgatcccatagtaaaaaacattttacacatatcttcatacaaagtatatgtatatgtggtatacgtacacactatagttgtatatgcattatagctgaaaaaccagttcaacctttctacatgtggtatgttccaaaaattttaaatgtctttctaaaatgaggctcttttaatacgggtattactcaggctgtaatagtgggaaaatatttgttatatgataaaagcagcatatatcatttctgtgtaaatgccagtatgctcaagccatttatgcagagnnnnnnnnnnnnncactgcattaacattttaagcagtccccttcccgatttgctattatacaaagtttgtttcttttacattgtaaagtgtatacaacttataaaaagactatactcaaaatcataaaataccagttaacttagcttctcagtttacagtggccagtgtggtgtgctctaaacactgctgcctgatccctccctctgctggtcagatttattactataaagtaccaatcccatttgtgttgtcctcaattggcaattatgaatggcagtgcattaaccattcaattctcaccactccatccccattcttctacttctgggtccttttgtccctccctttccagacagcccttggtaacctgctgctgggtaactaaggcatcccacaggtagtgttgaggtgttaggtgatagagtaaacctctaccttaatgctattaacagggtccaaaaatccagttgcatggaacatggagttatattattacatggctaatgaaaagacaggactaagtctgttatagagtatgggactaacccccaattatatgtgaatttgtgttatcatatggtttcagtgtactgagctaaaaagcacattatctgaggtgcaatacaaaggttaaagaggttaaagatccccttgaaggatgtgcaaaatgtgaagaaaaagatgaacagtgtaccttggactggactttccatcttgag

SEQ ID NO: 442100 - DNA, 435 bp, Homo Sapiens
atttattgagcacttacttgaggatggtagttcaaagtatagggtgatgttaaaagatgaataaactccagttctttgctgaaaatctagcggattaaataccaaaaaaaggtatataaatagtacaacttgagtactgatgaggatgttcctaactttgcctggggcttatggggtgagatggggataccttagaattagattgagggttgcaggaagaacattgtaggctgacgacatattgtgctcaagtggcgtggaagcattgacagtatgtgttgtgactgatcagtatggccagagcatagtgtatgtatacagaatatggtagcaggagagactgaaaagataatttgggatcagatcctataatgatcatgcatgtaaaacctagaaaggatgatgtttagcagcagcatgaagggtggattctgg

SEQ ID NO: 442101 - DNA, 649 bp, Homo Sapiens
  misc_feature (130)..(130): n is a, c, g, or t
  misc_feature (145)..(178): n is a, c, g, or t
tgttggtcaagatatctgtaccccttctgttttattccaatttttcaagtctttagcttgcctgacacataaacagagtcccttgtaaaatctccaacctctcagttaattataatgatgtaggaattanaaagagtgtgtttgnnnnnnnnnnnnnnnnnnnnnnnnnnnnnnnnnntgaggatggtagttcaaagtatagggtgatgttaaaagatgaataaactccagttctttgctgaaaatctagcggattaaataccaaaaaaaggtatataaatagtacaacttgagtactgatgaggatgttcctaactttgcctggggcttatggggtgagatggggataccttagaattagattgagggttgcaggaagaacattgtaggctgacgacatattgtgctcaagtggcgtggaagcattgacagtatgtgttgtgactgatcagtatggccagagcatagtgtatgtatacagaatatggtagcaggagagactgaaaagataatttgggatcagatcctataatgatcatgcatggcatccagaaattgaaatcttcactattgtcagtggaaagctatcaaatgtttttaaaacctagaaaggatgatgtttagcagcagcatgaagggtggattctgg

SEQ ID NO: 442102 - DNA, 700 bp, Homo Sapiens
  misc_feature (539)..(591): n is a, c, g, or t
gcttgagttatcacctcctccaagaggaggtgaccaccatatctaaagttgccacctctcctgccttactctccaacagaatataacagttttaaatttgttttttcacttaccaacatatcatgagcaacattccagattgatacatatgtatcttcattgtaatttttattgtccataatttcataatctccattttcaaatggacccttaaaactgcccataatccttctgtttcttcaaaatctttaggttttctgcctttggtgtccaatctctttgtaaagtggccccctctgagaagatctgtgttcccaaaatcaagctgttgtgttttcttttcccttatctggtcaaaatctttcaccattataatggaagacagatcttaagactttaatagattcaatctttttgaaatagagaataaatgacttaaatgcacaaacagattgattcagaaattagcagccagtcaggccaagatatcaacatataccacctatttgcatgttgaatgctttttgtcaatcaagaannnnnnnnnnnnnnnnnnnnnnnnnnnnnnnnnnnnnnnnnnnnnnnnnnnnnaacgcctacaaccaacaaactcgagggggggccccgtatcccaatttgccctatagcggagccgattacaaattcactggcccggcgcttaacaacgtggtgactggga

SEQ ID NO: 442103 - DNA, 459 bp, Homo Sapiens
  misc_feature (27)..(27): n is a, c, g, or t
  misc_feature (50)..(50): n is a, c, g, or t
tgggtgtaatcccaaaaaaaactttantttaaccaaaagcaggtggaagnggcccagaattgggcaccccgggcctatgtccacagtttctgggtatatatccataaagagttttcagagtgagggctcccagaggcaaactgtctgccctcagttttccccatccttcaaaatatgccacagtaatagtaccctacttcaaagttgctgtgaagattaaatgtattcacatagcactcataactgtgcctgctacaaagaatatactcgataaattattattgttagcttttaccataatacagagcattaccaagtaaaattattgccaatcaggaaatagtgagttaacagggcaaagtgcaacccatttaaagaccttcagaattgctgtatttcaattgtagctgttgtcaaacaaataaataaatgctttcacactgtaatattcctttctgt

SEQ ID NO: 442104 - DNA, 1044 bp, Homo Sapiens
gatttcagtgatgagaggggccccatgttgggctgaacccttctccaggcactgactttgtgctttctctcacctcatgcttctttgaggaaagaagtgagggagaagcaatggcttatgaaggagcacattgattcattggctgaggggagaagggagttcttgtggggggaggcagcagtcactggagtcttcagaggtgggatggtggcattctggacaatttcttttcttccaggattctcccaaagagcttggctgcctccagggcacatccccagtggatggtgagcccgtagcctccatggccatagttgtggatgacctctgtgtttgaaggtccagtgcgaagctgttctctttctagccgaatctgggggcgtactggccggaagccagttcgttcaccaataattcttgcattcttcagtgtgggctccagtctgcagcagccttcccaaatggtgttgtggtcctggatattgtttagttcactccagtttcccaactggaagatgcctccaagagtaactgtctgggtccctgggatgatgtacggggaattgtagatgcctctctctgggtcatgggtgagaatgaagtgcttcatccaaggggcgtccaccttcatgatctgcccccggcctggctgcagcagggggtctcgttgtagcgccccagcccataccccagtgcagttgacaatcacgtctgcgccttctcttgccacctcctcaaaagactccactttccgctggaagaacttcactcccctctcagttaacctttcagtcagccactgtagatagttctttccctccagaattaggcttgtgtggaaccagccatagccgtaatctgggaacatatccagctctctgggggtcagcttccgaaatcccagaactgtgtccttccaggaagggtccggaagtaccaaactgctggagagaccagacaactgcagtgcggggacacaggatgctatttcctgaggggaagctcctgattctggagcgtcttgtttccagccctctgtccgcc

SEQ ID NO: 442105 - DNA, 800 bp, Homo Sapiens
ttttttttcaagagaattgtatttttattcatggttgtgcctagtaaaattctggtacatggtaagtgctcagtattactgagtgaatgagcaaagacctgaaatactgtggaaacagtaaaagcaaattaccacacaattaggaggaattattttcagacataggatatttaaaacatcactcaaatactggagcatgattcagcaataaattctattccataaaccaggtagataaatgtcacagctttaaaatatagttaagtacagttgatcctcgttattcatggattccgtatttgtgaatttgcctaacctaaaattttgtggtacagcaaaaaacttgctgtacacatattctgagctgaggttgaacaaggccatgttccagctttcatactataaacgtgtcctttttacgctaatgccatggtttttgcatttctgttctttttttgatttcactgtttaaaatggcccccaagcatagtgctaagggcaaaaagctgttcctaagggtaaaaaggctgttgtgtgccttatgaagcttatgtgtcagataaacttcattcaggcatgagttacagtgttgttggtcatgacttcaatgttaatgaatcgattatattaaataaggtgtctttacgacagaaatttacatgttgactgcttgatgaaaatgtgaccagtggcttgcagaaatctagccttgtatttcccctaggttctatatttgctaattcagtgttcgcagtgactttatagaacataactaccttgaataatgagaatcaaccata

SEQ ID NO: 442106 - DNA, 454 bp, Homo Sapiens
  misc_feature (418)..(418): n is a, c, g, or t
aatggtgcaagagaattgtatttttattcatggttgtgcctagtaaaattctggtacatggtaagtgctcagtattactgagtgaatgagcaaagacctgaaatactgtggaaacagtaaaagcaaattaccacacaattaggaggaattattttcagacataggatatttaaaacatcactcaaatactggagcatgattcagcaataaattctattccataaaccagggtaggataaatgtcacaggctttaaaatatagttaaggtacagttgatcctcgttattcatgggattccgtatttgtgaatttgcctaacctaaaattttgtgggtacagccaaaaaacttggctggtacacatatttctggggctgagggttggaacaagggccctgtttcccggcttttcatactntaaacgtgtcccttttacggtatgcctgggttttgg

SEQ ID NO: 442107 - DNA, 722 bp, Homo Sapiens
tttaactgagccaaaatattatatgaatattttaatgcaaaatgcttaacacttaaaattagcaaagcgtcatttaaattaaaattccatttaactaaagatggttaaccccaagaaattgtacagtagttgatttctgctatataatgccagtcctatgccatacaataagaactgcaacattagctgtcacttcctccattgctcttctggaccctaagggatgagggaggggactcagacacaaaacacaacccaaataaactgtgcagtgattcctaatagttataaacccaatctaagttgtccaaacagctgaagaataactgcaggtattgttccagagctgatacgaggttttgcttttacagcctggtaaaagttctgcactaggtgagaagtcacagtttaaggatgcatgttctgtaaatagttactacatatacacatttactgtctgtaaacactagaaatatacattagacagagtaccctcacaagttgggtacagtttaaaaaagaagatgaggtaacatgaatctcaattttaagactgtaagtccatgctgcctggctactagagagcaaggggctttcttaccaccagtgctgaggagaaaagtactgaacggaaacggagttgtctttgtactcttgagttgtaccttattcttccacttggcctgagtttttataaaatttcaataaattgtgacagtgtg

SEQ ID NO: 442108 - DNA, 440 bp, Homo Sapiens
ttttttttattatatgaatattttaatgcaaaatgcttaacacttaaaattagcaaagcttcatttaaattaaaattccatttaactaaagatggttaaccccaagaaattgtacagtagttgatttctgctatataatgccagtcctatgccatacaataagaactgcaacattagctgtcacttcctccattgctcttctggaccctaagggatgagggaggggactcaggacacaaaacacaacccaaataaactgtgcagtgattcctaatagttataaacccaatctaagttgtccaaacagctgaaggaataactgcaggtattgttccagaggctgatacgaggttttgcttttccaggctgggtaaaagttctggcactagggtgaggaggtcacagttttaagggatgcatggtcctgtaaataggttact

SEQ ID NO: 442109 - DNA, 1517 bp, Homo Sapiens
ttcacactgtcacaatttattgaaattttataaaaactcaggccaagtggaagaataaggtacaactcaagagtacaaagacaactccgtttccgttcagtacttttctcctcagcactggtggtaagaaagccccttgctctctagtagccaggcagcatggacttacagtcttaaaatgaggctttatgtatttcaggctggaggcaggttgccttttctcctgaggaatctcaggcagggtaaaagttacttaccactcagtacctctgtgccagaagaaaagctcaatttattcaatccttagaaaagttactatcgtcccctggtcagacactaaggtgtcttgataaggtccagagacaaccacatagtccttattctaattcgtagtgaaaaggctgcaggcatatggtgctcctacgatgggcctgaccctttcctaagcacatctcatttccacatcctttgccttctctttcccccaacatttccagccagcatagaacccaatttctcaagtctggtgcacctcatggacatcagttcacgggggatggctgtttctggaccaaacttggtggctgcccgacgctcaaaggcagcaacattctgtttgacaacctcatcaaaaaacatggtggccagctgggagtgcagcagagaacgaaattcaaaggaaatcgaaaagtccacagtgcaggttcgaggataggcaggaataccagggctgaatcgccaaatagtctctaagtggttgaagagcttgccatcagtacaaacagccttgaccatgtgaggtttgaccatggaaactgcagaggtgtaacgttccatgacaggtggaaagccaacctccagctgggctttcaaatgacccttacggctggataccaccagagacttcttacaccagggcacaaactcacgatactcctggacgttggacaccacctcatacatctcctgcattgagtaccccatgattctacgctccgagtaagcctttcgcttgttggtgaagggagcagcaaatcccatgaaggaacggctcgaaggtaagccagcctcagccgccaagatctgggcagcccgaggcaagaggaggctgcaggaggtcagaaacctcattggtcgcggcggtggcagagggcctgggggcggggccggttgcgcgcccgggctgagcgagagccggcagcagcgctcggctgccgcgcgcgtcccagctgggacccgccgcgagcccgcccaggccatgcgcgcgaccctgcctggccctctaagttctgacgcgggctgcgccctcctcactccaaaggcggagcggcaagaggcagcggctgggctggttcgggacctctgagcgcaggggcgacgggaggcggcagcacctctcgccttgctcccgtccaggctgccgggtaggctagaactgaagccgggaccgctgctcccgcagatccggcctccgtgccgaattcaccacccagcctcgacctagcctaagtgctgct

SEQ ID NO: 442110 - DNA, 460 bp, Homo Sapiens
gagaaaatggagacacaggtaatttacctaaggccacattgttaaaaaattgttaagagctgggatctgatccttgtgtgatcaccagtaaaactgacagcctctgttctccctagatggtccctcttaaaatcaaaataaaccatgaatgcaaaagcattctgtaaactgcaaaatataaggtaacagtatcataaggatttacacgtttgcttttgggaagttattcatccaggcttatttgggatctgtagttcctgaaggtgcgtggttagtgggcaaaggtatgaattaggggcctatagcaaggaggaacctgacccagctggcagctccttggcctgtgattcttcttctcctaggtactcaatgcaaggagatgtatgaggtggtgtccaacgtccaggagtatcgtgagtttgtgcctggtgtaagaagtctctggtggcctgtgaaagta

SEQ ID NO: 442111 - DNA, 987 bp, Homo Sapiens
  misc_feature (736)..(757): n is a, c, g, or t
cccctcgcggtctcatattggtcattccctgccccagatttcttaaagtttgatatgtatagaatataattgaaggaggtatacacatattgatgttgttttgattatctatggtattgaatcttttaaaatctggtcacaaattttgatgctgagggggattattcaagggactaggatgaactaaataagaactcagttgttctttgtcatactactattcctttcgtctcccagaatcctcagggcactgagggtaggtctgacaaataaggcctgctgtgcgaatatagcctttctgaaatgtaccaggatggtttctgcttagagacacttaggtccagcctgttcacactgcacctcaggtatcaattcatctattcaacagatatttattgtgttattactatgagtcaggctctgtttattgtttcaattctttacaccaaagtatgaactggagagggtacctcagttataaggagtctgagaatattggccctttctaacctatgtgcataattaaaaccagcttcatttgttgctccgagagtgtttctccaaggttttctatcttcaaaaccaactaagttatgaaagtagagagatctgccctgtgttatccagttatgagataaaaaatgaatataagagtgcttgtcattataaaagtttccttttttattctctcaagccaccagctgccagccaccagcagccagctgccagcctagcnnnnnnnnnnnnnnnnnnnnnnagcacttagtatttagcatttattaacaggtactctaagaatgatgaagcattgtttttaatcttaagactatgaaggtttttcttagttcttctgcttttgcaattgtgtttgtgaaatttgaatacttgcaggctttgtatgtgaataattctagcgggggacctgggagataattcctacggggaattcttaaaactgtgctcaactattaaaatgaatgagctttc

SEQ ID NO: 442112 - DNA, 636 bp, Homo Sapiens
  misc_feature (504)..(504): n is a, c, g, or t
  misc_feature (552)..(552): n is a, c, g, or t
acggtcgccgcggtagctggagcctccgcgactgcacggtccaagcggcccggaacccgcggcttccctggctcccgtgagcatctcaccgggcggcactggccagcgccagccctcgggccggcccggatgaccagactcctgtagacacccgccgccctctcccggctcggcgcagccgccgcccgcgcgcgactcgccccgggacccggcacaggttgaagaaatatggagatcaacacaaaactgctcatcagtgttacctgtatcagctttttcacctttcagcttcttttctactttgtaagttactggttttcagcaaaagtttctccaggtttcaatagtctcagcttcaaaaagaagattgaatggaactcaagggtagtatccacatgccattctttggtggttggtatttttggcctgtacattttcttattcgatgaggctactaaagctgatccactttggggtggtccatcacttgcaaacgtgaatatngctattgcctcaggctacctcatttctgatttgtcattataattttgnattggaaagtgattggtgacaaattttttataatgcatcattgtgcgtccctttatgcatactaccttgtactggcccgtttgg

SEQ ID NO: 442113 - DNA, 1364 bp, Homo Sapiens
tagaatgtcaattagagactcataataggaaaatggttacattcaaatttgacctagatggtgacaaccccgaggagatagcaacaattatggtgaacaatgactttattctagcaatagagagagagtcgtttgtggatcaagtgcgagaaattattgaaaaagctgatgaaatgctcagtgaggatgtcagtgtggaaccagagggtgatcagggattggagagtctacaaggaaaggatgactatggcttttcaggttctcagaaattggaaggagagttcaaacaaccaattcctgcgtcttccatgccacagcaaataggcattcctaccagttctttaactcaagttgttcattctgcgggaaggcggtttatagtgagtcctgtgccagaaagccgattacgagaatcaaaagttttccccagtgaaataacagatacagttgctgcctctacagctcagagccctggaatgaacttgtctcactctgcatcatcccttagtctacaacaggccttttctgaacttagacgtgcccaaatgacagaaggacccaacacagcacctccaaactttagtcatacaggaccaacatttccagtagtacctcctttcttaagtagcattgctggagtcccaaccacagcagcagccacagcaccagtccctgcaacaagcagccctcctaatgacatttccacatcagtaattcagtctgaggttacagtgcccactgaagaggggattgctggagttgccaccagcacaggtgtggtaacttcaggtggtctccccataccacctgtgtctgaatcaccagtactttccagcgtagtttcaagtatcacaatacctgcagttgtctcaatatctactacatccccgtcacttcaagtccccacatccacatctgagatcgttgtttctagtacagcactgtatccttcagtaacagtttcagcaacttcagcctctgcagggggcagtactgctaccccaggtcctaagcctccagctgtagtatctcagcaggcagcaggcagcactactgtgggagccacattaacatcagtttctaccaccacttcattcccaagcacagcttcacagctgtccattcagcttagcagcagtacttctactcctgctttagctgaaaccgtggtagttagcgcacactcactagataagacatctcatagcagtacaactggattggctttctccctctctgcaccatcttcctcttcctctcctggagcaggagtgtctagttatatttctcagcctggtgggctgcatcctttggtcattccatcagtgatagcttctactctgaaagtgggtccgagcagcagt

SEQ ID NO: 442114 - DNA, 235 bp, Homo Sapiens
acccctgtggtagaaagattgaagggtcttatgtacccctattgggtgtggggtatataggaactctttaaaaaagagtttgatctaccatggtagagaatttattctttccatagaaatgatggaattcttagatgaagaagcattcgaagagaagtcaaccaaaacatataggaagaagaaagtatcatagatgtgtatcaggaagttaattgataaatattctctctggggg

SEQ ID NO: 442115 - DNA, 876 bp, Homo Sapiens
  misc_feature (760)..(760): n is a, c, g, or t
  misc_feature (777)..(777): n is a, c, g, or t
  misc_feature (780)..(780): n is a, c, g, or t
  misc_feature (835)..(835): n is a, c, g, or t
  misc_feature (838)..(838): n is a, c, g, or t
  misc_feature (864)..(864): n is a, c, g, or t
ttttttttatgactcactctcctttattgttggtttccagtaactcatgtacataaagaagagcatagtaacatgttggatgttaggcaggtgatcatctcaagtgaaagattccaggaagatcaggattcaataatcaagccctcaggaaggggcatagggtttcttaggttgtaatccccactggcactttcagccatattgaaggagtggggaaaaggcccaaataacccatgccctttgtccttcagattgccagcatgtcaaatggaagcccgtggggcttcatgtctgatgcattgagcattctggtatatttcccatctcagacttcaaggtctacacccatccatttatggggctctccataaaaaacacccttctgctgctcacaatgtctgcccttggcctgggactttgggctttggttctaagttcctaaagtcaggggtcaagctctaatcattactgtattctgagctttttgtacagtaactgttgacatgtgagttgaaaggaacctatctctgaggaagtgattcctctctccaacatagtgccagactctcgtattaggaaatgatgaaaccatcaaccaaatgtctgccatagctactgtggctcttgacaagactgtgagggagaatagcagtgtcagctgcatacagacatttgcttaggtcatctggcatatcttgattggtcaccatggcaactatcacctcgtgccgaattcggcacgagaaaaaagagaaagtanaaagaaggaagaaaganaanaaatgacccttctttgcaacaaataagcagtacttgtaatatgcattaaattgangantagacattgaggggctatcctctaanatatcacctttc

SEQ ID NO: 442116 - DNA, 2285 bp, Homo Sapiens
  misc_feature (99)..(99): n is a, c, g, or t
  misc_feature (811)..(811): n is a, c, g, or t
  misc_feature (1179)..(1179): n is a, c, g, or t
  misc_feature (1252)..(1294): n is a, c, g, or t
  misc_feature (1340)..(1390): n is a, c, g, or t
  misc_feature (2119)..(2119): n is a, c, g, or t
tatttccatctcagactcaaggtctacaccctccatttatgggctctcataaaaaacacctttctgctgctcacaatgtctgcccttggcctgggactntgggctttggttctaagttcctaaagtcaggggtcaagctctaatcattactgtattctgagctttttgtacagtaactgttgacatgtgagttgaaaggaacctatctctgaggaagtgattcctctctccaacatagtgccagactctcgtattaggaaatgatgaaaccatcaaccaaatgtctgccatagctactgtggctcttgacaagactgtgagggagaatagcagtgtcagctgcatacagacatttgtttaggtcatctggattatcttgattgtcaccatggcaactatccacaaccagtgcctaggtgtgtgagaagagtgatacaataatactgtggcatggtcatttagctaattcagtctaagcctaacagaaaccttttccatcaaagtttttcagagaataacaacatctcataagaggccagaggatggcttgtgcttaatatcacacctgtacagtagggcagtgcttcccaggctgtctgcttacattttagcttgtcttacggttacatatggttttagtattttcatttaaaaaatctgggttggttccataaatttggaaaagtaaaattggacggttctggaaattttgcctgtttacacatctgtaaatgtagcttgcttgcattatttttttctagatctgaaatgcattgcatcaagcaagcatgttttgccaataaaaagtggnaaatcccccctcctgctggataaactgggtgctttcccacgcgacacaaagtccatatatcttgacacaatctctaggatgccattatataaatggaagaatggtgtggtgaggggaaacaaggtcagggagagtgggcagacctgacttttgagtcctggttctctatgggacaactgagtgactctgggtatgtcactttacctgagcctaagattccttcatttataaaaggaagtccttggactagaaaatttctgtgtgccttcttgactttaatttctattttagatggatattttgtacttcagtatcatgggaagaaatgagagttggaaattcattttaaaggcactgaactcagctcnctccagaggggcacttcacttctgataaattccattgtccttggctacataaattggaaactattttaactannnnnnnnnnnnnnnnnnnnnnnnnnnnnnnnnnnnnnnnnnntttctccctgccaattcataactcatcagaaatgctacacttgggnnnnnnnnnnnnnnnnnnnnnnnnnnnnnnnnnnnnnnnnnnnnnnnnnnnatcaggccaagtgaggtcttttggagagcttttaaaaggttttgccttaaatatttgtttaaattctttgttttagagacacaatgactatctcattcctttcctaatgttagctcagtaggcagccccactgatacacaatgtggttttgttgagaaaattatttccttgctttcaaaaacagttaattgctctagcgttttacacaagagggcagtgatcctagaaataacttaaactactttctctgcttaccaaaccaaaacccaaaccagccaaccaaacagacaaatagcatggctcatcagtaatttctccctgtactggtccaatcgtgattaaaagtaagaacagcagataaatgtgtatcctagaagagattagcggaaccatttatatagtgtaaagtcatgcaaaccatgctgaaaaggaagcactttgttgtggtgacatggggaggaagaggctgtgggaagcccctgcctgggtggggccaccacgcacacgcatgcatttgatgcagccattggtgtccccgctggtaagcttcgggtgtaagagtaagtgaactatacaaagtctgtctacattacaaggaggggtcagccagtgacctcttttaaatgggcttattggaaggggtccatactgaatcagaaatcccatcccctgtggacgacagagggcatgggagccgctgggcttgaaaggggtccgtgtctgtgtccnttttcaccctcgggcgaggtacccgcttctccctcatccagctcgaccccccattggggccgaacacataatcatctctgtcctgggagatgctgaagccacttggagacctctccagctcctcgtggttgaccgacatcagggacagaggtgtgtcactgtctcg

SEQ ID NO: 442117 - DNA, 498 bp, Homo Sapiens
actcggcggcatggcgggctccggagccggtgtgcgttgctccctgctgcggctgcaggagaccttgtccgctgcggaccgctgcggtgctgccctggccggtcatcaactgatccgcggcctggggcaggaatgcgtcctgagcagcagccccgcggtgctggcattacagacatctttagttttttccagagatttcggtttgcttgtatttgtccggaagtcactcaacagtattgaatttcgtgaatgtagagaagaaatcctaaagtttttatgtattttcttagaaaaaatgggccagaagatcgcaccttactctgttgaaattaagaacacttgtaccagtgtttatacaaaagatagagctgctaaatgtaaaattccagccctggaccttcttattaagttacttcagacttttagaagttctagactcatggatgaatttaaaattggagaattatttagtaaattctatggagaacttgcaaaaag

SEQ ID NO: 442118 - DNA, 1128 bp, Homo Sapiens
  misc_feature (694)..(694): n is a, c, g, or t
  misc_feature (767)..(767): n is a, c, g, or t
  misc_feature (804)..(804): n is a, c, g, or t
  misc_feature (908)..(908): n is a, c, g, or t
  misc_feature (1018)..(1018): n is a, c, g, or t
  misc_feature (1024)..(1024): n is a, c, g, or t
agcgggtcggggggcaagatggcagcccaggctttggcgctgctgagagaggtagcgaggctggaagcgccgctggaggagctacgcgcgcttcactccgtgctgcaggcagtgccgctcaagcgagcttcgccagacaagctggctggagactgcgcctcggctggctcttctccctgcttaacgagaaccatagggaaaagactactttgtgtgtatccattctggagagattgctccaagctatggaaccggttcacgtggcccggaacctcagggttgacctgcagaggggactaattcaccctgatgattctgtaaaaatcctcactctttcccagattggaagaattgttgaaaattctgatgctgttactgagattctaaataatgctgaattactaaaacaaattgtttattgcattggtggagagaatctatctgtagcaaaagcggctatcaaatccctgtcaagaatatcactaacccaagctggactggaggctttatttgaaagcaatctgctggatggatttgacaaagtgtcatgaaaacatattgacattgttcgataccagggtggtctgagctacttatagcagatttcttccggtgtcaccaagaatctttaaactactgtaccacacgtggattggtacccagcttctgagagagctgactggtgaggatgtgnttgtcagaagcaccctgatagaaatggtgacatcactggcatatactcatcattggcgacaatatcttgctcngaaggagtatttgaccacattctaatataattgtggngcaggatcagaccctttcctaacttctatctgcaagaatcgtgaagttttttgaaccttgctgcattgtaagtcttacagatctggagcgtaatctatctttgnggaaaagtcttggaatgattgaagtatgacccactttattgtgtgacttagaccaactgggatcttgaatccatgttacggaaccggttttcacgaaacaggactactcnaaactntcgtttagaattggacttaattaagaatgcccacggggctaacttttgagagaacaaactcgcttttcttatattggaccatgagctctccggcatatagtact

SEQ ID NO: 442119 - DNA, 674 bp, Homo Sapiens
  misc_feature (344)..(344): n is a, c, g, or t
  misc_feature (484)..(484): n is a, c, g, or t
  misc_feature (622)..(622): n is a, c, g, or t
atatatattatatttatgtattatattttgtacaatagttgatcttgaatgcagacttcatttgtatttttcgtggtactacaaaatgtgtagaagttatggcttttctttcattagggtcttgttaggtggttggcaagtaagttaaattgtatgttgcatttttttccatgctgttttaacttgtaaatatatatgtatacatgtggaagatattattattatctagattactttaagccttttatctgatgtattatcagtgaaaaccatgctgcttattccctaatacaatggttctcaaactttagtgtgtatcaggaatcaaggatgaggggcttgtnaaaatatagctgggtccctactcccagagtttccatttcaggaggtctgggatcaggcccaagaatttgcatttttaacaaattcctaggtgataactgataatgttggttcagggaacacactttcagaaccactgctntaatattttaaataagataatatgtgaggtgtcataaaaaccttcatcaaatccctatctcatttcatttcttaggcattttctctcttataaagtttcctggatttataaattttcattgattttactagaaagttntatttagcttttatttatttaatggtctttttaagaaatttcttttttcttt

SEQ ID NO: 442120 - DNA, 1691 bp, Homo Sapiens
  misc_feature (112)..(112): n is a, c, g, or t
ggcaaaaattccccatgccacaaagaccctccccacaatgttggataagattatccaaacatttttggtcctggggaagatgaaacaaaattaatttagctgtttaataggnaaggtggggatgtgagactcatccaaaggtaggatgtgtgacacaaaataccacaggaacattttacaaggctaggtggaaatacaaagctcacatccttaaggaaaccatcaaatacttgcctagaactttctatatgaagttttgttcttctatgacactatttctctttggtaaagctagcttgtttctatctacaaagacacagtgagtacaggattagaagtgagctctcagccaaattccttttgcaagttctacctgttctgttaggcttcagggactcccagggtttggtgctggctttgggccactcaggtaggaaaaatgatacagattcattcgttaccacatggcttcataaaacaccaaaaggggaaaaatactgactagacattcagaaagaaagtggttggggctgctgatatcaagatcagaaccctaagagccatgaaggcagaggctcaaagaagtcttttcatgggcagaagactgagagccctctaagccctctctaagataccaagtagaggcagctaaaggaggacctcttctccttcatgattttctcttaaggctattctgactgccccatggactcaattctctgagacacctcatccctcagagacacctcatcccctcatccacagttaggaaatcccaccctgcattggtcacagcctgaaacaccagctgtgtgatgatgagggtcctgccctttctctattcctcactgaagaaatttcaatcaaccctcagaggaaaagcaacctaagcctacctttcctcctaaagcatttagctgcacagagtaactgaactttttcgaaacaagccctagattgactccatcagacatattttcctggactcagggctcccaagagggccagactacttcaccactctgcagaggacactgggcgggccacacctgattccagcccactccaactttacacttctccctctcccacccagaggggtaatgcctggtactgaattcccaaggcagcttccaatcaatggtgaaaatgatacatgggatataagctgctaccagcgcaattaaggtgagcactgtgtctcctcttcaaaggtgggatcaacagatgaggtacagagctgctgttgctatggcagtcactgatgacaaagccagggccatgggggcccttccattctccaaaacaataaaatcactcctagatcctatctaaaaggcaatgccctgcaagtgaacaaagccaggaaagctgctctctgcattcggtaagtgtgctgtgaagttctttgggtcccagtctcctgggggctctataggctcaggagactagaggctgggtctacaggagtctgttcccaggaggcaccaggaatctgaatctaagtcaggctttggatccatttccatctcttcctttgctgtctgagttcctttggaatgcatccccacctgctgccctccttctaatttcttgttcaacttctgcagttgggtaaaaatctggaggttttcttgctgtagcttctgttgttcagccagacactttaacaccagaccctgcaatctctc

SEQ ID NO: 442121 - DNA, 679 bp, Homo Sapiens
gcatacatctctgaaggtaaagtataaatcagtgggctcaagatttgcaggtacagccttgttaatgccttcaataatgcttacgttccttgtcttatgggttataattttcacatcctcttcagatacaatctgagaacttgttgactacctttgttacatgcaaaaattttctattttaatattgcattatattaatggtttcatagtacattccagttctttatctgaatacaagcgttttgcttttatttccagtttcttggaccataacaataaaatacataatacatcgtttctatatggtcatatactatatagaataaagaattgttatgtaaattattaaatgagtatacagacctttacataaaaactaaggtacctcagtggaatctgctacagtgctttcccctccctacccctccattttgtttataaccttttagctatctaaataatacgtattccatactcatgatagctggttagctagcaatatcttccttgtaccaaagctgttgaccttaaataaacattaaggtgatctttgacaacacttgatttgggtgtgtcaatgtcccgtgtttgcgctggattgttgttggaaataattatgttgttccccatatattcatttttaatccattttgaactctttctgaatgtggtcattact

SEQ ID NO: 442122 - DNA, 690 bp, Homo Sapiens
ttttttagaatgcagcatttttattgtaaaagtccacatgttaggcaattccctttgtgaaaaggtttccaaatacatagacagggagcagcttataataagtattagattatatataatatatattcatattgccaatactatgcacacattggaaagctagctttttgtagtgtccccattacagaacacatttcaagttgacaataatgtttctcaccattgaaacttgccaacaactctcccaaagagtcaacatttaatatattgacaattcaaaacaagaaaataattcgttctatttacatttgtttgaggttatatactggagcactgatatattaaaggtttgtaaaactgggcagctaaatgtgtttcaagattcatccagatgacttggatgatgactttacatggttttatactggacaaagccactctctcttcttttctattctttttaggttatctgtaaagttatactagctatgatttaattatgacagagtaataatttccataaaaataattaacaaagggtgctattttagaaaaataaggattcaggatgagtacatgaagatagagctcaactcatcatgttttaagtctggagaaattgctttgtttaactacaatgtaatctaatgaggccacagtcattggctcaacctctatgtgagtcattca

SEQ ID NO: 442123 - DNA, 537 bp, Homo Sapiens
  misc_feature (277)..(299): n is a, c, g, or t
  misc_feature (372)..(422): n is a, c, g, or t
gggctgcaggctcgtgccgttctttttttgtttatttgttttgcttctgttttctgtaaatatctatttcttattttggacatgcagggatcaattgagattctggagtggggggaggggcggatgactgggtctttttattttttcctttctctcttggattttggtgtttgaacttgaaaaaaataattacaagtatatatataagcaaatgacttacctttaaacaaaagaaataagttgatttcattcttttgatttatcttgtttctcattnnnnnnnnnnnnnnnnnnnnnnncttttgggtggagggctttttttgtgagctgtatagatttccagtttggacttgttcaaatgatgcaggaacnnnnnnnnnnnnnnnnnnnnnnnnnnnnnnnnnnnnnnnnnnnnnnnnnnnttgtgatgtataaaagctgtaaatagtcaaagattctttctcttttctaatggcaaattatttctgtcactttatattcaaaaaataaagaaacctaccacaaattatcagggtt

SEQ ID NO: 442124 - DNA, 697 bp, Homo Sapiens
  misc_feature (210)..(235): n is a, c, g, or t
  misc_feature (657)..(657): n is a, c, g, or t
  misc_feature (665)..(665): n is a, c, g, or t
atcccccgggctgcaggattttttaaatgttctgcttggagataattacagataagcacacaattttaagaacttatgcagagataccctcacccagtttcccccaaaggtaacatcttatgtcactatagcacaacattacaaccaggaaatcagtgatacaatccatagtccttacacaggtgccgtcagttttacatgcactcattnnnnnnnnnnnnnnnnnnnnnnnnnncatttaatttgatggaattttgtcacatgcattgattcatgtggccaccaccacagttaagatacagaatagtttcatcacaaggttcctttgcactaaccttttacagctacacccacctgcctctcccccaatctcacctctgacaaccactaatctgttctccatctctataattttgtcattttaagaatgcaatataaatggagtcatacagtatgtaaccttttatgattggctttgttcactcaatagaattctctggggcctcatccaagtggctgtgtatatcagtagttgctgagtcctattccataatacagcactatggtgtgtttagccattcattgcttgaaggacatctgagcggtttccagattttagctattgcatataaagctgcaatgagcattcatatacanaagaaaanaataaaaaattcacttgccatcccttgtacat

SEQ ID NO: 442125 - DNA, 274 bp, Homo Sapiens
  misc_feature (119)..(139): n is a, c, g, or t
  misc_feature (237)..(237): n is a, c, g, or t
aatttttccccccaaccatcgtgatttgtcttttcatgcagattagttagaattcactgccaggtttcttctgcccaccaaaatgatccagtctggaataacattttgtaaaaaaaaannnnnnnnnnnnnnnnnnnnngctgactggaagagattaatttcttcccccaacttcttgcatgttgaagatatttgagctatttttcatctgttggtggcgagggagggatcctctcncccgcggtccccttcgtttcgtctccgccattccact

SEQ ID NO: 442126 - DNA, 668 bp, Homo Sapiens
atcacatgaagaggctcagcatcatgtggcctgtccgataaaagctgacatagaatgccatttcagcagttacgtgttgatatgatcaaatagctatttttttaacccgtcatatatttttagaagtcatccgtagggaagaagcaatactactaagactgctttgtttttagataagtttatgtggccaacttcaaaatgacatactagccagatatcagcattcgaaagctaggttgaataggatctggccttgatgcacatgcagatgatttgctttcataatataaaattaaatggtaatgtcagctgtattactactgtttctatatttatgattaattactagcagtacaactcccagaaggaaggagatggatcctacagcgatgtaagctatgccccataaatatggattttttcctcccatccatgaaatagtgctcaagatcatccgttttcgtccatcaaaataatgtacagggtaattgtatgtgtacattcaaagagtatcggccagctggtaatgttggatgtaaatcacttttcctttctataagacgatacaacttgcgaaaagtaggtaatgctgcagtacgcatccaagcaataaaatcctcatttatgaatccattattatctgggtcagaatccagcatgtaaactgg

SEQ ID NO: 442127 - DNA, 839 bp, Homo Sapiens
  misc_feature (692)..(692): n is a, c, g, or t
  misc_feature (747)..(747): n is a, c, g, or t
  misc_feature (813)..(813): n is a, c, g, or t
tttttgcacaaacagttttatttgatgaaccacagtgactaacaggatcagaagacagtgcagatattctgaaaaaggcactgggggaggtaagggggtatcacagcaggcagcctcctctgcttctgtcccagttcacagatgagttccaggcaggaagtctctgcaggtcacccacggcggcctcagagggacaatttcttcccttctagaagcctcttccagtgttcactggatgctttgaggacagctctgggcagagctggcgtcattccagggagggtcaagatgtccattcacatcaagctgggcttttcttatctccatcgctcatgtcttgtccttcactttcatagtcctccaagaacaaaacccggaatagacactcccagcctctagctcacaaaggccccactattaatttcatcctcacggtctctctggcagtgtagacatcatgctatctgcacacttgctccagtccctattcccagatccccaatccagcagaagccaagaggtccaatcctgagggtagggagagaaaaaacccaccccgtgccttttggcccatggcaagcaggaggcctccttaggaagagggccactgaccctggaacaagaaagtacgatgagggcaactgctcataaatttgaagccaggcggggaggcactggaaaggggccaaggnaggctctcaactagcctcttacttccttcatggagcccaagaaggagcaggaacncagctcagtaggacgccccaaagccttggcgccagctgctttggctcgtgccgaattcctgcagcncggggatcgcactagttctagagcgg

SEQ ID NO: 442128 - DNA, 472 bp, Homo Sapiens
  misc_feature (451)..(451): n is a, c, g, or t
  misc_feature (457)..(457): n is a, c, g, or t
ttgcacaaacagttttatttgatgaaccacagtgactaacaggatcagaagacagtgcagatattctgaagaaggcactgggggaggtaagggggtatcacagcaggcagcctcctctgcttctgtcccagttcacagatgagttccaggcaggaagtctctgcaggtcacccacggcggcctcagagggacaatttcttcccttctagaagcctcttccagtgttcactggatgctttgaggacagctctgggcagaggaggtgactctgtgaaagatgctatcttaagatggggagactaggctgtgaggagccccttcccctctcctcctccctctgcccccagagctggcgtcattccagggagggtcaagatgtccattcacatcaagctgggcttttcttatctccatcggtcatgtcctggtccttcactttcaaagtcctccnagaacnaaaacccgggataga

SEQ ID NO: 442129 - DNA, 902 bp, Homo Sapiens
  misc_feature (651)..(651): n is a, c, g, or t
  misc_feature (714)..(714): n is a, c, g, or t
  misc_feature (753)..(753): n is a, c, g, or t
  misc_feature (773)..(773): n is a, c, g, or t
  misc_feature (797)..(797): n is a, c, g, or t
  misc_feature (837)..(838): n is a, c, g, or t
tcggaatcgggctcggtcccacggggatttgcccaagccagatgggcttttcccatccttgtcttctgaatgtctaaatcttcgcatctttctgaaggtaacaactgtctccagagttttcccagcagcagctctcagaagtttcccaaagctttgcagaatcttagatctggaattaaagaattcaagcccgaattgtgagaaccagatattactcaacagaaagctctttctaaggaatctgagctgttcactggtggacagtgctggggcttgagtgctccttgttaataggatgggccatgcaccctctctggatattcaccaaggcctcttcagaatagggtttgttctggctagaagcgtggtctagaagatggctaagctctttgccagctctcatttggagttttattattgcataaaatcttcgctcactctgcaaatcttacgtaatctggcaccttcggcaccaggtggtgcaggggcacttctaagtgggctctttttgttacagcacaactctcagacagtcctgtgggtctttggattcgtcagcattccagcaaactagccctgcttagaagttagcacaagacggcagaatgcaggaccccgtaggcaaaatcacaaccttgctattaaaaaatntgctctttgtcatctggataattgccaaatggatatagtgatacacatgacctgcattcactntcttctagcttccttactatgtttagaatacattcgttnccctagaccgagaaccacanacaggtagtgtggagcatacaccngacttagaagcatgtggataggtcagtgctcacactggcnntagtcacaggagaggatgctgcatgatatatccttgctctgagtggagagaaacgtgcatgaat

SEQ ID NO: 442130 - DNA, 549 bp, Homo Sapiens
  misc_feature (14)..(14): n is a, c, g, or t
tcgagctcggtacncaccgggattttgtgcagtcaagatttgcttttccatccttgtcttctgaatgtctaaaatctctgcatctttctgaagtttaacaactgtctccagaggtttgccaggcagcagctctcagaagtttccaaagctttgcagaatcttagatctggaattaaagaattcaagcccgaattgtgagaaccagatattactcaacagaaagctctttctaaggaatctgagctgttcactggtggacagtggtggggcttgagtgctccttgttaataggatgggccatgcaccctctctggatattcaccaaggcctcttcagaatagggtttgttctggctagaagcgtggtctagaagatggctaagctctttgccagctctcatttggagttttattattgcataaaatcttcgctcactctgcaaatcttacgtaatctggcaccttcggcaccaggtggtgcaggggcacttctaagtgggctctttttgttacagcacaaatccccgtgtaatcctctgagagtcgaccc

SEQ ID NO: 442131 - DNA, 421 bp, Homo Sapiens
aaatgtaaaccaagtttattttgctttttaagtagtgttcttaaagcactacagcttggtaaacaatgtaaattagtataagtcatctcaaaagccagagttgttttgttttttaatgagttgttaaaaagatgcagcctattctaacaggataaatatttttaaccatttcacttcgagttaatgaaggctcacaaatgagcaacactcctcattgaggaaaacaaaaagctgttgtcgacaagcgacagcacacacacacaaaaacaaaaagaactgtgtatgcacatgatcttgctgcaatcttgccaaagagactttgtaatacatgtagtctagacaaacgattcagtccaagaggtgctaacttcagacaatgcatcactataatcctttaaacaacgcaatttgttttactcat

SEQ ID NO: 442132 - DNA, 470 bp, Homo Sapiens
gaaaaataaatgtaaaccaagtttattttgctttttaagtagtgttcttaaagcactacagcttggtaaacaatgtaaattagtataagtcatctcaaaagccagagttgttttgttttttaatgagttgttaaaaagatgcagcctattctaacaggataaatatttttaaccatttcacttcgagttaatgaaggctcacaaatgagcaacactcctcattgaggaaaacaaaaagctgttgtcgacaagcgacagcacacacacacaaaaacaaaaagaactgtgtaaaaataactaactgtgttcccatatttttgaagtcgctttacaatgggatgatatgcacatgatcttgctgcaatcttgccaaagagactttgtaatacatgtagtctagacaaacgattcagtccaagaggtgctaacttcagacaatgcagcactataatcctttaaacaacgcaatt

SEQ ID NO: 442133 - DNA, 756 bp, Homo Sapiens
  misc_feature (288)..(437): n is a, c, g, or t
ctcgtgccacccaagcagtgtacactgtacccaatgtatatttatccctcacccccctcttatcctttcccccgagtcctcaacacccattgcattattcttatgcctttgcatcctcatagcttaggtcccacttatgagtgagagcatacggtgtttggttttcgattcctgagttacttcacttagaataatggtctccaaatctatccaggttgctgtgaatgacattatttcattcctttttatggctgagtagtattccatggtattccatggtatatgtannnnnnnnnnnnnnnnnnnnnnnnnnnnnnnnnnnnnnnnnnnnnnnnnnnnnnnnnnnnnnnnnnnnnnnnnnnnnnnnnnnnnnnnnnnnnnnnnnnnnnnnnnnnnnnnnnnnnnnnnnnnnnnnnnnnnnnnnnnnnnnnnnnnnntccatggaatactcttatatatatacttatattttctctatccacttatcgattgatgggccatttggctgcgtccatatttttgcagttgcaaattatgctgctattaacattgctttggaaatatctctcttgaataatgacttcctttctttgggtagatacccagtcttgggattgctggatcaaatggtacatctactggctacttgcagttaactttacattactctaccttacggtcctctctatcttcagatcgatcctgccctttacccatgacgtaaacctttcagtgcgcccgaacttcccatgcttt

SEQ ID NO: 442134 - DNA, 352 bp, Homo Sapiens
tttttcttttatttccataagtttttggagaacaggtggctatttggttacatgagtaagttctttggtggtgatttgtgagattttggtgcacccatcacctgagcagtgtacactgaacccaatttgtagtcttttatccttcaccctcttcccacccctattgaacttttcatggtttccagttggtcactatttgacattcctctatgagccatgccattgacctttctgatacatctgaagaagacagaagtcaaaaactggcttctagtatgctctgtgaacaaaatcatgtttgtaaatagagtgtaaacctattggcagttcagcaatcgccctgcctaatatt

SEQ ID NO: 442135 - DNA, 711 bp, Homo Sapiens
  misc_feature (273)..(301): n is a, c, g, or t
  misc_feature (641)..(661): n is a, c, g, or t
tttaaatacatggatttatttctgtgttctctattctgttctgttggtctatgtgtctgtttttatgccaataccatactgttttgactactatgtagtataatatgaagtcaggtagcttccagctttgttctttttgctcagtattgttttggctatcctaggtcttttgtggttccatataaatttttggattttcttttctatttctgtgaagcatgtcattgatagggattgcacttaatttgcagattgcttttgatagtataaacnnnnnnnnnnnnnnnnnnnnnnnnnnnnncaatagggttttggggaacaggtggtatttggttacatgagtaagttcttcagtggtgatttgtgagattttggtgcatccatcacctgagcagtatacactgaacccaatttgtagtcttttatccctcacctacctcccattctttctcccaagtccccaaagtccattgtatcattcttatgcctttgcatcctcatagcttagctcccacttatgagtgagaacatactgatgtttggttttccattcctgagttacttcacttagaataatggtctccaattccatccaggttgctgcaaatgccattattcattcctttttataggctggagtnnnnnnnnnnnnnnnnnnnnnggcacacctacacatacattgtatagggtacacggcagttttctttatcc

SEQ ID NO: 442136 - DNA, 527 bp, Homo Sapiens
  misc_feature (55)..(85): n is a, c, g, or t
  misc_feature (482)..(482): n is a, c, g, or t
tatccatcacctcaagcatttattctttgtgttacaaacaattcaattatgcccnnnnnnnnnnnnnnnnnnnnnnnnnnnnnnngtccataagttgttggggtaccggtggtatttggttacatgagtaaattctttagtggtgatctgtgagattttggtgcaccccatcacctatgtataaactgcaccatatttgtagtcttttatctcttgcccctctcccactcttccccccaagtccccaaagtccattttatcattcttatgcctttgcattctcatagcttagcccccacatatcagtgagaacatacgatgtttggttttccattcctgagtcacttcacttagaataatagtctccaatctcattcaggtcactggaaaatggtgttaattcattcctttttgtggctgtgtagtattccatcatatatatataatgtttcctttaatccattcattggaatggatggggnaattgggggttgggttccacaaatttggcaaatggtgaaatgtgc

SEQ ID NO: 442137 - DNA, 496 bp, Homo Sapiens
  misc_feature (271)..(405): n is a, c, g, or t
gctgcaggaattcggcacgaggttttcaggacctcaagcagacttcctagagacttgtttctgagacagttctttgccttcacttccctgctagctgggaaagaagagtggagcagagactctgcctggccactgagaacagccaaattcacaaaccctcagtggggctttgtttttggattttctccggactcatcagtaaacctgtagaagtgtcgctttccagccttttgtttctggatcctcaataactcagaacgtggccgggctnnnnnnnnnnnnnnnnnnnnnnnnnnnnnnnnnnnnnnnnnnnnnnnnnnnnnnnnnnnnnnnnnnnnnnnnnnnnnnnnnnnnnnnnnnnnnnnnnnnnnnnnnnnnnnnnnnnnnnnnnnnnnnnnnnnnnnngcgtggtgggcgccatgtaatcccagctgtctcaggaggtctgaggcaggagaatcgcttgaacccggtaccacagagggcagtaagctga

SEQ ID NO: 442138 - DNA, 821 bp, Homo Sapiens
ttcgcccattctcagactcaccggactgttcactgtctcgcacttgtttctttacaggtttcacaagattcatatggttctttcatttcagtgcctactacccctttcaatgattcagccgagccagacagcaaatggacatgaggtgtgtggaggaatctactgaaaacgggattgattgggttttaagaaagtaggactcaaggctggatgaggcagcattctgagaatcttaagttcccaaggcataatgttcaacatttactgtcaaacccaatttctggctaagccatttatgctttctgaataagcactttaattttcattcacatctactcacctttaaaaaaatggaagtatgcaccaatttttaaagaaataggaccaaccttggaaacttataattatgaatctttatatttttatgatagttgatagtttacaaagctagtttcacttgatctttacaaaaaaccctatggggtgatatttttattacccacattttattgataaggaattaaatctcacaaaggtttgaagactttcccaaaagtgtcacaggacaactaaaactagttaaccccaaggccctgtatcagaatgatcacctgcctttcccccaccaacccacactcaccaggcacagtgtccaagaggctctgcctctttctcaatgccatctttgggttgcctcatcctacctgcaatgcttaccttcaaagcagatgctgacaatgtgtttggattttggaggcttgattatgagatttgagactccaggtccaaccctcatctgtaccttcagattcatggacacc

SEQ ID NO: 442139 - DNA, 1513 bp, Homo Sapiens
  misc_feature (158)..(168): n is a, c, g, or t
  misc_feature (198)..(198): n is a, c, g, or t
  misc_feature (262)..(352): n is a, c, g, or t
  misc_feature (381)..(390): n is a, c, g, or t
  misc_feature (414)..(602): n is a, c, g, or t
cccccccctctttttcccggggggagatttttttatgacaggcggcccggggggggtttcctctcggcgccttgtgagatatttttacccccgtggggggagggttcccctgcgcgcggggtgttaaagtttttccccccctctttaaaatttgcccnnnnnnnnnnnttttttatatgaccccccttcttccccctngggtaaagccccgggaacctcccgagccccccctcggttttttcccaggcctcggttccccccnnnnnnnnnnnnnnnnnnnnnnnnnnnnnnnnnnnnnnnnnnnnnnnnnnnnnnnnnnnnnnnnnnnnnnnnnnnnnnnnnnnnnnnnnnnccgggccccccaaaaaaagttttagaaannnnnnnnnngcccccgggggccccccccctttnnnnnnnnnnnnnnnnnnnnnnnnnnnnnnnnnnnnnnnnnnnnnnnnnnnnnnnnnnnnnnnnnnnnnnnnnnnnnnnnnnnnnnnnnnnnnnnnnnnnnnnnnnnnnnnnnnnnnnnnnnnnnnnnnnnnnnnnnnnnnnnnnnnnnnnnnnnnnnnnnnnnnnnnnnnnnnnnnnnnnnnnnnnnnggcttccttttatttcttgaggattacatgaaacgtgaactatacaggaaagtatggcagccaggtcctggggccaggggctggccggctgctccctgcccacggtgggggcttcctccgagccgccggtcctctccggccatctgcatccaggcggtggctacttggaggcagtcatgaagctgttctcaatgcagagcacgatgtaggcgtgatggcagctcgcggcactctgccccaggagcctgccccccagcagcgaggaggcctggcccgtggccgagggagcctccgtccgccacgtctcacagtagctctcggtcagcctgcgcccgttggggtccgagccatgccacacgctctttgggaaacagcactcgtcctgaggttgacgatgggcacggctgccgggcggcacggcgcacgatgctgtacaggtcctgcaggcgcgaggacaggaaggcgcggaaggtgcccgccagccccacggcccgcgcctgctggaagcactggaagtcggccccgcggatgccccgcatgccgcctgacagggggctgttgagcgcaaccaggtggagcaccggctggaagtcgcggtggctgtgggcgggtgggcttgtgggtcgcgccggccgcaggtgcacgtaggagctgtggtgcggggctccggggtagggctggggctcgggcaggcgaggggggctggccaggatgtcatctgcccgccagggccgcgcggtggggtgggggtgctcccgccgcgggtaggggttgctgtcgtgcagctgcaccacggggggctgcaaggcggccacttcattgtccgtccctcgtgggagtggtgtccgggcctccagctggaccttccggaacccgttctgcacgcggacgtagagctcctcctgctcggc

SEQ ID NO: 442140 - DNA, 1407 bp, Homo Sapiens
  misc_feature (122)..(122): n is a, c, g, or t
tagaaagcccttgctgtcttcaattttgtgcttcagacccaggatgaagctgttggggttgatgggcataggcgtagctcccaccatcaggattcttcacgaagacctggatctcggagggnatggtctccagcagatagatgtgagtgtgggagaagatcccatatttggctaaggagcacctgctgctgagaagctgcctctcactgccaggaacctggaaggacagacgctgcaggccagagtagcccctggtcctccggattttctctttaaccttccttatgggctcataagggttcacgatgaggttgaaatctgggtaacccctctgctccactgtcaagtggatgtctcgtgccctcttcacgttccagctggagatggggttctccctgttgtcatagcaacagtcctgtttcaggcactgggaggccctctgagcaacgatgtcccatctgtacccttctgccacgttgagggtggggtcggccggatccaggatgatgggcctctcttttttgagctgttttctgacacaatcctcaatgattgcattgtggagtgtgtagtacttggtccagtagatacagatgacttcatactccaggagcaggtccatcacagtggtgaagccttcgtccaacatgaaattctcgtcttcttcagtacccatttcccaggcatagatggttagaagttcaagagcatagagagggggcagattggctctgggggacctggctttcacatactgctggtaccagtgtttcaccaggcgcaggaggctcttcagcttagttggccgatgtttcacgaaatttctctgcagctcgctgaaggatgggcagaaatttccaggaccaccgcaggccttgatcaggctcacatagacctcagggggtggctgggagttgggaagagaaggccccagggctctgtaggcaggcacaatggtgaccgtgatgggctccgcagtccccctggtctggatggtgaagacgagagcatcggggactctctgctccatcctcaggtcctcgagcccgaggtccagcaggtcctggctttgccacatggttttccatatcagcctcagaacatctttgtgatgcttggctgcctcctggaagctgtggaaacagctcagaaacgccaccagctccacctctctggtgctcctgagaaccgtgccattcccgaaggagcccaccttgactaccttcagcacccgcacatcctggtccagcccacgcttcccctggaaatgctcctgcctcagaaactcctccacggtccgcacagcgtctagcacctcttccttccactcccggtggggctgcagccactgagccacgaaggagtccagcctggaggctggtgtgctatacagttcctgcatcagtg

SEQ ID NO: 442141 - DNA, 643 bp, Homo Sapiens
  misc_feature (589)..(589): n is a, c, g, or t
aactgattctccagtaaattatggggaaaaagaaaggaaaggagaacaagaatttgaaggtaagaaacccaaggctctgagagccaaagaatttgtccaagttcacggagcccatgggtggtgcagctggcccttaaacggtgactctaaagttctgttctccatcaacacagaactgaatgagtaaatactgagtagtttatctgtcgttctgaccttcaagcccttgacagcccagagaggagccattaccttcacgttccagctggagatggggttctccctgttgtcatagcaacagtcctgtttcaggcactgggaggccctctgagcaacgatgtcccatctgtacccttctgccacgttgagggtggggtcggccggatccaggatgatgggcctgctggtaccagtgtttcaccaggcgcaggaggctcttcagcttagttggccgatgtttcacgaaatttctctgcagctcgctgaaggatgggcagaaatttccaggaccaccgcaggccttgatcaggctcacatagacctcagggggtggcttggagttgggaagagaaggccccagggctctgtnggcaggcacaatggtgaccgtgatggggctcgcagtccccctggtctggatggt

SEQ ID NO: 442142 - DNA, 1416 bp, Homo Sapiens
  misc_feature (77)..(93): n is a, c, g, or t
  misc_feature (328)..(340): n is a, c, g, or t
  misc_feature (1373)..(1374): n is a, c, g, or t
  misc_feature (1384)..(1384): n is a, c, g, or t
  misc_feature (1404)..(1404): n is a, c, g, or t
ggagatatctttggcttctatttaaagctaaaggtagaagtgtttgatccagtgaactgtgtatgtatgtgtggggnnnnnnnnnnnnnnnnnaaatgaaaattaagacaccttttgtgtggacatgtttttgtctttaatgtcaggctttagattagaccagcagttttcaaagtatggccaatggacccctgggttccttgagagcctttcaggggggactatgagatcaaaatatttttattataatgtgaagacattgtcttttcactctatctcaaaaaaagtgttgcaaatgtaaaacattgccatcttctcacaaatctcnnnnnnnnnnnnngaaaatatggccatttttcataaaatgttatttgtgttagcatgtaatgggtttactatgtttaaataagttaatactttaaaaattttcaggtttttttagtatggtgaatattgatagatataaacctcatgaacaaaagtactttggcatccagattctcaataaatgttaagagcgtaagtgtaagggggtccagagaccaaaagttttagagctacaggattagacataggagcaggatattctgttagtgtgatttcttgcaatttattttacattttaaactgctgatatggatataatgctgctttttagagacacctaaattgcagtatcagaatgaatgtgatgtttgaagccaaaaagccaaatgcttaaactgatcaatgactgtagctttttagactgtgggtcaaagaacattctacttcacagtaatagctctatcagccacagatctcatggtggctgttgcatgataatgataggataaacaaaataccactgtcttcaagaaacattatcttaggtttgtttgtttggtttgagtttgatttggcttttatattttttaaaatcccttttgctaccccatctggttttataaactgagtttcttagcattcgttaaaattaaggggtttgtttggaataatatatattttttatgcttttgtctttcttacctgattgatattacattcacctttgattgttttttaaaagtttatttttacagaatatatttagtacctttcttaaggagtaactgaattgaatcaaccagtttgcatttaaataaaagaacaggctcagtggtcttcctgtagaatggtttacatgcctgcatgtgcagtagttgtgtctggaatcctagaattggcactttctgcctccttgctctaaatgtcacaagtacagatagatatgttgtgtttgcttcatttttaatgatgacttcaagattgatgatgtgatccaataactgtggaggtagctttaaacttgttctgtgtaaatagtatgtatnntattataatnattctcattttaagatgctngggttacattaa

SEQ ID NO: 442143 - DNA, 588 bp, Homo Sapiens
ttttttttccaattttgcctaggttggcctcgaacgcatagcctcgcctccttgtgtgccaggacaaccggccggagccaccgcagctcccgataccgatgtttttaaaaatatgttttaaagtaattgcttaccacttagggaaaaaattgttgaagtataaaacagccagaacacattgctctttattttggtagcttatgtttggctgacttgcatatgttaaaaaattctcagattttagtctatggattttaatactatatgaaaattcttttatagtttctgaagacctatgttatacgctttctatgagaacttctaaattatcgttcaaaaacaaacactacccttacgatatacctttagcattaaacatttagatcatgtacccaaccattctatttttctaaacttctaacctgaagctttggttatgagggaaaacaaagtttgtaagggttcagttctctgagatttttcagaatgtttccaacgaaatacattcctatgttaaaaggccagctcagccaagcttccttctggacaaataatgaattggttttatttgaagttttattctgtaaa

SEQ ID NO: 442144 - DNA, 1804 bp, Homo Sapiens
  misc_feature (294)..(294): n is a, c, g, or t
  misc_feature (1330)..(1330): n is a, c, g, or t
acgtacatgggaaagagtagctgagatgacctaaggcaacgcagcaagaagtggaggacgagcggtgacgcgtggcgggtggttatgaagaaggtgtgtagagcggaggagggaggaggtggtgagatgtaatagaatgccctcggctccaggagggggaggggtgggtgaaggaggagtttatacgtggggcagcggatggcaagaggagaaatgtgtttggtgggcccatgttcgtagatggccgcacccctccccacgagcactcgctcgggtgttgctgccgttctcatntcttttttaaagtatgcactcaaaaattttattttgaagccagctactttcatataccctgagacttcattatatggggcttgcctttatgcactaatgagttaaaatacataggataaaacactagcacctgtataaaaaagtctgagcaccacaacaaatcagttaactcctgttgacaattaaggggtacaataaaaagttgtgtcctttgcttcactgtgatccattgaatgatcattctgtctagttttctgggaaacattttctgggaaatgtttctgggaatgatcattctgccttgttttctggaaattcagactatttggctagtctagtaaatggtaatttacagccctgtgcttttgctgaagtcagtgtcaggcaaatcaagagatccccaatgaacacatatcttaaatgacagtgaaataatggttttttttaatgttcattactttaaaagcttacatttaggaaactcaagctttgcttttctataatggttaacttttccatattatcataagaatcaactttctgattaatatttctcccttttttcttaagaagtcaatagttcttcatatccacagtcatgagtcatttttgaggacatgccagaattaccaatgtaactgtgaggcaggaaaagtacactcccagggaagtcagagtaagcctgtttccaccgcagcacagcagtgagcacagctaggcagaattccagcagagtgcaaatcagcatcagagagagagttccagccagactggctttggctgtatagcagtccgtggtataaagtgaatcatgataaaagtaagaaacataacttcttggttggtatattatttttgtccaactcacactgcagtgaggcaggatttaaggtggcctgtttgacagacaggataatgaaacccaccagggcagacagagcactcagaatgcttccaaccaggctgctatgcaccaaaagcttggtcaaccttttctctgtggcgattgatagagagccagagatgataaaaaaanagggtcctatgaatgggtaagcagagttcaacagtgtagaagtcacttgggtaaaatttggagagaaggaagcagatgccaaaatgatccccaagctcaataccatcatgccacacaagatctggatagtcccaataactttgatttctgcgtgtagatgtttcttcaggctatcctgcccctggttggtgggttcgggtttctctgcttgggagaagttgatgacatttgatgggagcactatgatggtctcattgggaacaggttgtgatgtcatgatggtgttgccaactgtgcccgttggttccagctgagtcctcagaagctccaaagaggttttaactctggtttctcagtcccatcaacggtttctacttaccttcatcttctgaaagtcatcagcccttccttattccagtgtttacagctatacaggatgtgatactcacagattgtagatttgtgaaatgtccc

SEQ ID NO: 442145 - DNA, 913 bp, Homo Sapiens
  misc_feature (479)..(487): n is a, c, g, or t
agttatgtttcctagttcacagggttctttacagagatctcaaagacaaagcccattacaaaaaggatctgcatcatgggaaaatattaatgttgctatgactgtgtcaaaactgatgtgtaattgtaataaactatttctatttatatatagatctcaaaaaagataatcctttcatttacaagcattcaaatgatggccatgctatttttatatacaaatttgcatatatgtttaattcctgtaaaaagttccaaatacctttagacatatacaaattaaacaaacaaaaaccttgccctcatcaacttaacttcacaaatggataaaggcaattaatatactcataaacccacctaccactgcatttagtttgtgcaaaacaaaaacactgatataaaaattaagttactgctgctttaaaatttggtacttaaggcttttcactacaatttttctcaataacaagctttattaannnnnnnnnaaggaaatatggctcttctttccccatggaatgtgtaaattgcaagcaaacttatcttttcctcaggagatccaaagtattatttaatgctttcctatcctttaggtctaaactaacagtgcttgttcaagttcctgtttaaagcgatgagatggaaagttgatgaaagtggaagtccattgcaaatatatgcattctataaatgggaaatatttttaattaaaataaaaaatgatttttaaattttattcaagaactgtagtgaaaaaccttaattggttcatatatcctgtaataacacattgcaacaaaatgaagagttggaaaacaagaatctttatgcaagtctagtaacataaaaataacttataagtcccgggttgttgaggctcttcttctgctttgaggttataaacctctgaagta

SEQ ID NO: 442146 - DNA, 1366 bp, Homo Sapiens
  misc_feature (56)..(56): n is a, c, g, or t
  misc_feature (394)..(394): n is a, c, g, or t
gatgtagtttcgcggcgccgataagggaggagctgttgggttgtgggtgtttatancgccgccctttctctatgaccaaatcgaccacgcaaggcgcgcggttgtgttgtgtaggttcgcgtatctattctccctgccctctcgttcgacgcagcccatagagtgtgggcgcctgtaggggtccggtgtgcccagtgttaaattatggcgcaaggcggcccattcttatcggcgggcggatcagggggatgtgggtttgggtggcggcggggcaaaataaaaaccggatatattcgcgtatcaacgggccccaaaagggtatagactgaagagagctggaatgttgtatgaagtggttttgtttttggttggggtgtgggggttggtttttgtngcattaaagaatttaatagggagttgattatgttgtagaatcatatcgtcctattctgtgacacattagaaacataaactttagggctttttcatctccacagcatagaggtctgatcgcttctgtctaaaaacggggatttgctggcgtatttcagccagcttcttcaggtctatgtctgaatacacgattgcttcttctgtgccagctttggctagaacctccccccaagggttcaccacggtgctgtgtccccaggcaacataggaggctttgtcatcccgggcaggagaggctgtggccacatacacctgattatcaacagcccggcttcgctgaagtaactcccaatgggctggtccagtggtcagattaaaagctcctggatataccaacagctggcagcctctctgtgcgtagatttgtgcaagctctgcaaaccgcatgtcgtagcagatgcccagacccactctgcagtaaggagtatcaaatgtggagaaactatcacccggactcaatgttttagattcttgaaatgtaatttttccaggaacatcaatgtcaaacagatggatctttctatactttgctagtaaagttccatcaggcccaaacacagcacaggtgttatataatttcccagcatcctcttcagggatagagcctccaatgagatatatgctgcattcctttgctacttcagaaagcttctgtgtggattcaccaggaattttctctgcatattcaggaaaatatttcgctccatatggagaattaaagcattccggcaaagaaactattttggctccttgcgttgctgcctcccggatgaagctacaagcgcgagtgacgttatctgatttgatggaagaaatctgaagctggatgagggccaagcggaaagaggtcatgactctgcagacaagcaccacctgcggcgcggactgagcgctggagatccggcggaccccc

SEQ ID NO: 442147 - DNA, 1130 bp, Homo Sapiens
  misc_feature (917)..(917): n is a, c, g, or t
ggaccggtccggaattcccgggatgccggatctccagcgctcagtccgcgccgcaggtggtgcttgtctgcagagtcatgacctctttccgcttggccctcatccagcttcagatttcttccatcaaatcagataacgtcactcgcgcttgtagcttcatccgggaggcagcaacgcaaggagccaaaatagtttctttgccggaatgctttaattctccatatggagcgaaatattttcctgaatatgcagagaaaattcctggtgaatccacacagaagctttctgaagtagcaaaggaatgcagcatatatctcattggaggctctatccctgaagaggatgctgggaaattatataacacctgtgctgtgtttgggcctgatggaactttactagcaaagtatagaaagatccatctgtttgacattgatgttcctggaaaaattacatttcaagaatctaaaacattgagtccgggtgatagtttctccacatttgatactcgtatgtaccagataagtttgcctctttagcaatctcagtagaagacaatcaggtatttatttcttttttgtctctctccgatttcttcacataacctaactgaaagaccataagtgagaaaggcagagaatcatcacagatctggaaagttcgggcttatttgagaactaaggatttgacacgattttgccctttgatttgattgtagcttcctgttatggcttccagagtatacctattaggctacagttgagtacctcccatctagataataagcattcaattagaatgaatttctcatctttactccgctgatgtaaatgatgtctttatgagatgaaagtccaagtaggaatgagcttgtaaattatctctgtcctcaggtcctgtggtaatttatccctgtcaangttttgggatcattatgtcatgggaggattccccctgtcccaccatgctggaaggaagtaaacttttcatttgggcattttccgttttggaaacagctttactggcaaagtgggtcctggggcatctgtctacgaaatggcggttttgcaaagctttgcacaaatctacgccccaaaaaagcttgcccacctggtgggattatcccaggaact

SEQ ID NO: 442148 - DNA, 473 bp, Homo Sapiens
caacaatcatttgaaaagcgttaaacctcacaggtaaccacagaagtatttatgttgctacttagtgcagacaaggatttcaggaaatatgtacaaccaatattggcatatgctttctgaaaattgatttagcaacatttaccaactgtcacatgaaagttatatatgttgactaaatttcacttgtaagaatttattccaagtcaatagtggaaatgtaggcatgtgaggttggagatttctgtgttgctgttgtcagtaaaacaattagaaaaactctgcatctctaatatcagtaactggttacgtaaattcagcctatacccctacaatgtgtttactatgcaggcattgaaaataatgttatatagtgaaatagcatcatgataatagggactacattactttatagaagatagacttacagaaaaaaggggcagcaaattgacacttaacaattttctcctgttcca

SEQ ID NO: 442149 - DNA, 607 bp, Homo Sapiens
  misc_feature (55)..(55): n is a, c, g, or t
  misc_feature (57)..(57): n is a, c, g, or t
  misc_feature (66)..(66): n is a, c, g, or t
  misc_feature (68)..(68): n is a, c, g, or t
  misc_feature (77)..(78): n is a, c, g, or t
  misc_feature (82)..(82): n is a, c, g, or t
  misc_feature (110)..(110): n is a, c, g, or t
  misc_feature (112)..(112): n is a, c, g, or t
  misc_feature (134)..(134): n is a, c, g, or t
  misc_feature (216)..(216): n is a, c, g, or t
atgagcccagataataaatgaaagtgtgacttcatgagggctagaccatggtcantntgttctcantnttattcccnnaacncaggacagtacgtgcactgattagtatntnttgaatgaatggcatctgacangtaagctttgaaagcaccagatgttaactcagagcagagaggcactgaggggagctgaaaaagacaactcccagttatatanaatctgggagagctgactgaacatattgtcatattagaataaagatttaaagcagtcttcagagaggctggttagtacatccagtttatttttcccaaatttaccaaggagagaagctactgcgtcttcctgggggctgaaagagaagaattgagtgaaaggggaagaggaagaaaggccaggccattatagcaactgatcttcacccacaaagagggaagcagcaggcaggaaagaagcacccccatgtaaactaggcaataaagccccatgagtgtgacaggactatctgagagttgggacacccaggagatcaaccaaggagaactcaaggcaatgggttggaatgttataggactttagttggagagatgctcgtgccgaattcctg

SEQ ID NO: 442150 - DNA, 1425 bp, Homo Sapiens
  misc_feature (86)..(120): n is a, c, g, or t
cacaagtatcatctttattttacctatagtattttaaaaatcgcaacataaattcctccccagaaatattttttacagacacatcnnnnnnnnnnnnnnnnnnnnnnnnnnnnnnnnnnngtcttttggcaaaagcaaaatcagactaacaggaaacacatcagccctactcagacactatcttctggcctgcaatgaccaatcctatttgagacaaaagctctcaggctggtgagctgtcaaatcgctctttttcttccaccttcccaggatcattggtttgagccaagggtcccccatggtactgggctgtgattgccgcataggtgcagccatagatggcagctgccaacatcatgagacacacaatcccacacacaacgccagtgatgatgacagtggcaatggcatgacgcaggttggccggccttggcttgggtttgagctcgcactccaagagttctcgctcccccgcgttgtggttctcaggaggcctcaggaccacaccgtgggcagagccgggccactgagcctgcgaggacactggatcaggagcaggaagagggcagggctggtacagctcatgagggatcctaaggaggtcctttcccttccaggtgtctggtgattcacagatgatgccgtctgttagtccccctttatagacaaatttctccagccagagtttaagaccgagcaagtggcaattgcatttccagaggttgtccttgagaagtaaaagcctcacactgggcatggattccaggagcgctcgatcaagctgctgaagctggttttgttgaaccgcaagtatagttaggttctcccaagtctctcccaaggatgtgggaaggtggcttatgttgtttgatgacaaatcaagctccctcagctgagggagggaatggaaaagtctgctttccagggaaaggagtgaattctgggttagatttaaaacctgcaagtgctgaagcccatggaaagctccaggggccagatttgaaagggaattgttggacaagtttaaggtcatgagccatggcactgacctaaatgcaaaagcaggaagatggtgtatctgattatcttgtaaatgcagcgttcgagtctgaggaggtaaatgggaagggatttcggccagaccctgctggctgcagtctacaaaatttgtagatgactgacagtaacacttgtccgggcagctgcataccacctggagcaggacaatcacactggaaaacaggagcagttcacctttcatgactgagtcttcttgggcgtccttgctgacctcgtagaccctttaattaatgtgcagagcaacacacgaagggcctggcagactcagagcccagctttacattcagtctttctgaaccctgcccttgcttttcctcgtgccgaattcctgcagcccggaggatc

SEQ ID NO: 442151 - DNA, 136 bp, Homo Sapiens
gacttcatagcacttaatcactatctcaaactacattatttatttgtttacttatcatctgtctcctccaccagaagtaaactccacaagagtagggaccttgtctgtctcatcagtggtattcccagcacctagc

SEQ ID NO: 442152 - DNA, 396 bp, Homo Sapiens
tgcaggttcaatttatgtttgtctgagatagtctctgtttctccttcacttttgaaagataattttctgccagctgagtttttaatccaagcttttattttgcaaatcagtgagacttcgtgctttcaagatactgaacactgcagcctaattactgcttctcccaaaccaaaactgctttcaaattttggaagggtaaatatttactctaaatcttcaacaatcccttcttttctattcattgactcaggtatgtgagccagataagtatatgtaatcttcagctgagtatcttattagtgatttcctcacagttcaagagatgctcaggcgctgttgttcatttgtttctgtccagtctcctcaatatcctcttaaaaaaacaattctttgctc

SEQ ID NO: 442153 - DNA, 1711 bp, Homo Sapiens
  misc_feature (60)..(72): n is a, c, g, or t
  misc_feature (91)..(124): n is a, c, g, or t
agaagtgtttcttccctctttaaaaggagggggtccaagggaccggtggcaatttttttnnnnnnnnnnnnnccggccccccttttaaggnnnnnnnnnnnnnnnnnnnnnnnnnnnnnnnnnngttcattctccatctgaatctgttgactggagtgaattcagtgttcacaatcccaccatcaaataggaatcactttcttcagagtaaggagctgttccgatcttctcaatagttcacacaggtctctcagatataggcaccatgttttaagtctcacacaaaatgtctgtgtcacttaaattacacaatatggcagtgtttgtcttatggggacatactgaaaggggcaaagtagaaaacaacctgtttgcatgttatatgtgagtacattattgtactgtgcatgggtatgagggcattgcagcccttgttaaagaggaattccaccaattgaagcctatgtcagttcccagctgctcttggtgctgagagtatctactcatataaccttattttgttagatcagagccctcttcatctacagtttggctcaaatggtttgaactgagtttggtcgaactgagtttggtcgtttatctcttccatctgagctttatttctcagcctcaggatatgtggggtacttgaccgtttctatcttctctcgaactttgtaggagggatataggcccgtccttcccaatttcctgttgacacctttagaatagccatcccaatgatttccagccacaccaatgatatctccaggttccatgggaatttcatctgcagttcggggttggtgagcataaatggcaatttgattgtgggcattctggcccccaaaatagtagatgtcatctaaagaatggaagtttgcagaggcatcaggatgtagtgtttgcataatttcataagcaactcgacagacctgggatgaaaaagtacacactaggaagtctgcctgagagagaaaatgtatatccaggatcactccacgaagtgaattttctgtgtatcgattgtgcagtccagctgaccaggaaatagagttatcactaataaattcataattggggtactttgtttttgcctcctttaataaagaagggtcatctgtggccaaatacactctttttttgtccacttgcattctgcgtgcaagaagctgaaaatgttcttcaacatgcaccatgtactcttcaatgggatggaaggcagcttctgttcccactttgtctgtgcgtctgacatggactccaataactggatgtttgaagccaagcttcttggtggcttcttctatttctttttctagccaaggctgtgggcggatcaagtatttgacaaactgagacacccaccacactgcagggtcaccatgcactcgtacaagtcgatctgcgaggtcttctggtacagccaagggtaaatatggaggacggggatgaagactgtctacaatgggaagctcgaccacttgaacatttttgtccttcacttcacctgaccagtgtccagtggagatgccagatctgtctgtgcatgtctcacttacaggcctaaatacagtctcccatccaccagtagcatagcgccaattctgagattccaagatgagtgttcgctgggtgccatatgcaatcatgaagcagtagaccacatgatggagctgacagccatagccacagcctttgttgatattac

SEQ ID NO: 442154 - DNA, 823 bp, Homo Sapiens
gggtacccagataggacctaatagaggagctgcgatggccctcacctcaatgtttgaaagaaccctagatccacgagcccaatgagacatttgattgagaaagttatgttattcgagataactcagtttcctttgttctgctttgagattgggaagggctgggtctttaaaaacctgaagaggagttggtaagaggaaataatcttcaatgctttaagaaactcaactggttagaagtccatacaactactatgctggcatggacagagatgtttcctgtcacagaactgttcactttcccatagaagtacttcctgccaagccaactatataaagatgtaaatcagctcacccatgattgaaactgaaataatccttcaaaatagaagtaagacacctcacccaaaaagatcttttaaatcattgctagctgaactgctattggtcatagtagttggtggctgtgcaaagttctgtgggttaaagaaaggattaccctgcataccaaaagcagattgtcctatcacgttcatctgtgtccccattactgaactgcccatagttggagaaccttgaggaggtacaaactgagttaagccactgatttggtttctgttgtgataactggttcatgctaactttgggtttctgagggccaaagagattattaagggcagacatatctgtgggtctttgttgggtctgctttgcaccagcaggaggaacactcaaagcattgaagtttggcaaagtgggaggtgttcccagagtcatcttggtcactccaactgtgcttggactactgtagaagttcttggtttgt

SEQ ID NO: 442155 - DNA, 853 bp, Homo Sapiens
  misc_feature (22)..(22): n is a, c, g, or t
  misc_feature (30)..(30): n is a, c, g, or t
  misc_feature (43)..(43): n is a, c, g, or t
gaaatccacacttgaaaggggnaaattccnggcttggtttccnccattgccaggcaggtacggaccaaccccacacattgggagatgactccaagtattttccattacccaaaattatcacagggggagcagccgcccaagatggaagattgccgggtcaatgactgtatattacgagtaaatgaagtagatgttcgtgatgtaacacatagcaaagcagttgaagcgttgaaagaagcagggtctattgtacgcttgtatgtaaaaagaaggaaaccagtgtcagaaaaaataatggaaataaagctcattaaaggtcctaaaggtcttgggtttagcattgctggaggtgttggaaatcagcatattcctggggataatagcatctatgtaaccaaaataattgaaggaggtgcagcacataaggatggcaaacttcagattggagataaactcttagcagtgaataacgtatgtttagaagaagttactcatgaagaagcagtaactgccttaaagaacacatctgattttgcttatttgaaagtggcaaaacccacaagtatgtatatgaatgatggctatgcaccacctgatatcaccaactcttcttctcagcctgttgataaccatgttagcccatcttccttcttgggccagacaccagcatctccagccagatactccccagtttctaaagcagtacttggagatgatgaaattacaagggaacctagagaagatgagaacgaatatctatttccttatcttagccggagacctgctgtctaagtgagagtcagacacgagatcgattatatcggtaacagtgttgacttagaactgctatcat

SEQ ID NO: 442156 - DNA, 445 bp, Homo Sapiens
aaataaatccgggtgtgcctgaacctcagacctagtaatttttcatgcagttttcaaagttaggaacaagtttgtaacatgcagcagattagaaaaccttaatgactcagagagcaacaatacaagaggttaaaggaagctgattaattagatatgcatctggcattgttttatcttatcagtattatcactcttatgttggtttattcttaagttgtacaattgggagaaattttataattttttattggtaaacatatgctaaatccgcttcagtattttattatgttttttaaaatgtgagaacttctgcactacttataaattcagtctagaaggtagtaatttctaatatttagatgtcttagtagagcgtattatcatttaaagtgtattgttagccttaagaaagcagctgatagaagaactgaagtttcttactcac

SEQ ID NO: 442157 - DNA, 534 bp, Homo Sapiens
  misc_feature (453)..(453): n is a, c, g, or t
  misc_feature (498)..(498): n is a, c, g, or t
  misc_feature (512)..(512): n is a, c, g, or t
attagaaaaccttaatgactcagagagcaacaatacaagaggttaaaggaagctgattaattagatatgcatctggcattgttttatcttatcagtattatcactcttatgttggtttattcttaagctgtacaattgggagaaattttataattttttattggtaaacatatgctaaatccgcttcagtattttattatgttttttaaaatgtgagaacttctgcactacaaaattcccttcacagagaagtataatgtagttccaacccgtgctaactaccttttataaattcagtctaggaggtaggtaatttctaatatttaggatgtcttaggtagagccgtattatccatttaaaggtgtattgttagccttaagaaagcagctgataggaagaactgaagtttcttactcacgtgggtttaaaatgggagttcaaaaggattgccnttgagttctgattgacggggactaacaatgttaatctgatagggncagccaaattctcnggatcagtgtttgtggattgtg

SEQ ID NO: 442158 - DNA, 427 bp, Homo Sapiens
  misc_feature (180)..(207): n is a, c, g, or t
gaagggtctagctgtgggaagtggagcatgaactggaaataacttcctgcctctagcgattcatttttcttttcagcaccatttcagcgatagaggttttactgaaatttaaagagagaaaggcttgccgaattaatgtggttggtatttactgacagatcccttagatagcccacttcnnnnnnnnnnnnnnnnnnnnnnnnnnnncccttctaagacttctgtggcatctatcttcaatttgtcttcaattttggggaaatgctctttcttttttaatttctaagtttttagaaattgatgctctcagatatgtctgaattgacacagtatgatggggatctaagacctgcttttgtgcctgggagccatgaacgttacactaagcagtcgaaatttctgtgctgtagttttcttctctgtaata

SEQ ID NO: 442159 - DNA, 793 bp, Homo Sapiens
ttttaattagagcaggtatgcttttgatggtagggaagggatggaaaaaaggaaaagcaatagaaactgtccaattcacatcagttatccgtctgctttttcttgagagcttgtggaaggtgttaacgtggctgggaacatcaacaccttggcatgcatgaatgttaagtcaggaaggccagcgatcaccttgatagcttcttcacttaggtgctcttctcttttcggtttcctactggtagatgtgcttgtcttctctactgtagacatgagtcttgcaaatgcatcagtcactttgaggcttgaggtgggagatttccagcttaggaagttgttaactcatacaactccggatccacacctggggattgtggtgctgctgctagagctactgtcatccacgggccccaaagaaatcaaggtttcagaagagtggaacctccactagcatctaaagggttagtaaggccactgctactccagtcaaactggacgggtggtaagagactccctggaactgatcagatgtaacatgtgttccatatctggtgaacatggtggctgtctgaccgatggaagctattttttctgcagcagaaagtggtttcagtggttccttggtgggctctaacatacccaatcctgctgcatacatgggcactataacaggctgcttcttattgcccgtgaagagaatgtttcgggtgtctattcccaaggaggacaaaagcttcttgttgctatgggagccgccccactggtatctcaagccatgtgcatcatggatatcctg

SEQ ID NO: 442160 - DNA, 1571 bp, Homo Sapiens
tggaaaaaaggaaaagcaatagaaactgtccaattcacatcagttatccgtctgctttttcttgagagcttgtggaaggtgttaacgtggctgggaacatcaacaccttggcatgcatgaatgttaagtcaggaaggccagcgatcaccttgatagcttcttcacttaggtgctcttctcttttcggtttcctactggtagatgtgcttgtcttctctactgtagacatgagtcttgcaaatgcatcagtcactttgaggcttgaggtggagatttccagcttagaagttgttaactcatacaactccggatccacaccatctaaagggttagtaaggccactgctactccagtcaaactggacgggtggtagagactcctggaactgatcagatgtacatgtgttcatatctggtgacatggtggctgtctgaccgatggaagctattttttctgcagcagaaagtggtttcagtggttccttggtgggctctaacatacccaatcctgctgcatacatgggcactataacaggctgcttcttattgcccgtgaagagaatgtttcgggtgtctattccaaaggaggacaaaagcttcttgttgctatgggagccgccccactggtatctcaagccatgtgcatcatggatatcctgtagctcagtccacacatctagcaattccccactttcaggtaaggcctctctcgtttttattggcaaagtgcttgtttccagcaagtgcttcagggaagtaacttcctcttcagcatcagggacaagtatggaaggaaaacatgcttcgaaaattcgctccaggcggtttaataaagctgtctgaaactgaagtggctgattcctgtaaatggccactagcaactgctcctttggaagttgctgaaggtacactgtgcgttttgggggttccctggagtatcaatattttcatctgtcctatgtgactgccaggcttcctttcgatgatgagattcagtagcctgctggtctccaaaagcagcccaagaacaactatctttttgttcatcctcaaaagcattccaatctacaacttggctaggaccagctgaactgaagtctgcaaaatcatcagagtcttgaaaaccattgcagtcatcctgaatatttggcacagaatcaaaatgtccaatctcaccttcttgcccatttttaagttttgcaacaggttcagtgcctgttccactagattttcttgccaattgacattcttctgataaattatcagaagtctgttttaggtctgactttgttaatattgtctcctcttggcaagaaacagcatttatatccccaaattctccaaagtcatcacctggttcactaaaatgtggaaagtgctctgaagactcttcaaaagtggcatcactcattgaatcttgagtaccagtaacaaaaggtggagttgagccactggcagagccaaagtcaccaaaatcaccaaaatcatcttcattgatatcattgcaagtcacaaagtcattactactatcaccattttttacacttaaagaatcatccaaatcattttctt

SEQ ID NO: 442161 - DNA, 1040 bp, Homo Sapiens
taacaagaacttcctgactggctgtcaaagactttcttcgcttttgactttgatgctgtcaccttcaaggcaccagtccaagtgctcattaatctgagactccagaacttcattctgacaaactgggcaattaaccattttgctctgactggatgaactgctggaattctgagctgtggttgtactatactttggatcattaccactgctttttatttgctctttcttgataaaaaaattgtcaaaaacagtcttatcttctagcctaggtcgtttatttgggaatgtatcttcagacccactcacatcctgggattgcatcacagatgctgattccgttacttttgaagaatttcttagggatatcttagaatatgaaacccttctctgagaactagaagagactgagtttttagggatgttgccaactgttacacttatccttggagatccattcacacctctgaaagccttttggttggcaaatgatactctaggaaagtagttgcttagaacattttggtgactgttactaacagcaggggagaccagatgagaatttttacttgaaccattctgttcaaatttcaccttgattttagaattaagtcttacagcatttgctgaatggttttgatttaaaagatcttgggttttattaatggcatgtgaagtgatcagtttcccaggtgaaggtaaattgcttgtttctcctagaacatatcctttcccactaaaagggattactagctgggcctcacctctgttgggtttatctttattctctgcggccaatactggttcctttcctagttttgcctttcctttgcctttttttgagtaattctctggttccttgatttttatgtaagtgcctccacaggttttctggtgctcagcccaccaatagtcatgagccgagggttccctgttagtagctcgtttgacatagccgtaatacggtggcctgtgctggcacggcccattgcagcgccaccagtgtcgccgatactcatccacctcatcgtgaaaagtatggt

SEQ ID NO: 442162 - DNA, 887 bp, Homo Sapiens
  misc_feature (52)..(104): n is a, c, g, or t
  misc_feature (656)..(656): n is a, c, g, or t
  misc_feature (801)..(837): n is a, c, g, or t
gccagatctgcatcctattcagcaaggtctggaccttagccctggtgagagnnnnnnnnnnnnnnnnnnnnnnnnnnnnnnnnnnnnnnnnnnnnnnnnnnnnnatgcaggagcagtggccctctactagaggaccttccatggcactctatctcagccttagagatagttcctcctccttatatcttctattcctatgttctttgtgctgagacaaaattgaggaagttgataaactagaacttttgttctgtgtctcctgatacgtactttggatgatttcactaggattgttctgacactgatttcttgtttgatgtttcaaagaacacttttctttactattatttttaaaagaagtaaaacatttattaggtattaagtttttcccatcactgatgtctcctaacaaggaacattttgtgtgagaaatggaaactgaggactcatccttatttttcttcaacaaatttttgtcttcatatgaactcctaaacactttagatgcaaccgaactggagtcatgcatgttgaatgacttgccgggggatatgtgatgcttttggatcattgtgcttcaagtgttgagcaatccttgcaataacatcttgccggttctggagtaaagagcctatcaaaggattagtctctccacnaggcatatgagaataaaagtcattagaaatacaagtttcacttcgaggagtttctggttttagtcgaattttcccctcattggtgtcttctggggaactaaactccgctctcgacgaattcgagctcggccgatttggcctgatnnnnnnnnnnnnnnnnnnnnnnnnnnnnnnnnnnnnncgccgccaccgcgtagagctccgattcgccctatatgagtcgtatacatc

SEQ ID NO: 442163 - DNA, 886 bp, Homo Sapiens
atgtctatatttatttatttataaattatttggatcgggtactataataacaattacacacattgtaactcctacacaatttgaaattttcaagttaagacaaaggtaactatatatagaagcagtatgttttctgaacccttacagattgttttgcacactcctggattacacacatctcatcaatctcaagaataaaatcaaagtctttggcttgacagccttccacaatctgacctctgttttctcgccagcctcatctcctgtcattcacaacatttccaggcattccaacccagtctgaacttttgcagtttcccacggtgcgctaggctctttcttcatcagcatctctatgcatgctgtctcctgctactggaatgccctcattctcgttgcttcctgttttgaagaaaagctgtgataccgggcaacagtgtttaagtatcacacgggtagttaaaaggcaagttggtcctatctgacatgtggaaatggccagctcgttagaaggcagtacctggtgaagccttgtcaccacatcgaatgattttgaacacttcccatcaatcgactaccgactaacaaaaagaaggacttgattcccggcaattttttctcttctgaactgagcattcccgaaatccagcttgctgaacgcgcagatgcagggtgagaggcaccccaggaaaaatggaagggaaagtggtacaagttaaaacagtcttcgtggccgcagagacgatcgctacctcggccatggcagatctgggggtccggggcgggggttcttccctgatacccaccgggcacgcgagttcacgccagcgacagtggaaagccctcccctcgcagcgcgctccgccactagccgcaccccgcagag

SEQ ID NO: 442164 - DNA, 896 bp, Homo Sapiens
tttgtccgcaaaaatactctttttgcctgtgtgttttaattggtgacctggggtttcacaatgtgcccaggttggcttcaagcaattctcttgcttcgcctactggccacttgggaatataagcattggccactgtcctggccttattttgtaaaatacagaaaatcaggaagaaggtacctaagtactgttttgtaaccaataccagagtatttcacaattttactgtcttactttcaaaatattttaatccttccaatgagaattacacgtaatcataagtaggaatataaataggaaagctaaagagattagttgagtaaaatgaatatgacatttaaaattctaacaattatttagtaacagcaaaggtaaatctaattcccaaatttcaagtgtccctaatattacctgttttgaagaaaagctgtgataccggcaacagtgtttaagtatcacacgggtagttaaaaggcaagttggtcctatctgacatgtggaaatggccagctcgttagaaggcagtacctggtgaagccttgtcaccacatcgaatgattttgaacacttcccatcaatcgactaccgactaacaaaaagaaggacttgattcccggcaattttttctcttctgaactgagcattcccgaaatccagcttgctgaacgcgcagatgcagggtgagaggcaccccaggaaaaatggaagggaaagtggtacaagttaaaacagtcttcgtggccgcagagacgatcgctacctcggccatggcagatctgggggtccggggcgggggttcttccctgatacccaccgggcacgcgagttcacgccagcgacagtggaaagccctcccctcgcagcgcgctccgccactagccgcaccccgccgagct

SEQ ID NO: 442165 - DNA, 1868 bp, Homo Sapiens
  misc_feature (72)..(108): n is a, c, g, or t
  misc_feature (1741)..(1804): n is a, c, g, or t
atcccgtgccggtacaaaacaccacacagatataaaactatggtaaataaaacatttcagccaagactggcnnnnnnnnnnnnnnnnnnnnnnnnnnnnnnnnnnnnnatttcaaaacagctaacaattagtgtcatccttagtcaaaactgaagtcacgctaaccttaaaactacaacactctgaatatatgtcagcactatgcctcccaaacaatatttaaaatatatttaactttcaaatacatttataaggtacaccaatagtgagaaaataaagtcttaaaatttaaatacaaatcaccatataaaaaattccaggaaaccacagaaaatcctatcttacagaagtccaggcaaagcctgtcctcagctggttctgacgcacagcattgctgtgcgacacagctctgcctgttgcaaaactgtcagcacgcacagccaaatgacagctgcgtcatcaagagaaagagagaatggatgcagggggcacgtgctcccctcttcactctactcaagcatcaagacccgaagctactttgctttgctctagaaaaccatagggcccatcaccctgttcaaaaacaagtaaacccgtcccagagcctctccagggcagatcatttggtgctctgctccaaggcagagtactccgtctctgagactctggaggcatcgatgagcttggtgagccctgttttggccgagtacttgaagatgaaggccttcatcagctcgtacctgtagttgcgattgatgaagctgtagaggacagggttgacgcagcagtgcaccagcgacaggcactgtgtgacatgcagggccgtgaagagggcgtgctccagccggcaggtgaaagggatgtagtgcaggatggagaagatgtccagcagcaccgccacgtggtagggcagccagcagacaaggaagaccaccacgtaggagaagatgatcttccggctgctgtgcttctcctgttcactggacgccgagatggctctggccagcaggaagtagaggacagcgataatggagaagggaacgggcaaagcccaagacaacggagaccagctccatgccgatcagccactccttgatgctgtgctcggggtagaaggaccggcagtaggtctcattgttggacgcagacgtgacggtcttcaggtagtaggtgtcaggcagagacacgcagaaggccagcagccacaccaggatgcagacgacacggcgtaccatcttcttcctgctgctgggggtgttggtgaagtaggtgatggagaggtagcggtccacgctcatgcacgtgaggaagaaaatgctgccgaagaggttgatggagaagatgaggtgtgtgactttgcacgtgagctcgcccatgggccactggttgtgctgcacgagactgaccacccagactgggatggtgaggacaacccacaggtcggcaatggccaggttcaagatgtagcagtgcgtgtcatagcctgtggtcttggcctggatattcacccagaccaccacggagttggcaatcatgccgatgacgaagatgaaaatgtaaatgaaggagagcgtgtagagcaggacgcttttgttgggcatgttgggacacatcaccgtgtccaccacgatgcagtcgctgctgttgcatggccagctgatgtccgagaagttccctggctctgagtagtcgaagagatgcagatccatcgttctgaggcgggcaatcaaatgacctccgnnnnnnnnnnnnnnnnnnnnnnnnnnnnnnnnnnnnnnnnnnnnnnnnnnnnnnnnnnnnnnnncccttagtgctgagcactttgcaacaactggagctctgctggctgcagacttgcaatcccggga

SEQ ID NO: 442166 - DNA, 672 bp, Homo Sapiens
ttttgtgggtctgtagaaatgaattttatttatttaattcagatctttgagaaatttacacaaaattgcagtgaagatgaaggcaacaaaatattttcaaactgaaacacccagccgtcagctattgtggatactgtcgagagcaaaaaccaccagtgccagtcagcatctggtaaaggaggttttccagctcggtccaatcccttcattttcttggcaagtaagaggctgtctcccatttttcaggcaaccttttcatcatttctcatctcttctttcaatgcaccacaagagggcagtgttttatcatattctccttgaattatataataccaacagtggaatgagatgacttccagaagtagaaattgactattatgccaaaactgttcaccaaagttgataaaactctaggtttacaattgtaccccaaggtcatgggactggaccccatcccatggtaagtcatcagtttagcaatgattgagagaatatccttctgaacatttgtgtagatcagaaataaagtattttttgtggaagactatttttaagtattgaaggtactatttcctttcttgaattcatattgcagatgtacggtgtggatttattggtttatctctgcaaaccttaaagtagaagattgcaagggccaggtgtggtggatca

SEQ ID NO: 442167 - DNA, 1410 bp, Homo Sapiens
  misc_feature (294)..(306): n is a, c, g, or t
  misc_feature (1325)..(1361): n is a, c, g, or t
aatttttatgatttattttacaatgtttcccctcccctcagccgcactagaatgtcagctccatggggtcagggatttaaggcagaagagtgaaaatgcccaacctaaaacacaagatctacaaaagcacctggctacatggggccaggctgagcaactgtatgttgtctacaaagggcctcaacctggcctcacatggccacgtccagcaccaaagacaaatgtacagggaaggggagggtgtgaggtccaacactcacctatagaaacatgtttttagctgctttacttccnnnnnnnnnnnnnggcatagctctctttttcaattaaacagaaaactacataattacgttcaaacactcactgaagagcctgcctcatgggaagggcagggctgtcgtgggaagagtcagctgcactttggcaccatctcaggtgcctgtccaagccggatctgaatgggactggtcaagtgaggggtcagtcctgcagtctgcgctcacacctcttctccagatctgccatctcctttaggaccagggccacgctgtaccgcagctcctggaacttggctgtggggacctcaaagcggtatgctgacccatctgaaagcttcagctgcatcaggacgctcggctgcagggagcgagccagggcactggtggagattgctacatccacccgccaccgaaagtcagcaacatgcggcagccaggccccctgctgctgggccacagaatcaaggaggggccgctggctcccaaataccacgctggccaagtccccgaccaggtcttgggggatgcagagctcctggagctggtccctgaaggtgtcaggcttcaggctggtggggggcagacggagggcctgctggagcagtgtgtgcatgcctgccagcagggcacccagctgctcctccggcaggttggcgctgaccccaagacgctgcacagcctctcggcagtcctccccctgcaggctgctgaccacaaacttcagcaactttctgaacgtgctcctgtctaggtcccctagtagccgggccattgctgccacctctggaggaagctgggcccccaagaaactcactcggccactgtgactatcaccaggatgatgcaggtatggagttgcagcccccacagcagacattgctgctgcttcctctttgatcagccagcccaggaggtcggtcccagatgcagatgcctggcgccggcaatccccggctgatgcagccaaaagcgggcctggtccccggaagcgccctgagagccacttccgctctcgacgaattcgagctcggccgatttggcctgatnnnnnnnnnnnnnnnnnnnnnnnnnnnnnnnnnnnnncgccgccaccgcgtgacgcgcgagttcgccctatagtgatcgtatcatt

SEQ ID NO: 442168 - DNA, 1100 bp, Homo Sapiens
gaatgcttttgtcataacccgcttactatttcggttacacgtctgtgaggcccttccactggaaaggcaggctcttctgggaaaagttcacgtgaccttggcaccaattcacagggcctgctcacagccggatttgaatggggacgggtcaaagtagggtcccagtccgccagtctcgcgctacaccgttgtggccaagatcgccatcgcctgtaggaccacagggcccacgggtaccgcaagctccgggaacttggctgtgggggacctcaaaagcggtaatggctgacccaatctggaagcttcagctgcatcaggacgctcggctgcagggagcgagccagggcaactggtggagattgctacatgcacccgccaccgaaagtcagcaacaatgcggcagccaggccccctgctgctggggccacagaatcaagggaggggccgctggctccccaaataccacgctggccaagtccccgaccaggtcttgggggatgcagagctcctggagctggtccctgaaggtgtcaggcttcaggctggtggggggcagacggagggcctgctggagcagtgtgtgcatgcctgccagcagggcacccagctgctcctccggcaggttggcgctgaccccaagacgctgcacagcctctcggcagtcctccccctgcaggctgctgaccacaaacttcagcaactttctgaacgtgctcctgtctaggtcccctagtagccgggccattgctgccacctctggaggaagctgggcccccaagaaactcactcggccactgtgactatcaccaggatgatgcaggtatggagttgcagtccccacagcagacattgctgctgcttcctctttgatcagccagcccaggaggtcggtcccagatgcagatgcctgaggctgaggagctcgctggctttcgtcggcgtccgggtgggcggcggggaaaccgcgagaccttgaggatcagcgcggagcggagccgagcgggcgtccctgtctcgtgtggacggtctgcgcctccagggttttgagagctgccccgtttcccctcctgtcgggtggcgtccggcgcgcgtgactcccc

SEQ ID NO: 442169 - DNA, 712 bp, Homo Sapiens
agcgtgggggcttccggggaccaggcccgcttttggctgcatcagccggggattgccggcgccaggtgctgggggcgactcggacagcgggagcgtggggtggagtaggatggagtctccctcccgagctgggggtgtgggcctaggaaaggctgcttcgccgctgtgttcggagagctctggatactgcggggcttttccgcggaggagcgcccgccggcatctgcatctgggaccgacctcctgggctggctgatcaaagaggaagcagcagcaatgtctgctgtgggggctgcaactccatacctgcatcatcctggtgatagtcacagtggccgagtgagtttcttgggggcccagcttcctccagaggtggcagcaatggcccggctactaggggacctagacaggagcacgttcagaaagttgctgaagtttgtggtcagcagcctgcagggggaggactgccgagaggctgtgcagcgtcttggggtcagcgccaacctgccggaggagcagctgggtgccctgctggcaggcatgcacacactgctccagcaggccctccgtctgccccccatcagcctgaagcctgacaccttcagggaccagctccaggagctcttgatcccccaagacctggtcggggacttggccagcgtggtatctgggagccagcggcccctccttgattctgtggcccagcagcagg

SEQ ID NO: 442170 - DNA, 367 bp, Homo Sapiens
  misc_feature (337)..(337): n is a, c, g, or t
  misc_feature (351)..(351): n is a, c, g, or t
aaggcagaagagtgaaaatgcccaacctaaaacacaagatctacaaaagcacctggctacatggggccaggctgagcaactgtatgttgtctacaaagggcctcaacctgggcctcacatggccacgttccagccaccaaagacaaatgttacagggaaggggagggtgtgagggtccaacacttcaccttggaggaaacatgtttttaggctgctttactttccaaaaaggaaaaaaagggcataggttcttcttttttcaatttaaacaggaaaacttacataatttacgtttcaaacattcacttgaggagcctggccttctggggggaggggncggggctgttcgtngggggaggagttcagc

SEQ ID NO: 442171 - DNA, 658 bp, Homo Sapiens
  misc_feature (536)..(544): n is a, c, g, or t
gaagtacgacactatcatttattgatgggttactatgtcccatgcagtggagtacttagtgtattgttagtttttcaataatgaatgactattatcaatgtataatattacccctatctttggagaggaatatcatacaaatattatggtatatataaaggaaaggatatcatttctaggaattttcagtaaaagactggcaagaataaacatatgtaaacttgtaattcttcacaaataatagcattccttttattttgacccatcttaaagctacccaaattagaaagttacatttggtaaatattttacaaccatttcttatttactcattgcttaccgtgcacactaggtcaatatgctctattgttttatgggtcagttattcagtgacagaaagattattttgacaaagatctggtagtaacaattgtgcacactgaacattttttaaaatctgggaataatgtttagccacaaacttgttcactattctgctgttccttgtcagcaacaagaacacctttgcaaagacnnnnnnnnnttacatcttactatagtatcagctacctaggagtagattacataaagataatggattgaatggattgattcaattttaactacctctagaatgatattgaaaaaaacaattttt

SEQ ID NO: 442172 - DNA, 568 bp, Homo Sapiens
  misc_feature (438)..(438): n is a, c, g, or t
ttttttcagtatttctttttattgcattcgttgtctaacaacaataatactcattggcaagaaatttatttacactaacaaattaaatttaatcacaggtattgttagattggtcagaaaacaaaagaccactgtgatattttgcttgaatgcctctgaaaaccaaagagtaaggaatgtcatttgaaactttttgaacaatctagagaagtacatattaaccaagcacaagagaacaattcagacgtggcactattgtctcttccatgcaaatgatcagacatcaaaatgtacaaattaaaagcttaggtaacatgctatccatacttatcagacttaaaattattttcaaacaattcgtgttctttactgatatacaaagaaagctgaaaagaaatcaacttcttacagtggaatagaatttattctcttttattntcagctgcccaagtttgtcagtaaggtgtagcacgtgtacaagtggttgcaacaccattaaaaaatataaatgcagtagttatatttaaaataatgtgaagcatgttgttgggagggtgtatcctggctg

SEQ ID NO: 442173 - DNA, 435 bp, Homo Sapiens
  misc_feature (206)..(206): n is a, c, g, or t
  misc_feature (224)..(224): n is a, c, g, or t
  misc_feature (414)..(414): n is a, c, g, or t
ctcagtatttctttttattgcattcgttgtctaacaacaataatactcattggcaagaaatttatttacactaacaaattaaatttaatcacaggtatttttagattggtcagaaaacaaaagaccactgtgatattttgcttgaatgcctctgaaaaccaaagagtaaggaatgtcatttgaaactttttgtaacaatctagagnaagttacatattaaccanggcacaagaggaacaattcaggacgtgggcactattgtctcttccatggcaaatgatcagacatccaaaatgtacaatttaaaaggcttagggtaacatggctatccatactttatccggactttaaaattatttttccaaacaattcgtgtttctttactgggttttacaagggaaggctggaaagganttccacttcttacgtggggtt

SEQ ID NO: 442174 - DNA, 200 bp, Homo Sapiens
  misc_feature (192)..(192): n is a, c, g, or t
  misc_feature (194)..(194): n is a, c, g, or t
  misc_feature (198)..(198): n is a, c, g, or t
ctcgtgccgaattcggcacgagggaaaatttagaaagatttatggtgtagaaaatacttttgagatctttgtatgaaaggagtagaatcaatggggggaaacactgctggtttcatttttgtaatcaccagtggagcgtctgatcatcctggttattatgtgataggtggctcacattgatttgtgattttnanacanat

SEQ ID NO: 442175 - DNA, 1098 bp, Homo Sapiens
cgtaaatgtacttctggttggcagcagctgcatcattataacacaaaagcaaccttggctaactttatatgtttactaacattaaactattttcaatgcaggaaataaatatttccccaaagaggaatcccccctcaattactttctttcagacttaacaaattggagtagatgtggttttgctcattcttttatctgctggcaactattttaagtctcctgtgcaaggcagattccgatgacctcgggaaagtcacaggacctcagtttcttcaatggtaaaagcaaaggcagtggtttctaccgtcctttctcactgcaccattcagcgtcagtgccctcatgagaaacacacccaaagcccagtgtgctctaccccaaaacttgtgaaatttctagagtctcaaaaaagtgaatatgtttaaggcagtataataaaagccaggtggacgacagttcctaaagttaggctggtagtggcgtgaacaggggtcttttgggccaccctgagacccgccccacggggcttctcgatccacgtcttggcttctcgctccactttcacagaacgtactgaatcaggggcctgcatccccgtgccgtgccgagccgacggagaaatggactcctcttctcgctcctgtggagtttcgtcttctgggtgagtgtggcaccgggtcctgggcgggtgatgtctgtagttggcgagcgatcctcagccagaaaactggctgcgcacacaggcgcagacacgcgaacatgttcctgcgaacgagcttgggcgcatgttttcctcccttgctttctttaatgctcagagaccataaggggatttatcgagaagcattcggtgcccatgcccggtttggaaccgcgagcacaatatctggttcctttgcagtacggtggtttgctcttgagttacgaccagaaaccggaacagaaggaaagggagaagcaggggaggttcggggacgacggcgctccgggcagtaaggcagtagcttccaaagcgtggaggatgggactgaggaggagcagaatacggagaaagagggaagctgaggaaaaatactcacatcccaagaattccggacc

SEQ ID NO: 442176 - DNA, 513 bp, Homo Sapiens
ggcattacaaaaggaaaacacttctgggccttccgtgtggaaccatattcatacctggtaaaagtgggagttgcttctagcgataaactacaagaatggctccgttctccccgggatgcagttagtccaagatatgagcaagacagtgggcatgacagtggaagtgaggatgcctgttttgattcttcacaaccatttaccttagttactataggcatgcagaaattttttatacccaagtcacctacttcttctaatgaacctgaaaatagagttctccctatgccaacaagtattgggattttccttgactgtgataaaggcaaagtaaatttctatgatatggatcagatgaaatgcctttatgaacgccaagtggactgttcacatacactgtatccagcatttgcattaatgggcagtggaggaattcagcttgaagaacccatcacagcaaaatatctggaataccaagaggacatgtagttgaaacatctgatgtgactcaggata

SEQ ID NO: 442177 - DNA, 611 bp, Homo Sapiens
  misc_feature (515)..(515): n is a, c, g, or t
agaggttttaattttaacgtagtccattttaataatctcttcctttgtagttagtcctttctgtactttccctattttgtgatcatgaagacattcctttatgttatctgttagaaattttatttatctttcatatttatattcccaatcctcctagaactgacttttccgtgtgtaatacaaggtaggggtcagttttatttttgtattgtcctttatcaaatatacttgatcatttttgttggtcttgtctggtcattaaaaaatccaattgtttctttaaacatgtatgattattttatttataaccaggtagagtatttataataatatagatgttaagaaagaatgtggccttaggtctagactgcttgtgttcaaatcgctctcatgatacattcatttgtatcaaatttgataatgtataaagatcaaatcaaggtaattggggtagccatcccttaaatatttcttttatactaggaacatttgaaatattcttttctaagtatttntaaatacacaatagattatgggtaactataatcaccctactgatctgtcaaacactagatcttatttcttctactcaaatggatatttatccccat

SEQ ID NO: 442178 - DNA, 858 bp, Homo Sapiens
  misc_feature (65)..(73): n is a, c, g, or t
  misc_feature (266)..(275): n is a, c, g, or t
  misc_feature (277)..(294): n is a, c, g, or t
taaaaaattttttaattttccttagaggtctaaattttcgtaggtaggtttggccacaattttgnnnnnnnnnagaaagagtagggttccttcccaaaagattcccaaggttagccagttttcccagtccggggggtttaaaaagggcgggccagtccctaagttattaatcgggctcccttattggggaccccttgttccaaaaaagctgggtacgggtaaagtttgggcccctcgaaggattactctagaggcggccgcccctnnnnnnnnnngnnnnnnnnnnnnnnnnnnttaatagcttaagtattttatttgtttgcaactaagcttgttaacactatataatgaaaatgtacaaagaataatgttgcagtttttggttagatttaagtcaaagacattcattaataaggaatcttcgaatgtgaatattccagaaatttctctaagccatctgatcacaacaactgtctctgaatattaccttactttggaaggtattggcatacatttgaattaaactcagaatttttcaaaataagccctaattaaaaaaactattctatattcaaagtaaaacaatattaatagaactttcctttccagaaacaatgaaggaaacaaggcattttgtaaaatgtggtcctgaacaagtcacagtaaaaaataaatgtatacttaacttccacctcctcaaaacagaggctactttctgttcctcagccttggaaacaaggtgaagaacagcctatatgcgacttcgggcagggggttgccaaaacaaagctgaagcagttgaccatggacacctcaaaagaatttgggagaacccgaccaaaggatccaaattctatg

SEQ ID NO: 442179 - DNA, 438 bp, Homo Sapiens
  misc_feature (18)..(18): n is a, c, g, or t
  misc_feature (161)..(195): n is a, c, g, or t
tgagccggctccatttgngtggacgaggaactgtcgtcaaggtctcagactgtggcttctgcacctggttatactttgggatacgagtgagctccacttagcttcgttaagattagaaatttccatgaaacacttacccacatataaattctgtgtaaagnnnnnnnnnnnnnnnnnnnnnnnnnnnnnnnnnnnaaaaagtgaaataagaggaaaaactcttataaaatataaggtttaacatacgagagagcgaggaacaccccggaggctgccggtgcgtgtggcttcatgtttctgtgctacatgagtctagtgtcctcatcttccattgtgacaacccttctccccccatcacactgtcaatgagctctaggcaaagctgccccgtttgcttttaacctaagggatgctgtggtttggttcgtccaactatat

SEQ ID NO: 442180 - DNA, 635 bp, Homo Sapiens
  misc_feature (34)..(34): n is a, c, g, or t
tttttttgaaatatggaatgataatagccattcntcacgaattgtgagatttaatttatacatgtcaagtggttagagtaatgcatggcaaagatagcaagggtttttgagtattgcccggatctatccacgggaactatttctcaaggagcacatagacaccaagccttgggtcatagcgtcattttcattcacattgcacctgaagtgagtttttatgtcttttaggtaccagggtatgatgcaaggagctgggctttagttataaacacttgaatccaagtccaaattgccaaatttgccgtttcactttaggcaaatatttcacctctctgtgcctcaaattttctaacctgtaaagttggaataatatctacttcacagggctatttaggccaaaaattacacagttaaactctcagcatcatgcctggttcatagtagacacaccataaattttaattccttttcacttcttcccataaggcaaacaattacagctttacaacattgccttagagcccaaccatgactagaatgtgcaaaattaatttcatttttaaatctcaaatcccacaaaatgagtttacttaaaatgaaactcatttatatttaccacagaaatctaaatttcc

SEQ ID NO: 442181 - DNA, 1009 bp, Homo Sapiens
  misc_feature (796)..(796): n is a, c, g, or t
tctgctacagcagaagtggaagaagctcttgtcttgtttggcatttgtcccattttttggctaataattggctttgaatttctctgtgccctgcttaccaattatagctttctggattggctgttcttagcagtgcaaatgtcaatgcaaagaagcaagcaggcggctactttctgggaagaagcatagtccgtgctcacactggatataaatctgcaagatttgggggtttggcaaaataggggtggagggaaagctgccatggctgtcagaaattggggctttttgaagaaaagcttgtgtaggcatcagccactggctggccagaattccatgaatggaagcaggtgcccgagtgatctggggctttacatgtggatataaatagaagccgggagcctgaggctttgctttaggaaaatcatgagccagaaaacagaggaggtgattgtcagtagtcacctcacgccgctagtgttttctaatactctctcgaattgtcaaagcaaaggaccttataacagcaacacgtgtgtgcactcgaagcagcgagcttcccttgggaaaaggagcctcttctcagcagagggtcccagcctttctgtccttccccatcggaatgccaggctctgtgagtttggatgttggacattgccacctgaattccaggaggcccgggagctccagtgatggccttgtccccaaaagagtggtgctgttctcagagccataaatgttccactgaaagtgtctgtcccctgcttacgctggctgcacttgcttgaaggaggctgtntaagggcttctaatacgaagacaaatgaaactgtcaaattttatccttaagcatgtgagtaaagtttgctcatcgcttttactattgatgtatagctttaaaaattcctaacttaaaaaatattttaatagtaaactttttaccagggaacaccttttatacttaaattagcctccttttaaggctatggagtgctacatgaataaccgggct

SEQ ID NO: 442182 - DNA, 765 bp, Homo Sapiens
  misc_feature (221)..(221): n is a, c, g, or t
cccttcgaaatgcttatggcaaaggttcaccattgtcgaaaagggtttacagggagccctagctcatagaaccccagatgttcaaccagcagctgaaggaaaagtccagcgatttgttacagcgtaccatattacaggctgaacaactacagggcttggagttgatcttacatgctatgtgaccttgggaaaagaacttcactctttgagccgtggtttcntgatctgtaatcagggatcatgacacataaagttcctcgtatcattcctggcacatatataccaattataacactattctaaagtgtttactgagcttattattaaccataatttgtaacttaacaatgcttctaaggatctctactcaaatttccctaattcaggtattgctagactatataggaaccactacaaacagagaagtttttaatgacctggtccatttcaatgcatatatcagtcatgatagaaaatcaagggttgttttgtgctttccccccatactaaatagaggttttattctcctacaagatgaagcaaactacagcattgcccttagcagattctttctgaaacacagaatttctcaaatcagcctaaatgttaggaagggaaaaaaaattaccaaaatccaccttttaggcaataaacaattgcttcaataatgaattccatatcaacttaaaagatacatttttcttctagaacagccattcctttcatcttgtaattagactttttaaattttcctgcagcccgggg

SEQ ID NO: 442183 - DNA, 800 bp, Homo Sapiens
gactctgtgagctttctcagaagatgtggattctcttgtctttgtatttggttctggttccagcttagataatcttttcttatccaccactcttttaactcggatggctctctgttctgagtaaagtttacatactcctgttgcagaagaaaataccagaagagagactgcttaaaacagcttctcaggcaaagccatcattaaatataatgagatactacagtcttcagctagcaaagctaaattctgcatcacatctattgtgaaatgttacatttgacctttaaaagaaaatgaaatacttttcaagtaatcgttcaatgaaatccaaaacagcggtcctgtgctccttcacttgctgggaatgtatctccttgtgagcttctgttcgtagttgctgaattgcttctgaacaggtcctcatgaatatctgggcatcctggtctatctggtctcgttctgtgtctgtcatcctcccatattcagacatggtatggctataagcattaatataatctttcctgtgttccagaagaaaatctctcagtttgccaatgtgagaaatcacttcgcgggcccggctggagaagtcgcccttggggcgggggctccggcggaacagctcgtcccggctgccatcgaccccgccgcccaccgccactcccagcgccttgttccgcgtcttcacggtcttgacgctggcccggaatagcagcgtgatgtccaccgccatagcgacccgcaccctcagccccacactaggcccgcccacgtaagcagccggcgaccgcggcgcgaac

SEQ ID NO: 442184 - DNA, 1038 bp, Homo Sapiens
  misc_feature (73)..(82): n is a, c, g, or t
tgtgttttttaaaagccccctctctcaagaggtgggggcggtggcccttcccttgggagagtttccaaggttnnnnnnnnnnaaggtaaaccgggggggaatggccgtccaattctacagtcttcccggtggccaaaaccctttttcccggggaatatttctttggagtcctggaaattcttcaacccccttctccccttggaattgcgcctccacttcattcaaaccaagctgttcattttcacccaaataatccggtgattttccctgttcaaaccatttgtatttcttctggggataactcatcttcgcctttgccatctccccacgttcccaattcaggttgtgtttcagccaaaattttttctggacgttcttcagtggcagggttttcttcagagtcttttgaaggactctgtgaaactttctcagaagatgtggattctcttgtctttgtatttggttctggttccagcttagataatcttttcttatccaccactcttttaactcggatggctctctgttctgagtaaagtttacatactcttttcaagtaatcttcaatgaaatccaaaacagcggtcctgtgctccttcacttgctgggaatgtatctccttgtgagcttctgttcgtagttgctgaattgcttctgaacaggtcctcatgaatatctgggcatcctggtctatctggtctcgttctgtgtctgtcatcctcccatattcagacatggtatggctataagcattaatataatctttcctgtgttccagaagaaaatctctcagtttgccaatgtgagaaatcacttcgcgggcccggctggagaagtcgcccttgggccgggggctccggcggaacagctcgtcccggctgccatcgaccccgccgcccaccgccactcccagcgccttgttccgcgtcttcacggtcttgacgctggcccggaatagcagcgtgatgtccaccgccatagcgacccgcaccctcagccccacactaggcccgcccacgtaagcagccgatcccggga

SEQ ID NO: 442185 - DNA, 433 bp, Homo Sapiens
gcgcgccggccctggctgtatctcgggggctgcggcgggaactgccgagcgggcttgactggacgcactgcctgaggacctgcggaggagacgagggagcgcggcgggtcagccccgaggttaggccgcgggtcccctgtccgtggcgctccgtccttttcccagccgtcttggctacagaatctgcgacctccccacactccttctcttttgagtatgtcacttaagtcttctcgccggatgctttttcctccttgcttttgccggaaaggagagagatacatgtgaaggatatctgtcctcgttgcttcccctgccctctcaaaagtttaacttctgtgggaatgtgtatcttccttttctggaccatttgacagtcccggcccagccgccgtgtgatttagcaaccggtatcatattcagatcaaatctt

SEQ ID NO: 442186 - DNA, 833 bp, Homo Sapiens
caaatggagcaacttctggttgtttgtaagcagaaaaacaaaacattcaaaaccaaaaacctaattagtacttttgtcctttatatccctaggatgctctagggagtagaggtggcaggcatctttatcttcacccactggcacattagcagcttatgcaacttaggaagtcactgggagatgagtcctaaaagcctgaatttcaggatggggaggagataagaagcagagaactttgggagaccatggggcatttagtcctggcatagacacagaatggatattcacaggaagattcctgaggccagatatgcaggagagcacacattgtcacaaggggtgtggtgggaagagaggtgctggatgcctaagacagacttctgtgcttggcagattgactgagtgttgactctgaatactttgtggtccagtccataataggccagtcactcctgcctgatgcatccctgttgcactgttcataaaacctgtatcatatggggaagcttcaaggctggcaggcttttcatcaagtaatcatcattccatgttcctacgtatccttgaaatcaaaaccaggcaatatgtgtgtttttggttttgttttacaaaaaggcatacaatgagacgaattcttaagataatgcacatacagaatcatcaataaagtttcaaagagtttatgaagaaaaggtattttcctttcttgtaaaaaatgttatatatatataatattctgatctgcattcaccttagggcttagcctcttattttatgaattttcaggctgtgatttgtgttggatggctaagctctaaaataatgcaaatagc

SEQ ID NO: 442187 - DNA, 617 bp, Homo Sapiens
  misc_feature (243)..(444): n is a, c, g, or t
  misc_feature (446)..(446): n is a, c, g, or t
  misc_feature (472)..(472): n is a, c, g, or t
  misc_feature (522)..(522): n is a, c, g, or t
  misc_feature (551)..(551): n is a, c, g, or t
ccgggctgcaggaattcggcacgagtatttgtgtcttcctccattacattataattttgacttcctgtaattcacctttgattcttcagcacttaatagtctgcctggcactaagtgctcaataaattctgaactcaaatcactaacagcaaaagaattatttatgcattccccttaattgtgtgcctaacacgtttaactgccttattttatttttttacaaacagggtctcactttgtcannnnnnnnnnnnnnnnnnnnnnnnnnnnnnnnnnnnnnnnnnnnnnnnnnnnnnnnnnnnnnnnnnnnnnnnnnnnnnnnnnnnnnnnnnnnnnnnnnnnnnnnnnnnnnnnnnnnnnnnnnnnnnnnnnnnnnnnnnnnnnnnnnnnnnnnnnnnnnnnnnnnnnnnnnnnnnnnnnnnnnnnnnnnnnnnnnnnnnnnnntnctgcctcagcctccttaagtgcttgngatacaggtgtgggccaaccgacctgacctgctttattcttttaaatcanatagtagaacaacattgaaagaaatatantgatctaatctctaatagcatatatgttcatatttgcatactctttcaatcaataacgctttatat

SEQ ID NO: 442188 - DNA, 579 bp, Homo Sapiens
  misc_feature (38)..(38): n is a, c, g, or t
attgtcctcatgtcatagatgggtacagtgaggctcgnggaatagaattatcaatgcaaggtcattaaggggtggagactacactcaaggcctgacattctgactcaacgtctgaaagattcttcgtgagtccacagtggtttggggctcaggagcagagccagaaacactcgctgcttacaagcaggtgattgggctgctcagcgctggggcctcatttctctgtctgcattatctctgcagcattagctaaagtaaaacacccacgtgggcatcagggatcagtgacactgtgtcactgcagtaggcttgtcctgtcctggccaacgccatcagtgtggtagggagtcacccactcttgagctaatggggccacatccccgaagtcggcctccgaacggtcatccgtggacacccatctccgcagcacctctcaacctgcatgagcgtgtgggtaaatgcttccactttcaatcactttgagcttgttgacaagtggcttgaatcttctttgttcatccatcaaaaagttgtcaaacccttccctgtgccatgcattttgtggcctgtaatcccact

SEQ ID NO: 442189 - DNA, 581 bp, Homo Sapiens
  misc_feature (130)..(130): n is a, c, g, or t
cacacagcaggagcagcaggatgctccaaatgtctttattggggctcgagcacagcatgacagttggaggcatgcagacagggcacagggcccagcctgggcatgccccagacacacacgaggggacagntttagaaaaggactgcccaacaccagggaggagcagggagggagggccaagggaggggcagaggccaaggctgaaggggtcacctggcctctgctattgcacgcatcctctggccactgaccaggaagtacagtattgcaactggtctcctcttgcccaaggcttcccttctcggaccccctgggccagatgggcagacagatcctttccctgcctgtctgcccagcagcatctttgacaacaaacagacaaaggagagagaacaaaatcaaatctaaaaaagacaaaatgcccccctaagtcaaggacatagatggggtggaggaagtagtggaggaggctgcagaggagcccctggaagtccccccacaacgaggatgtggggtgggaggtagaaccccaatctggggtggggtgcggctagtgaagcagtgaccctagggggcagtct

SEQ ID NO: 442190 - DNA, 1075 bp, Homo Sapiens
tgatttgggttagggttatccattaggaagtaaaggtctcatccaaagctggatccaaggtttttcctcagcactctagttttcactttatgcttcttctctgggaggatcgtcattttgatatatgggtcagaggtcatcgactgctcatccatggctggcaagccacgggcttccttgatattgaccacaaatgcttttctctcgaagttgtattctaaggagaagaagagagttcccagcttctcttgtttctcttctgaagtaagggaagtgctggactttaaactctcaggggaaactgactctttttccccttctaaaaagagcttcggggttgcattctccagatcagaaggactgccaggtttgaggttggttttgggaaaattgccattgagatctctcttttcaagatccagatgcaatgaattctttggcacagctggcttattctttacttcatttttatcatctgctccaaacttctttttgctatttaggttttcagggtaaatatcaactcccttaagcacatgcacaaacttgtatggaggagtcttgttagacttggatgattttctctgacagcagatccatgcaaagagagagactgtgaagaccaggccaaatgcactgaagatccccaccactgtggggatttcatcaaattcttcccggctggtggtgatcggagccattttttactgcgtgttctgtccgaggtgctgaagggaaaactgcctggctggattcacttgcctggatctcaagcgccggctttcggagcgctgaaaacaacagcgcagagcccagggcaccagctcctggaacagggaggaggcaaagagggaggtccactcgccctcgcacagtgatttgccacctcggttcctgttttggctcttctgagaagctcgtctccgagactccagacgtggctggaacccgaattgacgcaatcctgacgctacagggctgaaatcagcacctgcccccctcccctcctcccttcaagctttccttcttgcttcctccctcctctcttgaggattcaacacatgctcatcccgct

SEQ ID NO: 442191 - DNA, 751 bp, Homo Sapiens
  misc_feature (203)..(203): n is a, c, g, or t
  misc_feature (244)..(244): n is a, c, g, or t
ataaggaataagcttttttaaaattgtacagccccccttctttcccctcatttccttaggagattttgataccacttcttaatgggcaggagatctttttcctgaggaatcactgacccaaacccaatttttgaaattattttcagggataaagtggcattaaccatgactgaagaaacagtattcaattaaaattcagaaanttgtcaactgaaaaatagtgcatgacagaatatccaacacntgtattgaatattttctgattattaaaccaaattacttaaaccttatacttgaaaactaatgcacattggtttttaaaatgacctactgaaaccaccataaaatgtatcttttatacaggttaattatagtaacaaatcatattgctttacattgttaaaataatattttcttcaatcatatgacctacaaaattatacccttattttccactgattctcatatttaaaaccagaatttttagatttttctaaataaattttcatcagttttgacttcgcttgcaacttagagttgaatctataaagtactggataaaaattgcctactatgtaacaaatatttccctgatgccacaagattaagatttaataggaatataaactatttctataagtaatattgtacttcagatgcctttatttttccaaatgatgggatgaaacttctgtatactctgaaactagaatgataatataaatacccagccaggcacggtggctcatcc

SEQ ID NO: 442192 - DNA, 672 bp, Homo Sapiens
  misc_feature (27)..(27): n is a, c, g, or t
  misc_feature (75)..(75): n is a, c, g, or t
tcagaattacagaagcgaacaatgaantcagaacaagcttttcacagctgtagcatttataacaaagtcattatntacatggccttgatttaagaggttgtagagtgtttcttttattcagaatccatgaggaaggtttcgaaagtccagatccaagtcggaaacgaagggcacttacgaagtcatcaccagaaggacacttctgaagcataccttcacccatgagcatgggctccctgcttccaccgtgggccagcatctccctgcgatagcgctccccgtgcagccctgttgaaaggatcctgtagaaaacactccttccaaaccatggaggcgaccgctctggacatgaggtaagagtaatatctagcaccataccccacgaggtggctgaatcgcagctgccaggcagtatttggaacatatggtaggccatagaatttctcttgtgtttccttgagaatgtctgtggttgaattcctcaggggatgcttcccatggtagatttgatccagagtggcataaaagacctgaagttgcatatcagctgcagcacaaacctttttagattcacaaagacgagacaccatattttttggcagtggctgtccagtctgataatgtctggcaaattggttaactactcgataatcacagtaaatgtaccccaac

SEQ ID NO: 442193 - DNA, 1110 bp, Homo Sapiens
  misc_feature (592)..(601): n is a, c, g, or t
acccatgacgtagatagcacgccgcgaaaggggggggagcgcagaggggctgccttgtcgtatcctccgggcccgcggcgaccatgtctgcgtgcggtgtttcttcacactcgacgccgttcttttgacagtcaggcgtctgccccacatagtgcgcgccgaggaaaacgggcccccataggactatactggtccgcccccgcgtccctcttgggacagcgggcggggccccaagcggtcggggggcgcgaattattgtgaatcttcgggaagcctctgctccggggggctcccccggttggataagatacccccagaaaagtgcggctccagagagcccccactaccggggtatttttctcaaaaaaaaccctcggggtttcccacccggcggcgttttttttattgggggagagaataccacagccccttttttcatgaccgaggggtctccccttgggaaacacccttacttcccccgtgtcccctgtccctgtggggccccgcggcccccacaggcgaagggccctgaaaaagttttttaaggggccgagggcggcccagcaaggctcgtccccctctgcgcccacannnnnnnnnncggcgtgcgccgtgcgcgaccagcgcgcccgccggccggcgtaattaaaacaaattatttattccaagttctaccagtttaaagtttttcagaattacagaagcgaacaatgaaatcagaaacaagctctcacagctgtagcatttataacaaagtcattatctacatgaccttgatttaagaggtgtagagtgtttcttttattcagaatccatgaggaaagtttcgaagtccagatccaagtcggaaacgagggcacttacgaagtcatcaacagaaggacacttctgaagcataccttcaaccatgagcatgggctccctgcctccaccgtgggccagcatctccctgcgatagcgctccccggcagccctggggaagagaggttctgttacagactcctgcttgcacagcctccattcacacttgtcttgaattctcaaagaaagccacactgatgccatattcataaaagctgccaccatgtgacaatttggcccctattttct

SEQ ID NO: 442194 - DNA, 1241 bp, Homo Sapiens
tttcattacataataaagtttttatttagtccatacaaattacatctctgattatgaatggaagacaatagaaacattcttgaagatgtcaattacattaatttttgaggatatatacaacaagaggtcttcaataaacccagaaatgcagacagcactgatatttacatacccatacatagcatcatttgtgatttagcatgctattattgttttctgctcctaggcattctagaaaggttattttcatgtctggatttctgatttagtttcaagatgtaaaaatcctacatagtcagacaacctgctttggctatatcatcagaaatgggcttaaaagcaaaaatgacattccagttattccacacacaaatccctggatgttaacatccctagcctaaaaatagccatttgggaaggaaagccctatttcaaagccaaaggaaatgtgagtaagacaatatctggtcctggaaatgtcagactcaaaattgagttctttagatgggaatcgattctaaaataacatctctgatttgttatataacaaaacacaatggctttataaactttatataaacattatcaatttctgatggttttctcttaaaagggtagctctgaagtaattattctctctttaaactgtatttactgagccgctgacttttttctgatttcattcattcattttccccatttcccctccccattcccagtctagactaatgaacacaatatttgagaaatcaaaaacttaggcaaagatcttttatttgtggttaggcttacaccattccaaaaagtaaacataattaacaaaacacttaaaagtaccagaggaggtgccccggtatcaacactaatcagaccacagaagaaagcttgacaaggatcttcatatacggatgccagcttcaatcatgtcaaatgaacatgttgttctctcagtggtaacagttagtaggccagagcagaactggagactcttttccactggtgtaggcagccagggctctccaggagtactattatagatgacatgaaggtgactaccacggtagcaatgacaacaatcccagttacaatgactgaacaaagctaaggccatcagtataggcttgaagcgatctagaaatccttctggagcctctcatcagctgatcatccctgatacatcccttggatggccacagaatccattttcacaaaactgaatccaatgcattgtgttatcactg

SEQ ID NO: 442195 - DNA, 945 bp, Homo Sapiens
agcgggggggagctgtcatggctgctcctgtacgtagtcacggtcttgtgctctaaggtgagtggaggacgagcttgggcttagcggcagcccgtatcacatcctagactttttacttcgaggagaagagtctcacgagttgtcctggaagaaaacgacagcacgtgttctttttcactagtagaagtgacgttggtttcatgttgacaactttgaagccatttggaagtgtttcagtggagagcaaaatgaataacaaagcgggctcctttttctggaaccttagacaattcagtacattagtttcaacaagcagaactatgaggctatgttgtttgggactttgcaaaccaaaaatagttcattcaaactggaacattttaaataactttcataacagaatgcaatcaactgatatcattagatatctctttcaggatgcattcatttttaaatcagatgttggctttcaaacaaagggcataagcactctaacagcccttagaattgaaagactactttatgctaaaagactgttttttgactcaaagcagtctcttgtccctgttgataaatctgatgatgaattgaagaaagtaaaccttaatcatgaagtctccaatgaagatgttcttaccaaggaaacaaaaccaaaccgtatcagcagtagaaaactgtctgaggaatgtaattccctgagtgatgtgttagatgcattttcaaaagcgcccacatttcctagtagcaactatttcacagcaatgtggacaattgccaaaagactgtctgatgacccaaagcgcgttgaaaaacgactgatgtataaccaacctgcatttaatcacgctctgggaacatatgaagataaaattccaggaatattacattataaataactaatgtgacaggccgtaagaccataagtaacgttgagaaaacaaaatt

SEQ ID NO: 442196 - DNA, 668 bp, Homo Sapiens
ttttgctttatagcaccattttctacaaacgttattttttctggtaattaacaatttaccccctttctcacaaacttagaaagtgagggagttgtgtacatataaaaatgtgttatttttaactgtatcccacagagtccccagattttgaagaatctctgatgggtcactagaggtggggaaaaggcagcaggagcctggcagggaactgactccaactccctctattctctccacaccttgaatgaaagaagcttcatttttaacttttacattttgggcatgatgcaagtcttcctatgacctcttccagcttccagcatagttctatgcttagcaaaacacttgcttgtattaaatgcttgctttgcattttagccaagaactttaccctcattttacctgtgtagagatcatcctttgaagaagccaagaagaagaatttactcaaggataaatgattttcatttttttcctcttatggcatttgatgtaatttagaagttttcaagtcatagttaaactgctttttggttactcatgctctagtaccctactactaaagtaggatttgtgggtaaaaaaatcaaatcagttaggaaagtgctgaacattatattctacacaacttttccaaaggattcacagtgtactttagcatgttgttt

SEQ ID NO: 442197 - DNA, 516 bp, Homo Sapiens
  misc_feature (472)..(472): n is a, c, g, or t
  misc_feature (486)..(486): n is a, c, g, or t
  misc_feature (497)..(497): n is a, c, g, or t
cacttcagaaagaaacaaggtttatttgatgaatataaataaggcgatcagcacaaagtacttctcatacacatgacaacaaatttatgaactgtacataccttgtacattgttctactagacacgaggttacaatgactggctaatacatgcccactggtagtttccagggttccttagttttatttatttatttttcatatcgatgtccataatcacatggtcaatatcacaacccacatgccactcacttgaggaaatattacaagagggcactatcaaacgagggtctcggggatttaggatacactgacccggggcaggcattcaatcgccactctacacaaaaacattgcaggatagaggcttacggtcaacacatctgagggtctcgtccattaaacactgtttaaaaggtaaatttggaaaccctttttcaatggaagttggacacggtgtttaacgtggcttncggggtacacaaanttctttagttnccattggggttgtactcgg

SEQ ID NO: 442198 - DNA, 406 bp, Homo Sapiens
  misc_feature (12)..(12): n is a, c, g, or t
agaaagaaacanggtttatttgatgaatataaataaggcgaatcagcacaaagtacttctcatacacatgacaacaaatttatgaactgtacataccttgtacattgttctactagacacgaggttacaatgactggctaatacatgcccactggtagtttccagggttccttagttttatttatttatttttcatatcgatgtccataatcacatggtcaatatcacaacccacatgccactcacttgaagaaatattacaagaagcactatcaaacgagggtctcggggaattagatagagcttacgtcaacacatctgaggtctcgtcataaacactgtttaaaaaggtaaatttgaaacccactttcaaatgaaagttgacacgctgttaacgcctcgtgcc

SEQ ID NO: 442199 - DNA, 373 bp, Homo Sapiens
ctgagcagtagccaccattttttataatttctaataaccaactccagaactaggagctgatcaactctttgttttcctctccatctacttttccctgtgcataatatccatccaaaggacaacagtggcaaagctgaaatttttatacattcaactcatgattcacatgtggcatcagtcccatcagccggaactagcctagacatacggtgcaaatatgacacttctaacgattaacaacagcaagggctcaactcaagagaagtttaggagggggagcatccctagtgaatactcacaccacaagaaggacaaacttgtgcacatgtccaagaaagaaagcttcttgattgaggtagcatgaaggatgagg

SEQ ID NO: 442200 - DNA, 562 bp, Homo Sapiens
  misc_feature (359)..(359): n is a, c, g, or t
ctgagttgagccaccattttttataatttctaataaccaactccagaactaggagctgatcaactctttgttttcctctccatctacttttccctgtgcataatatccatccaaaggacaacagtggcaaagctgaaatttttatacattcaactcatgattcacatgtggcatcagtcccatcagccggaactagcctagacatacggtgcaaatatgacacttctaacgattaacaacagcaagaaaacacctgctgctgatgcaatgcaatgcatcccaatggttgtggggattgtgggctcaactcaagagaagtttaggagggggagcatccctagtgaatactcacaccacangaaggacaaacttgtgcacatgtccaagaaagaaagcttcttgattgaggtagcatgaaggatgaggcttcagcccccattgtcttatgtagaatgtggcaatgccaactggagaaagggaaggaggacatattaccttggtttgaatccctgagttctgtacctgtctggtttgttagtctaagcacaggtctttacaaggg

SEQ ID NO: 442201 - DNA, 673 bp, Homo Sapiens
aatagttattcctttcaaactccaggtaacagtattcctgagaatacatcttgtgacagttttatgcacatacatatagatactttagccattacacataaacattcaacacattacattcaacacatttaagggcaccttaaatggaacagatgcacacatctgcaaaatttcagtagtcccagtatgaaaacattcctactctataaggccctgtttctcagagtggaggcttttttgcaagttacaacattgcttagcttattgaaagttgctaatagacttcacacacaagagtgaaggagtcaggctaaaaggcagacagaccagcataatcatgttcagaacagcccaatacttttaaaatacatataaaggtatttatgattcttgttgaatatttaacaatcttctttgacttctttgctatttaaatatttcatacaattatacatagataatttgaagaaactggaacaaagcacacacatatatagagacgcgccaatagcccagacacttgtaattaccaaacataaggcctctaatgctaatttagcagcataatttttaacaggtgaaatatatcagcttggaatcataaaaccacttaacatttatattcctgcacttgagaattatttcagcattaactgtaaataacatgataata

SEQ ID NO: 442202 - DNA, 784 bp, Homo Sapiens
  misc_feature (429)..(438): n is a, c, g, or t
  misc_feature (608)..(628): n is a, c, g, or t
aaatgaacagcctctaggtagttaatggaatcgtatttacaacatttcttttctagaattcacaatttcaaaaaaccttataatatcacctctttcaacaggaaaaaggcacttatagaagaggaggacactccaaacactgtcgtccttccctttattgcggaaaatagatagactcagattaacaaagagacatcacaaaaggacctgctagaaagtctgttagttagcttactacatctcacttcttctacaacgcaaaatagaaagctcacgcccacctcccgccctgcacttcacaactttgcttcagtgtgtgctaaagttccacctgaaaattcatacagtctcagaattggtaccaaaatagggagagtcatattaccatctcagcatcctttaaaagtgagaacagaaccaaagcaagcnnnnnnnnnntgttttaagaaaaaataactccttaatataacaattatactatggttagctttgaactagatattaaagctatgtgactactggactaagtcaaaatcactaccaaatgtgattcaaagagatttaaaaggagaatgggaagagagggagggagagggaaaccatcaagnnnnnnnnnnnnnnnnnnnnncgaaatcatgggttatatacacatttaaaagctgttgtcttatattacagcagattcgtgagatgatgagatgtagtcaaccctcgatccgaagtgagccatctctggttgggatggggagtgaggctggtgggggtccaggtctgaggacatcac

SEQ ID NO: 442203 - DNA, 607 bp, Homo Sapiens
aatgcctgatgtcttccaggacattaccagtaacttcatgaaaacattaacgcaagcaccaaattttagattaatccaacactgaagagggtatcaaatatttgagatccacgaagtaagaacacagaaggtgttgacaggctggaaaaaaagtcaaaatactaccagatgaaatttaattacaagatgtgtgaggtcttggatgggggtctataaaaagcatccactaaggagatggatgtctaaaaacagcctaagggcttgaggtgacattaaagtggccatctgctctctatgggaccttgggacttgactgacaaagagttcatggccctttggtggtcccggtgtacatgaaaggcctgaaggagagagatgcaggtgcagagggaacagtagagtctgcccccatccgtgagcaaaatgtgggcaagctggagggatgtgaggaaggcagctatacaagggggcaggtgaagtggggcttggatacagggtgagagcccacaatagtggcccctgggactttgacagcagaacccagagccaagaaatagcggaatcagagtgcagagtggagagtgaagagctgtcttgaggccctggc

SEQ ID NO: 442204 - DNA, 613 bp, Homo Sapiens
  misc_feature (445)..(445): n is a, c, g, or t
  misc_feature (486)..(486): n is a, c, g, or t
  misc_feature (550)..(550): n is a, c, g, or t
  misc_feature (593)..(593): n is a, c, g, or t
cctcattccctcccaaaacatcctctcaagagaagggaggagaagtttcaagaaatcaggaggggtgggtttggaccctgggcagggtggaggcagtgaccttgcccttggtccctctagccttcttccctgtgcaaaaaattggggccgggccggcggtgggcagagtccgctgctatacacacagggaggaattctcacgcccaagccccgcctctctacgccttggaggactcctgtgacttcactgctctgcctctggagaacactgggagagtcctaccgacgttcaaacaacaggttaggccaggtaacagccctgcaccaggccgctgcccacgcctctgccctggcacccccaggggattccttgcccatcccatctctctgcagacggatgtgtgtggccccctcctaggtgccccacaaccaggaccaagatggngctcccaaaggaggtaaggagaacctttggcaggtgcttangacactgactacctagaaagtagacgcagcagagttgctcccaagtcgaggcttctcagagcangtgggtcctgacagcagtggattcttccagcaggatgaggaancgaggtgtgttacccaccaa

SEQ ID NO: 442205 - DNA, 653 bp, Homo Sapiens
ggagggaggggagagagtggtaggggagagggagggtgtgtttttgttatgttgaagcagatgattattttttcttccttagaagggaaccaatttccatggaattgggaattgtattgatctcctccccccattggagcaagggctcgagaatccacttttggatggttgcagtgagatctgaattatgtaactttggcctaataaccctggattggagcagccaatttttaacagctacaagaaccccaatactaatgcattgattttcctttaatagaatttccttgttgaaggacggtgctcagtagagtccagtccacccttcaatcttaacccatctgaagactgttcctttccagtcgagctccattcatttctggttgaataggttaagcaaagacagacctcactgttctcaattcactttatgatcctcccatcataaaaaataatatcagcaccttgcttttcatgtcagaactacatttgagccgctattccctatgcccatgagtaaatcccataaaagccaccccgttgtactgttgctatttttccttgtgggtgattgattgatggatgagtgctgacacttcaatgaagctatttcgactgccatctcaatccgatgatgtgaggggtatattttc

SEQ ID NO: 442206 - DNA, 458 bp, Homo Sapiens
cactcattaaaggctctcgctgatcacgcatcagcctcattgtaacttcacatgctcttcgaaaaagaccctctgttcccataggacccattccattaaccatattatgagtcaggcgaaatggcacaatttctggaacttcaaaggtttctcccttattgaaaagaccaccatgacggtctccaagccccagaatataaccaaccattgacattactgcagtggaacggcagtaagctgatctactactgtaccatgatgtaggatcagggaatgttctcagaaaccactcatgacagataggaggatgcctgggcaggagagattctcggaatactttgagtttttcagataaagctgctgactttggtagcatacactggcgaagttcttttcctgtcatatacactcccttttctttatatagtttggtcagaataggtctcaaaccagcagtg

SEQ ID NO: 442207 - DNA, 1220 bp, Homo Sapiens
aagtctagtaagaaacgcacgaaaccctttcattttttgactgtgacagagcctctacagagaagctgcagggtgtcctattctaacgcaaagcagccagcatcttcttaataaagtagcatttctttatcaaggaattgcacaccactatttcacagcctaattagagtttgaagagtttaacatggtatatgtactataataatcagcaccacgcgtattgagctgtaggtgcagattctgcaaaatgaatatataatactgcatggcctctgctgtagggaaaacgtgtgtgttctgggttcccacagctcactataaagaaagatccccaaagttggcacattcaggaagtaaaatagtatacatttgaagaaaaccactttcttttgatactgccctctgcaaaaccttttaagtttgacgacaggtcttaagaaaactcttcatatcatcacgttagttaggttcttgcattgtgcttttccctctccttgatgtgagatctgcaagtttgagtatagcagttctgaaaagttacagagttctgggctgatggtagacaatctagcttggtgagacttcccaattcgctggaacagaacacaggtagaatcaacatatggtcttcttgcgagtagccctaatgatggaatggacatcactcaatccttataagcccgtgtgggggaggttcctttgtagaagatatttctagtgttttcggggctgttgcttctttcagggattagaatgatattgccctttctccgcagggtggagtcgcgggaagaagaaatggacagcgtctctgagccaatttcgctgccctctactggggtgacgcggatggtggtaattccgtggtggtgatgctcattgctatcaatgttgcttctcttgcgatctccagaaccaaagctgtctttcagagactcacagctttctgagtccctgttgagatcgttgagctcgtaagtttggcgaaggctgcccttttcaggggctttccacttccaggagccactgccttcaccttcagtggacgggatctgtatgatgggcctgttgttctctgggtgagcctcaaccctcactatcccactgggctcatggtctgtcaaggttttatagcggatggagccagtgcaggagaccgtgctgccttcagtgttcttggggctgctttggaggacaccttgctgcttggacatggctat

SEQ ID NO: 442208 - DNA, 701 bp, Homo Sapiens
  misc_feature (83)..(83): n is a, c, g, or t
  misc_feature (634)..(634): n is a, c, g, or t
  misc_feature (650)..(650): n is a, c, g, or t
  misc_feature (658)..(658): n is a, c, g, or t
  misc_feature (664)..(664): n is a, c, g, or t
  misc_feature (677)..(677): n is a, c, g, or t
tctagtgcgatccccgggctgcaggaattcggcacgaggattactgactactggacagggtttaccactatataacatctcanagttattcaaggatatttaaagcatatttagtttagttacaccttattttaaaccgcagaaaacaatagctttaaaatttttgccattaaaataattataaatttatccttttactcaaggactagatcacagttttaggacaaaaatctctcctatttaaagttcataccttgtaagtatttagtttgtatattcatgaacaaatctggacatttatactttttttgtttccttatcaactgttcacaattattagttaattggtcttaacagttctacattataattgaaagaaaaattacttgagaaaataattgtttcagaatagtgcctactatatctgtgtcagctaaaaatttgtccagagttttagatataagctagtattttgtggagttttatccaggcgttaatagttcttcctggctgaaatttaatataggtgcagaatcctaaataacactgtgagatgtaatcttaactgccctcaataccttataaaaactgctgccatttaaccccgtgtgccatttaatgagtggctggtccnttgatacactccactntagagagncggaantctcgggttttcnccaagccccttgtaaaaggggggt

SEQ ID NO: 442209 - DNA, 1133 bp, Homo Sapiens
  misc_feature (931)..(939): n is a, c, g, or t
ctttccagagtagtcaccgatgataacaccctcatcagagtgatggtttctcgagcagaaattgacatgttggatatccgggcacacttcaagagactctatggaaagtctctgtactcgttcatcaagggtgacacatctggagactacaggaaagtactgcttgttctctgtggaggagatgattaaaataaaaatcccagaaggacaggaggattctcaacactttgaatttttttaacttcatttttctacactgctattatcattatctcagaatgcttatttccaattaaaacgcctacagctgcctcctagaatatagactgtctgtattattattcacctataattagtcattatgatgctttaaagctgtacttgcatttcaaagcttataagatataaatggagattttaaagtagaaataaatatgtattccatgtttttaaaagattactttctactttgtgtttcacagacattgaatatattaaattattccatattttcttttcagtgaaaaattttttaaatggaagactgttctaaaatcacttttttccctaatccaatttttagagtggctagtagtttcttcatttgaaattgtaagcatccggtcagtaagaatgcccatccagttttctatatttcatagtcaaagccttgaaagcatctacaaatctctttttttaggttttgtccatagcatcagttgatccttactaagtttttcatgggagacttccttcatcacatcttatgttgaaatcactttctgtagtcaaagtataccaaaaccaatttatctgaactaaattctaaagtatggttatacaaaccatatacatctggttaccaaacataaatgctgaacattccatattattatagttaatgtcttaatccagcttgcaagtgaatggnnnnnnnnntaagcttcaaactaggtattctgggaatgatgtaatgctctgaatttagtatgatataaagaaaacttttttgtgctaaaaatactttttaaaatcaattttgttgattgtagtaatttctatttgcactgtgcctttcaactccagaaacattctgaagatgtacttggatttaattaaaaagttcactttgt

SEQ ID NO: 442210 - DNA, 897 bp, Homo Sapiens
catggatttattctcaaataaggaaattttagggaaagctcataagggatcttaatcaatatccgtactctctgtctcgttccttcttgctgtcctgtcttccttccctccctcctgccttcctagttctctcattttttcaggcaagaagcttccttaataatatagtttctacagagctttctgtacttatttttctaataatggatataacagtgtgataaagtttaaatgctccgtgagcaaaactcttatcaaacaactgaagaaatacactgctgattaaccttttccttggtcttgaattgtctccagcatatttgctagtgactaaaccattaatggatcttattagtataaacacatgtctgtgtggttatcaacagtgttgtattattgtcacatttatttacatttttggtcaaaaatataaacatgcgtgtgtgaagcagtctgttttatagagtgagcatatatgtaatcgttttcatataattgaaaatgtgctgtgtgttgcattttattctcatgtcgacttttctactatgtatacaccgattgtctcggtgcctttttccttttgtataattgtattacatacagaaattgctgacctctgtgaaaacagtgtaaaaaaagttaaaattattattccgatgagattttaatggcagtttaattttccagagaataaattttgtgtgggttaaaagttatttttcttcacctttatgtaaaaaatctgtttacgttttagtactcacatggaatgggtaaacatctgacttcattgatgatgatacataaacatcagtcctaattcttgtcattgacaaataaatgttaatatgactgttacacaaaataaaataatgtcaattacataaggaaatatcg

SEQ ID NO: 442211 - DNA, 380 bp, Homo Sapiens
  misc_feature (118)..(126): n is a, c, g, or t
cttcactagtgtctttatattggcagcacgtccattcagtccaccttgtaggcaagcataaagaaaccctttagccgaagagttccctattttttcttattttctaaatttcttattnnnnnnnnntttgctatcacatagttctgtatagttccagtggataataaatcactcgttctcaaattgaatcacattcaaagttcactactcctactattctaaaaagaggcgccaccttggtagcagcccacatgtgtaagtatgttcttggttcaaactgtgaatccctttgctgtgaattctgctggtttatgtaccctgaagccatttatgagccagtctgtgcgtgcaggaccttctttgtttttgtttttctgaga

SEQ ID NO: 442212 - DNA, 785 bp, Homo Sapiens
cgactgatttaaaggacggcgggtaatgtcaaggctgctgccctggggtctgttaagggccaatgtttccccttggtataaccggtctggtaaaatgccctattataagtacaactcaagcggtctccctgtttaagattaaaggcatccacacccaaatatccggggtattaataatgaaatatccagatgtgttctttcgcttagcttattgaaataggatttaacaatctttggattgtacctttgtaagaccagcaaccggtctaatattccaatcttttccacgagattccacagcaggtacttactgataataagtgacgaaaggataaggggccgatttctctcttccctccacaggtttttcgcgagcgcctcctgcgcgccccgaaggggtcggggcgcagggtggagtcccgagcggcgcgcccagccggtggctaccattacctgagccccgggcggcgggaccccggtccgccccgcacccccgccgcggccagcccttcccggcactcacccgtcacgcgaatggactccagcatcgtcgccccgaggcccggggcggcgggctccgcgggctcaggggaaagggccgcgcaggggcgggcggcctctagcctctgacccgggcctcggtggcgggggcgcggcgggaggcggctctccgctacctggagcaggataaggagggtaagggcggacgaagacgtaccgacactgactgtgagctagcgcattccaccagcctagtagctaactggaaggtacacacggcggcc

SEQ ID NO: 442213 - DNA, 1296 bp, Homo Sapiens
  misc_feature (116)..(146): n is a, c, g, or t
  misc_feature (164)..(167): n is a, c, g, or t
  misc_feature (176)..(177): n is a, c, g, or t
  misc_feature (182)..(184): n is a, c, g, or t
  misc_feature (189)..(189): n is a, c, g, or t
  misc_feature (211)..(213): n is a, c, g, or t
  misc_feature (220)..(223): n is a, c, g, or t
  misc_feature (227)..(227): n is a, c, g, or t
  misc_feature (229)..(229): n is a, c, g, or t
  misc_feature (237)..(237): n is a, c, g, or t
  misc_feature (239)..(241): n is a, c, g, or t
  misc_feature (243)..(250): n is a, c, g, or t
  misc_feature (254)..(261): n is a, c, g, or t
aaaggggggggaatttccccgagccctcatctccactcccccggggttttctcccggggagaaccccctttgggccccatgtttcccctttcccctttgggggccccggggttccnnnnnnnnnnnnnnnnnnnnnnnnnnnnnnnagggggggccgagggggnnnnaacaaattnnaaaannnatttnttaaaataaatttttgggaggnnntaatttnnnntatnantttttttntnnntnnnnnnnntttnnnnnnnntgtaacaaaccacctaatgtttattaataaattagtacacttgaaggcatttttctgatatcggtccttcaccactacccacaaaccccacccacacaaagggagtccacgccacctttgcattggaacctggcaactgagcattagaaggtacatttgtaaatgggagcatagttgcaaatatatcagacaagggttcttacagttgcagccatttttaattaaagtaattggtgaaggaatcccaccaggaccaaggccttgagagcagattggacctattgattatgtgtatataaaaaacaagacatcttttaaagcaaagctgggcaaattctctatggaaagggcgccactggcacttgattttgactttccaaagtgcagcaatgtgttccagaacagctcaaatcctaaaaggtgaagttcaagttctttggtggcccagttgtcaagccacttaaatagcaaatcctgatggcttgaggatttcatttctccagcccagagcatattagcataagaagagtacaagtaatcaagcattctacacggtgtccaggtgaaagccatacaatcagcaatagtgtggtcaagtttcagccatgaatatgaactatacaagacatatttaaaagataactcaaagttgaattgcattacagtaactcaatggggtcttaaattttcttaatctttaagaaaatttataaaggacaaacaataataaaaatagtaataatatttgtttttaaaaagtaggtgtgaatgttaagagacataaagactgcttataggattcacaagatgccattatacttttaagaagttaagagcctcacaatccagtgtgtgggaaaagtcacactgcatttatggtaagttaagtaaatttaaagtgcacagaataatcttgaaaatacataagaaggcaaaatggagaaaatatggaacttaaaaaactttagtggtgggtatttcacaacagttacacctggcaaaggcttataaaccaacttcccagaagagttattt

SEQ ID NO: 442214 - DNA, 2017 bp, Homo Sapiens
tttcatttaacagacatttattaagcgtctacaatgtgccaggccctggggacacagagctggagaatgtacagtccctgccctcaaggagctcacagtctggggggacagacatgtaaacacatgagttacaacgcgctgcgtgaagtgtgtggcagaggtataacaaagtgctgtggggcacaacagagcgaccagtgaactcttcctgggcaggggtcagggaagccttcacagatcagtcaataaatacggtgccatgggagtgccttgcacaccacgggcactcacatcttgaatgctggtccactggaggcccttgggttgggcgggagcaaggcctacttctgcttcctcaggacaacttccccacctctgtcctgggaccacctgcccgcctgggcctgcagtgactaaggacgctgctcccactccaggggccagtgacagagagcagctatacagagggcccaccccgcaggatccttgacaggagctgagacagaacaaactgctgcttgtctccctaccctgggggcaacactgttgaggagactccaaaccctgtcttttcctcgtcttctcatgtcgattgggcaccagccattctcaggcaccagagcacagccccacacgggtgccccatcagacagggctgcccacagcagcctcctacacctgaactgggtttctctgcacactcacagccgtctcaccagctcaatgagctgctggatgcttttgttttggttcgacaagccgttcttgatgttttcgagtaggcatctcttcaattcaaatatggtttcactgtaggccaagctcactgcggccatgggaggtgctccgtgccacaggcctgggatgtgccagatgtgctgcttctcagggtcgcagaaggccaggcctgccagtgcccggaagccgtcgccctgtttctccatctgggctgcagccctgctcaggtcaccaggtggatccaggagctgtctcttgtctctgggcctagggccgggaacagatacatcatgaaggttctggtatacaaactggtagttgggcatgtgccccgttttttctaacctcagaaatgcatgcagaatagctgctggaatgtccttggtttcagctagactgatcacggtgacattgctcagtcccaggagcagagtggccaaggaagcctccagctcaaatctgtccccagctgacgtcaaggccccacctatcaagcccccggagtctatcaccaggatgtggtcacagcccaggtcctggctgaagccctcagccactgtgatgagctgcatgaaggcccctcgaggaccgcagctcttccctgtggcaaaccgcagcccaaacatggtgttgaggagtgtggacttgcccgtgcctggcaccccgacggttgacagaaccaccagccttgaccgtctctccagtcggacatgcagctccttcaggagccctgtgacccagcggacgggcatgctcagcgtgctcccatcgattagctccagaggcagccctgtcagcagcagctccgaggccaagcctgggaagtgggcaaaacgcctctggcctgccggcagcctccctgcctccacaagacagctctcagcctcataaaactgtcccatctcccgcaagaagtgttccacccctaggggctcaggccagagcggctcccccacgtctgtggtgcccccgtgctttggtctcagggtgggaagcgtctccggaggctgtctcagtcgcggctgggccacccgtgccaggccccactccagaggttggtataagagtttgaaaggtgttgcctgatttcagaagccttttcctgtaaacaccgggtggcatctcttagtatccctgactggttagtgtaaaagcagcagtcttcccctaagaaggtgcaaagtcctcctttctcagcagtgaggaggtctagacctctgtggttttggagagtcattgctgctacagagtctatttgggattgtagttactatcctta

SEQ ID NO: 442215 - DNA, 1138 bp, Homo Sapiens
gaggccaggtagttctctggattggagaatggtacaaactgttacatccacttgggagtacagcaatgaaaaagatgacacttgccttttagaggctattaaatgaccaatgatgtagtaagtgataagggcccagcctagtctaggaggcagctgctttttcctctttattaatagtcagggaaaccaagctacaattagagacttgcccacgttcagactttgtaacactttttcaagccagtggctcctcccaaacggccgaggtttccccacccattctcctgacctgcccagccctgtggttgctgtccagggagctaaggctctccccaaacaaacttgaagatctcacagacctaatagacacggcctttcctctctgcctctggctttatgtctctttcatcctcctctgcctttcccctgcccttgatcccttctgcaggtcttggctggtttcaggaaacgggtcccatcccatggactcccactctggggagcctgcgctcctgccctgtgggacctgtgacatggttttccgctcctcagctctgttagccacccatactcagcgcttctgcattggccacccgacccaagagatgacatttggagcacaggcatcagttgccactgaaccccagcgggccgcggtaagggcctccatggccatgggtggggattcaaaggagccaggacctttatgattcctcatcctactacaccctatccccaggttgtgccacaagaacaccagggcgtgccacaagaaccccagggcctcccagaccagcaggccagtagatctgctctaaagaggttaacagaggaggtcgagctacctaccttcccccagggctcaaaacgttgagcgtcttccccaaacctgtagatcatacttgggacagattctgcccacgcagagatcgcggatcgctgtacctccaggtgcagtggctgcggctatccctacaggaaatgcggcctggataacagaggtccccagggtgtcgcggggccctggacacgtcccgaggcgcggctcagagtcccattgtcgagccggtgggaagacccagcgagcggctgcggtgcgcttgtcagagactcgacgcgaggcgcgtggcggagatgg

SEQ ID NO: 442216 - DNA, 847 bp, Homo Sapiens
  misc_feature (22)..(22): n is a, c, g, or t
taaggtatccaagtgttctttntgtttttcttcataatgtcgtttccctcgtttttggttatccacttcagaatcagcaaggtttaattcatccttaagtgggtctgctagctccgatagttgattaattttgaatttaagtgcatcatacttattttctgcttctattttcagacttttaagatgctccatattttctttttgttgctccatatgttcctcaaccattttcattttgcttttattttcctgagcttcatcttccaaagttgcaatatctacagactggtgttcttctatgttctcaagttcccgaatttcagaaatattttttcttattttcatctttagttctttataatgtagttggcaccttttaagaagttcctcattgtgtttaatatctttttcaagggcagataaatgttgctgaagatttaatatctgggccgtcttattttcaacctcattctccaagtcacttatttcagaatccacatctctgcttaggaacttaggtcttgtattctcagatgaataataacgtcctgcaaaaacttgatcaccatcagcagtaaaagcttctctacaatttttgggtggcttttgggactgcattactgcacgagctacagaattatttttgattagtagcactgtctctatgcctctcatgtcaattaggctatttgccacaaccgcattatctatttctaaagctgtcagaactgttggaaagtctggatgataagcagctctgtgtcttacatcatatatctcattccgaaactcagaaactattatcggtggccgtgaggtccctggtaaataaaaccttttcatgccc

SEQ ID NO: 442217 - DNA, 603 bp, Homo Sapiens
  misc_feature (51)..(51): n is a, c, g, or t
atttatatcaggtctgcttactccctgtatacacatctgactgtgcataanagccattccttggctatccttacattactaacagtctcagtcctaacgcactcttcatgaccgttctgacattctatttcctcgcctcttctgcagcttctactctcattgcatacctttctatcttttactttgtgcttctcttatctatctcagtttgaactcttcctttgataacaatgcttcctgttaatctggggtcaatcccattataatacctaggaccacatgtctgagtacagccccatgcaagtcgcatctctactaagtttcccttggacccatgagtaggatagatagtccagaataaaaccagtatcgtgtgatgtcattgaaagaaaacaaagtttcaaggaagatagtcacttgggaaggggctccctaatgcctaaaaaataaagtctcgaatttttagcctagtcttaatgattatgccccattcaacctttccaggcttagctactcccatttccgtacaagatactacacttgaaactagactacttgctctttactaggtatcctccatgtgcaaagcctgcagcccggggg

SEQ ID NO: 442218 - DNA, 297 bp, Homo Sapiens
agctcctttcttcctcttagcactttccctatgcatccctaacatttttctttcccagtttattccaaccgaaactgtatgcagagactccagtgacagtgggatccatatgggacttgctcttcacttgaggccaccttggtgtcaaaagcctttgcagtccctcttagctgcttgctgtgtgagccttagctcttgaaatcactccttattcaactttcttttcaatagacctacgagaattttctctttctgctcttctcaattttccagcctctccattccattatttttgac

SEQ ID NO: 442219 - DNA, 396 bp, Homo Sapiens
ctttttcacagggcggcaggatgaaaatgactgcccgcagtggaaatgccagacgcttataaaaccttcagatctcatgagaccggctcactatcacaggaacagcatggaggaaaccgcccccatgatccagttacctccatcctggtcccacccttgacacgtggggattgctacaattcaaggttagatttgggtgaggacacagagccataccatatcagcccagatcaagtagtgacagagtagggatttgaatacaggttatagtcactattgtgttatttcttgacttttgtactattaatagcaattgtttttaggtaaatttatattgagtttaacacctgtgtgattaaagacaactttccaatgtagtatctgtagccatgtccc

SEQ ID NO: 442220 - DNA, 2155 bp, Homo Sapiens
  misc_feature (324)..(395): n is a, c, g, or t
cctccgcgtcgcgttgtttccagaatatgtcgaggttgggagcgtttgtccgcacgggcgcccacgttcaaacagttttcctcctgacggaatagcccaaccggcttgcagcccttatattttatcccccggaccccaattttaaggccccaggtttttttggaagggatagtgcttcctaggcccagtggggtcctcaaagtttgtacttgtaaattcaagaaatccccctggaccggggcttgttaaaccccaggattggttggcctttactctacaggagctttctgattcaggcagggtttggcgtgggggccctgccannnnnnnnnnnnnnnnnnnnnnnnnnnnnnnnnnnnnnnnnnnnnnnnnnnnnnnnnnnnnnnnnnnnnnnngactaggcatatgtgtaagagtgactgtgcgtgtgagtgtgtgtccccaggtgaattctaatcacaaaactactgtatagaaaatatcaataaggttctaagtttaggatactgagattttaatataataagagttgttaaacatcaagatgatttatagaaaggagacctatggacaaatatcaacttattggtcaataaaacttgttccttaaagtcttttacagtattttttgaaaattaacttttttttaactgcatatatgggtcttcacttcatttttcagtaaagacaacttatttggatatcagtgtctcatcacttgataagaccagtggaggatttggatagtagccagctgtttttgaattgcttgaagagaatcttgtaaatttgtagtccagaggtaattctgcgattgcttcaatacttggaattgcaatagtgctgtaagtactgattctcttacaagaccatgtataaaccaaggagtcttctgtattttccagtcccaaaactgaatcaataaaaaaagagccccattttttagatgaagtatttaaaggttttgcttttggtccctcatattctcctttcttctctagaggctctgactcctcaggcctctgactcctcgtgccttcatcccctctgagttcttccaggatgaggactgtctcccaattactatagtgacgagctgggaaaatatctgaatgcatgctgtcaccaaaataaacaaccttgggttcaggtttgccagtcattttcttcagaagttcatagaggtggacagcgttcccttgggagtaccagccaggtttatccagagatggcagtgcctcctgctcctcatcattctcgagtgtccggaaaggtctctgacttggtaagtgggagaagaaaccaggcttcaatgcatttgtaatcacaatgtcaaaaaggtctgtaaaatcattcccaagaatatattcgcagagaagtctacagtaatcactgtgagaactggtaattaacagaagaattttcccagcattctttagctgtcgaagccattttttcacagattcaggacaactatgtaaatatctgcctggatctctttttatttctggaaaatatattccacagttttccttaaaagctgacattttataattgtgttgtatagcagcaactatatccttccaaaaatcaaatgttttttgaccattgttcagttttgttaaatagtccaccaccctggcacacagaagagctcctggcaggtcaaagtagttgtcgtaaaagtaatactttcctgagcggcaagccattccagtgtccgacaagaagtgcttccactctttcttgccatatgcctctgccagcacctctggagtcatcatcttggtgccatggcttgccctgagaacagtgccattatttgcaagtttaaggaagttcccatcttctagatccaatgccaaacctttgcaacagaaatcccaatcctctggggtcacattgagcaattccttatcgtaccctttctccttaactaggaactgggcaaagctattataaatgagcggggcgctctcgggcaggttgtagcgacacagagtgtggtccaggtcgaatccgaccacgtcgcaggcggccagggagaagtgctgagccatggctgcgcggggagcaccagggagcgcctcggccgcgaagggtgcaaggagctggctggcgggacgctgcgggacaggaccgggccggacccgct

SEQ ID NO: 442221 - DNA, 778 bp, Homo Sapiens
  misc_feature (672)..(672): n is a, c, g, or t
ccgtattgtttaggagtcaactgtatattcttactttgcccatgtctgagtaggaaaaaggaagggaggttaattgattgcttgtgttagatgaaatacgcgtgaatcctttatgagatttataagaacatcaacaaacagtaacttgggcaaagaattccaaagacatttctttagtcctctttcaataagcacattttctgacattaggtagtaataaaagacagtgctcatatcgaggcttactacatgcttttggaattgcaggattttgttatttaaatttagactgtgattctctgagtaactgtatatattgctttaccccaaatccactcaaatcctctgagcagcagtccttcgggtctaagtgccaccttcacgagacaccccgcacacaggtgccgtcagcagtgtggctgaccctgctagctctccacccacggtccactctccacttcaaccttattaacagaaacttgattgcttccaaatggcaatcaactcagccaaagatctacatttcccaggcttccatgtagcatgggacagctatgtcatacagttcttgccgatgagataaaaccagacatattctatggacctctgagcttcttctaggcttgaacacatatgtggggcttgtagtggaacacgccttttagccattangcccaaaccacatactaaggattgttaaccaggatataaagacctgtatctttcttacttcttaaccactcaccaacctgacctacctactttgacattaaatttg

SEQ ID NO: 442222 - DNA, 1035 bp, Homo Sapiens
  misc_feature (129)..(129): n is a, c, g, or t
  misc_feature (146)..(146): n is a, c, g, or t
gcaattcccacaattttaatggtggtgtgggtgggaataatgggagccataccatgatcttgcccggaaaaggccagccacaaaggctttcccagttgaatccctttagcagggctttgtacaaagagnccctgactccatattanaatgatgattctgcttcacataacctggagcattttctctctgctggagtcagaaaaaggcataatgttctgactatcttatttactttctctgcactgctacctactacaacggaacagccacaggtttgcaagtgtgagctgatggcattgagaagaaagccttcatgacagctgtcaccaatatcatcatcattgagtactgtatcagctatatctatttcttcaggaacactgtgtgatttcatagatgaaagcagttccattacaggaatcacttctccagtaagcattggaataatactctgaccctgatcttccattctctctgtgccttctaagataatcttctggacattttcttgtctttccttatgcatccatattcttcctttccggattatatgtgttaatctatcaacacacactctatgaagtgggaggtagaaactaagttctgtctgtggaagtataattgatagtccatatgtgctgcgatccccattccagtttccatcaaagattaatgaaacaataatcactcccttttcagacaagacaaaaaactttacatctatagcaccactctctgcatttcgaaggatttctccatttagagtgtggttggcaagaaaagttatttctccatcactgagaagtacctgttctgtctttggagcccaaatgtgccttactctaggaccaagaatattgtcccagtaagcaaaagtagctgctaataaaggtgatttgccacttaaagcaatctctgtcttggcaacagctggagatggcggtgggcaaagagtcgacatcactgcattccaactgtcacattatccaaatgctccggagatatccactcgccaatcccgggaattccggaccc

SEQ ID NO: 442223 - DNA, 488 bp, Homo Sapiens
  misc_feature (444)..(444): n is a, c, g, or t
tttttacaaaaataacagggtttgcacagctctattaattttttaaaattacacaggcaaggtttatgcttcagtataaccatttttactttggatttaagtgggaattttaggcctaaaaataagattaccaagcagaggccatctagccacacagacacaagacatcttgagctccatgaaactagaaatgtggtgatgtcatcctcacacgggggggctacacatccccatcgattattttaactaaaatacaaaagcaaaatagtgtgttaaaataatcctctactcaatgcattagcacatataccaaattatactatctgcatgacagtctctaggtaccaagactgtatttttgcaagtgctattctctacttcattaaatacagtacccagccagcaaccacaaaaagagaacgcatggctggtacagcaagaganggggagggagacgattttcaggggccataacttccatggcaacc

SEQ ID NO: 442224 - DNA, 594 bp, Homo Sapiens
gatcgatgaaagggcacctgcaagtctaaagtctctttggtgagaacactgtacatccgctgaggcagagctttggagtagggagcaggaagaggacatgctggcaggatcattcacaagctgtttgtgaatgcccagagggctgcagctatgactccaccagaggaggaattgaagagaatgggctccccagaggaaagaaggcagaactccgtgtcagacttcccaccccctgctggccgggaattcattttgcgcaccactgtgccgcgccctgctccctactccaaagctctgcctcagcggatgtacagtgttctcaccaaagaggactttagacttgcagttaaaataatcgatggggatgtgtagcccccccgtgtgaggatgacatcaccacatttctagtttcatggagctcaagatgtcttgtgtctgtgtggctagatggcctctgcttggtaatcttatttttaggcctaaaattcccacttaaatccaaagtaaaaatggttatactgaagcataaaccttgcctgtgtaattttaaaacaattaatagagctgtgcaaaccctgttatttttgtaaacac

SEQ ID NO: 442225 - DNA, 1045 bp, Homo Sapiens
  misc_feature (140)..(140): n is a, c, g, or t
  misc_feature (464)..(476): n is a, c, g, or t
  misc_feature (905)..(905): n is a, c, g, or t
  misc_feature (978)..(978): n is a, c, g, or t
cttttgaaaaatgatttgtaaattgagggtcatagttcagcatcagtttcatcttctgggattattgttcaagaccagcctctaatgggaggtgaaacggtacgatggtctcaacacctttcttctgaactgtaaatacnatatcacaaaaagtacatccataattcagggcaattgtcagtctttttagagaaggggccagggtggaacaatcccagtgagtaaattatttctcagcgtggacttctctgcatgtcgggcttaaggtcaccagccgggcagggtggaaggagcttgcctctttgagaaaccaaggagtcccagtgatctgttaccatttggttatgacttctaaagagccaaatgctattccttcaagcctgttttgcaggcagaaaataccagcagtgtcatttaggggttcctttgatgatgactactgctgttaactgacctcagcattnnnnnnnnnnnnnttcagggaatagtttgcaaagaaatgaaggaagttttgcatgatatattctataacttgtcattatatgatttcatctggatgaagttcctcaggagtaggatagagcctctgtaaatggtcattagtattacattctgtgtttatctaatgaaagtgcagtgacaagtagctgcttcttattaaaatgaaaatcctgcattatgtacttgaggaacattccagctaatgaggatgtaatgtcctcagtacaacgcagaccttctttttgtgttcaccaccacaagatgctggaagcttgacaaatgatatcatttaagacacatgcctgccttagggacctggtttttggcttcctgtttctggcttttatttgggtaacgtttataatggccacccgacttgtacctgggtaatgttttaacccctntcccagagttctcaattagcatgaatttactacagtcagagtttcctttaaattgacatatgggataaatacntgatttcagattacataaaaatagattagtaatgcacagctttcagaataaaaacaatgataatttt

SEQ ID NO: 442226 - DNA, 533 bp, Homo Sapiens
  misc_feature (98)..(131): n is a, c, g, or t
  misc_feature (286)..(329): n is a, c, g, or t
ttaaataatgtcttcaccaaaaaaacagtcttgtaccaataaaatgcattcaaaaatagaaaatattacacaacaaaaatatgtatccttcctttccnnnnnnnnnnnnnnnnnnnnnnnnnnnnnnnnnnttccaacaatttttttcctctcctaaacattaaccttcagtctagggcacaattatttattgatttaaatgtctgtttttgcataaaacatggaagatgcaaaacatttactgtattaggattgtgaagttacagccactcccacccctgctctnnnnnnnnnnnnnnnnnnnnnnnnnnnnnnnnnnnnnnnnnnnntgatagagtcagttggctaggaaaaataccgctgttcttccctttactgtgcatttgtatgggtaaacgggccagtttggtattggggaatgttgacgaagggagatcaggtttcaagattggattcaagagcttctttagcatatgctgataccaatgagtcactgacagtccccaggttgtacaactatccattgcaaatcc

SEQ ID NO: 442227 - DNA, 731 bp, Homo Sapiens
  misc_feature (663)..(663): n is a, c, g, or t
ctatgaagaaatttggcagagaaactgctatttaaataattcttcatgaatcacaaatatttttcctcaatttatctgctattttatgtcattacctgtgactgttagtattttaggacaatttcatttgactcctgttggaaataagtgttgcccttttaactatgacttcagtaaaactctcagtgagctgataggaaaggattctgattactcagctgtctaggctggtatacacagagcagtgagtctgtattgttgggaaatgaagttggaataaaataaagttgaagacgagagactggaatttgcctcactgaaactagaaagagtttgcagctttactgaatatgcagggagagaagaggaagccagaactggcctggggtgtacagctaatggccaaagaatgttctcctgaagaccatgtgcacttaggtctacgggacccctcagagccaatcttcagagcagagacataggtagccttcctccttggatgactcccagctttcacttgagaacccagaatcactcaggtgcctttgccaggcaccagcacagtggcagttaacttcccaagagaggggaggacattctgaatgaccactttgcccccctttcatccattttcaggagttaatctctggcgtacttcattgntttcagagttggaactttgtcatttctctaaaagcctaaaggatgaccctttaaagtagagcacattg

SEQ ID NO: 442228 - DNA, 690 bp, Homo Sapiens
  misc_feature (50)..(50): n is a, c, g, or t
  misc_feature (86)..(86): n is a, c, g, or t
  misc_feature (133)..(240): n is a, c, g, or t
  misc_feature (247)..(247): n is a, c, g, or t
ctcataggtttaaagcatgtggactttccccataatgttattataagcanaagtcctagccacaatttagggctttatataagtcncctctcaagttcctcacaataacctttgaatatggtacactgggcannnnnnnnnnnnnnnnnnnnnnnnnnnnnnnnnnnnnnnnnnnnnnnnnnnnnnnnnnnnnnnnnnnnnnnnnnnnnnnnnnnnnnnnnnnnnnnnnnnnnnnnnnnntggaacntaagcttctgtgcctttctgcgtatttccttagactagtccctgccatccctcctccacgccatggagtccacatagaactagcctgcctcaagacagccctttggatatttgagaacaagtgccaaggcttcccaaatctccgtccttttgccataccagtccatccttgaaaaggctcctcaggcattctcggaggggtgcccagaagcccttatcggctactttttgttgactgaactcatcaaactctacttcgctgactgatattaggcaagcacagcaaactgcaccatggggctctgctgctgtgaagggggatgagaagcccccagaggaagggctgcagagaggaagtgctgactgctttttcttctctccttcccgatgagaacatggaaaaaaacagcctgcccttcagagattgcctccctgctcgtgccg

SEQ ID NO: 442229 - DNA, 269 bp, Homo Sapiens
agtctcccaggctagaggtctaagatgctaatgagacatgcaaaatatgaataagcatgtacagctactgcacatgtgcacccagaagaccactcagaacaggcttactagcagctcctcttcccccctccttactaataataatgtaaaactcccataagggggtttctccagcgacaatccacgctgtctcactcttatgagcagcccgccctggaatatctctctcacggtgtactgtattctgcacttaactttcaaaaattttt

SEQ ID NO: 442230 - DNA, 497 bp, Homo Sapiens
  misc_feature (416)..(416): n is a, c, g, or t
  misc_feature (464)..(464): n is a, c, g, or t
  misc_feature (474)..(474): n is a, c, g, or t
gttttatacttttattgaaactgttagctgcattgccaactgtcattttcagttgtcactaaagtaagcaatgtaaaaatgagaaataaatattatggtcactaaaactgctgttgtgtttgatgtgtatgtatattgtctgttcgatagatgtttctctcttgttatatgtttatttttcaattttacacatctgtctatacacattgtctttccatatatattaacatatgcactgttaaacgattattggcataactattaataattgcagatctgctataaaaccacagccaaccaatttttctacacaagagaaattagtttactccagtttagtaactgagctacattgggtatatagttgtaagcccttacgttattgcaaaggtgttttagcgatttagcaatattcnttgtgatctttactggagaggaaccaaaaatactgaggctgttattcnatgtaaatcngttacccttactctctagatttc

SEQ ID NO: 442231 - DNA, 802 bp, Homo Sapiens
atttccttccctcaaaccttgcccattccctctgaatattaggtgtgatgtcaacagcatgttagaaggatcaatgggaaggcaatgattgaaaacatttcaatgaaccttaatagtgttcctttgaggagcacccaggagaatatctggtcatagatctttttttaaatgcagttttataaaaccctaacagcggtgatatcattagactgtatgaatcagttttattacctagtgtacaagtgtcagtcatgtatcattatatagtctgttgatctttccatttgcaaaaaattaatagttttcccccacaaatgtacaaagttgtatgcttccagtcttcttttaatgtttatagtcattccaaagtaacattctattttacactttcacatacattgttatgaatcattggtttttctcttttttccacttatcaccaatttatttcattcagccagatttggtgtcttcattttgtagaacggtgtaagtggtttccattccagcatgaatgtggtcggtcacatggcagtggagtaaccaaattccaggtgttcttggaaacatttctagggtttggtatgttccagggaaaatgtcaaagacatcagaactataaactcccctgtgcttaattagaaaaatgacaaataatgtataatattgtatatgagagttcactcatgtcatttgttaatgttcagctcagggatattgaaaaaatggataaatctgtttttaaaaaatcgagctcgtttctgtgtttaatacaaatggtaaaatgtggtttttgtattcc

SEQ ID NO: 442232 - DNA, 480 bp, Homo Sapiens
aaagaagatggatacttctgggttttcatccatcttagtgacactgagcaaggcagcagtggcactgaaaatgggagatcttgacgtgtacagaaatgaaatgaaaagccattcagagatgaagttggtgtgtggcttcattttggaacctcggctgttgattcaacagaggaagggacagattgttccaactgagcttgcgacttcacttgaaggagactcagcctggattgcttgtggcttcagttctgggcttgcagaagaacagcaaaattgggattgaagaagcagattctttttttaaggtgctttgtggtaaggatgaagataccattcctcagctcttggtggacttttggggaagctcagctagtgggcatgtctcccagatgtgggtacttcagggaactctttttcaaactcacatcacagtacatctgggagattgtctaaggaggcagcctcctgacaaccacaacc

SEQ ID NO: 442233 - DNA, 685 bp, Homo Sapiens
  misc_feature (276)..(276): n is a, c, g, or t
  misc_feature (504)..(504): n is a, c, g, or t
  misc_feature (513)..(513): n is a, c, g, or t
  misc_feature (518)..(518): n is a, c, g, or t
  misc_feature (521)..(521): n is a, c, g, or t
  misc_feature (663)..(663): n is a, c, g, or t
tttttcatttgtttgtttattgaaaaaacagacatacataatcagtttataagataaaagtactaattaaaagactatatctgtagaaactttatttgtacatcctagaatctgtttccttttaaaaatgtctaaatttgcttttgccatggcgctaatgctaatcggtaaattattgattgcgtggcccatgtgatgctgtgatattcagcccagctgtcgctttatcagtgctatatttatctggaatatagagggctccttttactgtttttnaaggtgctttgtgctagggatgaagatacaattcctcagctcttggtagacttttgggaagctcagctagtggcatgtctcccagatgtggtacttcaggaactctttttcaaactcacatcacagtacatctggagattgtctaagaggcagcctcctgacaccacaccattgcgaacatcggaggatcttattctcctggtcattccttggtagatatttggaatnaaataatcncactntgnctgtgattgggtagatcacattccatattctcctgtgagtctcagaagatgcttcattttgtagaacggtgtaagtggtttccattccagcatgaatgtggtcggtcacatggcagtggagtaaccaaattccaggtgttcntggaaacatttctagggtttgg

SEQ ID NO: 442234 - DNA, 595 bp, Homo Sapiens
cctctttctcagtcttttggaatagtttcagtaggattggtaccaattcttatttgaatgtctggtagaatttggctggaattcatctggccctggtctttattgttggcattttttatactgatttaacctcattgcttgttactggctgttcaggatttttgcttcttcctgattcaagctaggagggttgtgtctttccaagaatgtatctattttctttagactttctagtttatgtgcatagaagtctttatagtaatctcaaatgatataaagtctcactttggattttgtttgttcatgtttctctagttccttgaggtatgacattaggttttcaatttctgatttttcagactttctgatgtaggtacttagcactattaactatcctcttagcactgctcttgctgtacaccacagagattgataacttatgacactatagtcaatcatcttgaagaagttgtacattctcatcttgatttcattcttagtccacaaatcattcacgagcagattgtctaatttccatgtatgtgtatagctttaggagttccctttggagttgattccctgctttattccactg

SEQ ID NO: 442235 - DNA, 1056 bp, Homo Sapiens
ctaggtatccccctttaaggccagttaggattaaaaatgaatggccgggtccctttattagggggaagttaggggttaaaaggaccccggaagggtttaaaaaaacccatgagttagcccgtaaagggcccttttggggtggggggattccggttcttttttaactaccaacatttccacattccccttttaagccagagaaaagggggtttgaagggggagttttaataaaggggacttaaataatcctccttccccccttgggggggatcttgataaaaggatagccaccccacatggaaggcctaatataaactggtttggcagaatgcacttgagctgggagccccaagcgggccaggctttcttgattcctattttatccccctttaccctaggatagctaggtctatagtgcagactcagacctaacttacactttcatttgcagctgaagtttcggaacaaagacaaagatagccagatcatattaattacagggataggcaagaaagcatgagccctgaggaggaaggaagggactgtcccaggtgtacttacctcaaagatgaagaaatatcaaagacaggaaaccctaggttcttgcccttcagtcgctatctccttgccattagtaaaatgcggccgatgaatgtcctcacttctgtccatctgggcaggaggtgggaagggtgacgtgcaaatggatgggaggaacccttttttcggcagcacccaccacacccagcctagtgccacgcaccgcaagcgctccataaacgcacacagcgtcgcctctaccaggatcccgggcggccttcgcgggatttctcctggcgtcggctttcagactcccgagggtgggataaatcgagagggtggcatcctttggcttttcttctcccaggcagctctgaaccatgtttatgcaacgtttaatgggctctaataaaacggctaataattttgatccgcggaagcaccgactcgctcgctaagccgagtctgcgagggtgaagctgcaactatcccgggaattccggaccggtaccagcc

SEQ ID NO: 442236 - DNA, 536 bp, Homo Sapiens
taatgtaaaacaagaccagtcacaagtttattctgtaatttttctttaacaggtattcaattctgtagaaaattgcaaatatttatttttaatatttacatttgggtctgtaaacaaagctggtaaaaaaatcctaagaatttccatacatatttataaaaatttcaagaatatgatccttatcacttctgaaaagtatgcattttttaaattctaaaagccagtaaatgtagaagttgaaggggacgagaaaaacgctgttaacagattatctgaattttcctcttcccaaatatctaaaacattgcatataccactcttttctgtgtagcttgtgaaacccaaaaattctgatttctcttcactagtctgaaacaagtctagtaaagactgtaccggtgaactacaaattctgttttcttcttgtgtaataaattcagttcttttatcaaattcagcatttggttccagattttcttttctatttcgtcctaatattattttcacttttcgatgtattttaccagaaggtaaac

SEQ ID NO: 442237 - DNA, 759 bp, Homo Sapiens
ttgcctgaaggatctcccaaccaaagcatatttctggagagctctgacaggggagcattttaacaaggtcccccctggagctgaggcttgaggtcaggtccaagtgcaggcctccttcccatcacagcttccgagccttcctggggcggcagccgttgtgtgggattggggtgttgtctgtgattgagatcacttccgggccgcccatgatcagtccgtgcatggcagacaagcgtcctggccccaggcctttcaccacaactcggatgtggatcacgcccttttgtttagctctcgccgctgcggctatgcctgctgtctgtgctgcgatgcctgtgcccttcttggcattccgaaatccctctgtgccacaggaagcaaaggcaaggggctcattactagcagagactacctggatctgtgtgttgttgtgggatgctttaatgtgtgcaattgggatctcctcaaatttctttcctgcccacctcagagagctctcctctcctggaatgggagggtaaatgctgaacttggtgtggctgggagccgcgttctgttcaactttctgcttggccgcagcgtcttggagctgtcgagcgcctgtgcagatggtcccggccggcgttctggccacgacctgccggctgtctggggccaagtccaggaccgcaggaaccgcgaccccgcgtttctcacagcctgcatgacttgaattgaccccagtcagtttccgtctgcagcgacagtcacagctgcccc

SEQ ID NO: 442238 - DNA, 1038 bp, Homo Sapiens
ctggtaaatagcaactcacatttatattttactttcatctgaggcctcacctcatttcacactctctttttcaagaggaattaggaattacgtaactctgaaagcaaaaaatctcaaaattatgacaggtggtacagatatttattttctcagagcagagtttgggcctaggccacggctgcccctgtagctcccctcttgtaagagatgcaaagcttacttctggggcacacccatctccagctggaggtgcaagcaaaggccactgtgtaaggaggcaaaactctcccttactgcctgaaggatctccaacaagcatattctggagagctctgacagggagcattttacaaggtcccactggagctgaggcttgaggtcaggtccaagtgcaggcctccttcccatcacagcttccgagccttcctggggcggcagccgttgtgtgggattggggtgttgtctgtgattgagatcacttccaggccgcccatgatcagtccgtgcatggcagacaagcgtcctggccccaggcctttcaccacaactcggatgtggatcacgcccttttgtttagctctcgccgctgcggctatgcctgctgtctgtgctgcgatgcctgtgcccttcttggcattccgaaatccctctgtgccacaggaagcaaaggcaaggggctcattactagcagagactacctggatctgtgtgttgttgtgggatgctttaatgtgtgcaattgggatctcctcaaatttctttcctgcccacctcagagagctctcctctcctggaatgggagggtaaatgctgaacttggtgtggctgggagccgcgttctgttcaactttctgcttggccgcagcgtcttggagctgtcgagcgcctgtgcagatggtcccggccggcgttctggccacgaccctgccggctgtctggggccaagtccaggaccgcaggaaccgcgaccccgcgtttctccctcgtgccgaattcgccacccggcctcgtacctagcccgtaggtttgtttgccccc

SEQ ID NO: 442239 - DNA, 577 bp, Homo Sapiens
ttttttggtcatcaccacagaactggcttttactaacaaaaccaaagaacctcaaacactttttgtggacttcaaattctttccttcagattttaaaatgacattatgcatgtacatatttttaaaatttagacacattttagagaacacaattgtgaacacaaatctaagaaatgaatgagatgttctgaaatctgattcaaacacttatcttaaactgacttctgtcaatcctctgtcctgtgaagtaagtcccgtttctcctttgcctggagggaccgagctggaattactgtcacatgttacagacatgaggcaggggttaatgcagaaccacggaacagcacctctgatgacatctagtggataagtaggaaggtgtcaacccaggtggcttttaaaaaaatctgtaaataaaatctcctcctttattccacagattttaatctttccctcagtgtgttagaaagactaatagtgtttttcaaacgtgtgtggatggactcacctggggagacacccgcatcctaggccacctttgtggctgctctgcagacacctggctgcacccgctgcc

SEQ ID NO: 442240 - DNA, 637 bp, Homo Sapiens
gtgaatgactgtcatcttagaacgaataaagcaccgagtccacagctccagcccaaggtccttctcacagccgtgccaggtcctggacctcaaccccaggacagagccaagggataccccaacctcagggagtgcctgtcaggctctgccaggactggagtgctcacacaaccaagtcagggggccacatggaagaggagcaggaatggtggaaggcaaagcagccatggccaaggccaggagccatctcccctcccacccctccagctgcctgagtgcaggcatgacagacagcggctgggcccagaagcccgactctctggggccaggggagaggcctgcagttcccatcagaagagcagaagacgcagagctgctgcgggttgccccagcaccaatgggagcttccctatggcccatgcttccttcctggtgttggccccaacccagcagagagcatcctggccaagtccaggctctgccaccttgcgccctctggtggccacattggttagtgccagaggggaacccaggatctcccccagcccctcccaggcggttcctcttcccctaagccagggtttcagctgcacaagagatgatccaaagggccgggggacatcagcagcccttggac

SEQ ID NO: 442241 - DNA, 800 bp, Homo Sapiens
  misc_feature (45)..(45): n is a, c, g, or t
  misc_feature (47)..(47): n is a, c, g, or t
  misc_feature (194)..(194): n is a, c, g, or t
  misc_feature (215)..(215): n is a, c, g, or t
aaaaatattgcaggtcaatataaggcaaagggcaaaataaatccntnccttaaaacatttttatttcttttataattgagaacttaaccagtcttaaatgcttagttcttaaaaaatgtttataggattaagtttattttaggagagcagacaaacaaaacatattgtaaaactagtattttccagaagcaatntccattctcttcctttcttcntgcaaactggtgttttatctttacaagttctctgtcattccataagaaagctgaacagtggttaaaacatccagtttgcttgaattcctgagtgattcagattccagtgagattgagggtcattcataacagttacaaggctggtgtggtaaagggagaacaaaaataaactgggtttctgcaggtaagtgagaagacaaaatgaagaggaataaggttgtaaggcagtatgattaggcttgtgggtgctatgccttctgataataattatgaacagaaatagaagccaaaaagtaaacaacatgtaagttgtcaatctttgacagttgaggcagggagaaggaaggaaggatgacattacaccttatctctggtttactaggctggtgtgtgagaccatttgggtgaaatcgtattgaaatcattcattgctgaggtgatcagctttcttgcggtcctttctctgcactctattcaatgataaactccactggtttatacctcctggaaaacagttattcagaaacattataggggtagcattggtgagacagccaatggagaacatgtttccaggtagcctcc

SEQ ID NO: 442242 - DNA, 823 bp, Homo Sapiens
  misc_feature (809)..(809): n is a, c, g, or t
ggagttgtatcaaaatctgctgcaccatgggagtgttttacacatgtgatgtggcatctaccttatgtaccataatggaaaaatgtttgagaaccactgcactaggccaaaggctgggatgtgtatactttgctgccgtgtataattgtatgtccttgttctctaaatggaattggttatgtttagtgaacagttaggtggttctccgtgtgtttatatacacagacgatccccgaatttggatggttcaacttaagagttttcaaacttacgatgatatgaaagtgatatacatttgatacattcctacaacttacaatggggttatgtcccataattgttttgacttatgatattttcaacttacaattgatgggtttactgagacataaccctcttgtaacttgaggagcatgtgtatatttgtacatacatgatggtgtgtgtttatacacaaaggcctgaatatacacaccatgagcatttgaaggtctttgtcaaggttgtttctgtttctgatctcttgcctactttaaaacccaagaggtagaacattatgcatattacaggcaaaactatgcttgagtttatagcaatgtagtttgtagaaaggattcctgggatgttttactaagcctttcctcctccatttcaacattatatggaattgttaaggaacatataaagtaccactgttgaatgtgacttttctatactgttagttaaggaaaccaggactagtgttagctgagtaactgggcatgttggatgcaacctatacaggttttgtatttaattagggtccctanttcagttgattcca

SEQ ID NO: 442243 - DNA, 604 bp, Homo Sapiens
  misc_feature (545)..(545): n is a, c, g, or t
gcaaatgggttttgtggtggtaacttgaattggaggagagagacagctggcctggtgctgctgctgctgccaaaagccatcttgttaacatggtttatttccattctgtcttcctgctacccacaagagccctgtcctcctgtctccctcctctttcatcagttttcagtggcatactgtcctcagtcacatttctcctgctttgccagtaaacagcatgtagctgattcttctagtcctcgcctgcattcctacaattcctgctcattccgaattggttctgttatctcctaagttgttgcaactcctagaactcagccttcttttacatctccaattctcattatgtgtttgaatggcttcagcttttccctccgctagctctttgagctccaaatcatcaactcagacaaaaaacacagagaagggagtgcatactgtatgtacatgaacatgtttgtgtgtgtgttttatatatatgtacatgtttgttttcatctctacctgggtattttttgggacatttatggccatatgtctttaanaatagatcccatatgtgagaaagttgccagggaaccccaggagtccaaattgattttat

SEQ ID NO: 442244 - DNA, 2495 bp, Homo Sapiens
  misc_feature (409)..(462): n is a, c, g, or t
  misc_feature (2141)..(2168): n is a, c, g, or t
cttcttattctccccccctctggagggcccgtttgactatctccttcgctgtcagtgcaagtatttttctcgcaccactaatgtgtgttgttcactcctcccctcccctgagagtatatacacaggcgtctccctttcttccccgagagagttgtgctcctctcatcatgtcacgtcgagggctgtttgtccgcccatctactcctatcctcactgcttctagtatatttgtttgtgtcgtaccttgctgctgcaacgttctatatatgagcgcgcgccactgttattttgtgtgggacacgcccttgtgttgaccggacatcatttctcttggtatgtgactcgtattatatctttgtggttgcctccctcatgtggagtatattcctatctagtgtgtgcccccccnnnnnnnnnnnnnnnnnnnnnnnnnnnnnnnnnnnnnnnnnnnnnnnnnnnnnnattgttctacaagtcttgtttattgaaaggatctgaaaagcgtaataaggctttcaatgacatttaatacattttcaagaaattaatatgaaacattaaaatttacttcaaaaatccaaagttttctagatcattcccatctcacgctgctttagaggtcagttcacaccttctgtgttcagatgagcggctggaattctgaacactgccgtcttccagccctaacgctgggcgctggtccctctctcctaagcccacggctgggcttcccctgtgcccagggtcatggcggacttcaagccaggccggctgcccagaatcacactcagggtttttggacgctcaagtccacagatgctgaggtgcccagacgagggtgagcagggagacacatgcctcggagaacgtgcccaggctgggccaggcggctgcgggaagctcctcacgggcagaggagaacgtcttgtgccttccttatcgatctccagcagatgagggcaacttcgtgtgcaaaactcagagagcagttactcaaaaaaaagacacccgggcagcagtaaccaggacaccagggtccgaccacggcctccacacacctgtgcccgtggaagacgcgggcgccggggtaggcagcatccacgtgctccacagctgctggtgctgggcaggctggagactcacgggagaggcaggaggagaatcagcgtgttgagtccctcgctgtgttagtgtgaaaaattctcattacagttgcaaataaaagggatcacgatcactagccccggaaaccctcatctcccggaccatcaggatcgcactgaacagaatggtcccctaatggtccctgaggacagcgtcttgcagaacataaatgtaaacattgaatggcagacaactcccttccccttgaaatcttcacaaaagtgtgtacgagaaagtatgtacatcagcacttcagaaagtttaaaagagtctctaaaaagtatatacaggatttaaactaccttcctgggagcagaagctacgtgaggaatgtgtgggtcgctggcgatgccagcccccttcccgctgagtgtcccagactcagtgctggcctcaagcggggagggctggatggcaggggacgcatccaaccctctccagaaactgagcagaacaaaaccgccttgccagccactggcaagaccatgcttttcaaatggcgcctgcgccaggggcttccctgcagaaattttaggggaagaggtgcaggtcaaggggaaaagcatggcagctcaaggaaggtttttggctgagacatttattatcaacattgaaggacaggtcgagtcattctgactcctctgaatttcaaccgactgatttgcggaaaaatatcctggcatggaaattgcggcagctggaggccgcgctccagggacccaccgcggggtgtcagcaggacagaagcactcccagcccatttctcacgcttctttagaaatgcaaaaaaagtcagagattttaaaaaaacagctgatctggacaaaaggcagacccaggctctaacccagctacagaaaggaagtggccgtgccactgagacaggcggtcacagacacacgcagattggtctgtccccagagggcgcttggagggcagcggaaggattcgggcctggataggggcttgacctagcnnnnnnnnnnnnnnnnnnnnnnnnnnnngaagtgggcttgcttcttccggacgttccaatgcaggcactgggcgaggctctcaaaccagtcgctcacggggtcccgcacacagatggaggggagcgggtagcatgaggtagtgatgctgatgctgtctccatggcggatctcttgtctcttccgtccatcaaaggacacccatgctgtgttccttgcttcaggtgacagcatgatcttcagctcgacccctgcggggaccacgatgggccggaaggacagcgagtgggggcagatgggcgtgatcatgatggccggcacgttggggtggatcatggaggccccggccgcggccgc

SEQ ID NO: 442245 - DNA, 598 bp, Homo Sapiens
ttaattgttctacacaccattatgtattgcttttatactagaaaaaaagtgtgagggatgcataggcccagtgggttcagtttttgtgcaggagactagaatactgtagataccacagtgatcaccagataaaagacactgatttttggtgttttcccccatccccaaaatacctgaatactactacaaactgccaacagtaacaactactacaatcatgatttatcttgagaatcactggcatacaaaatattaaaagttgtggaggaattctagaattacatttaagtaagcactgaaaataactagaatttaaaaataaaacttgtatggtattattctacaaactagaactgttttaatgtatagaagataatattcacagtaatcttatattactaggtggatgattaactattttctgctcctattacagaaaagattaaatggcttttagtgttaggagggtttcagctacaccatcagccatgtcaagcccagaaagatatgaactgaaaaataaatcaggatttggacaaacacaaagtttaacactcactacattgccacatgatagttcccatgttcccttgccatt

SEQ ID NO: 442246 - DNA, 637 bp, Homo Sapiens
  misc_feature (556)..(556): n is a, c, g, or t
  misc_feature (577)..(577): n is a, c, g, or t
  misc_feature (615)..(615): n is a, c, g, or t
gcaggattcggcacgaggagcaacattgtcttattaaagcatagtttatttcactagaaaaaatttaatatcaaggactattacatacttcattactaggaagttctttttaaaatgacacttaaaacaatcactgaaaacttgatccacatcacaccctgtttattttccttaaacatcttggaagcctaagcttctgagaatcatgtggcaagtgtgatgggcagtaaaataccagagaagatgtttagtagcaattaaaggctgtttgcacctttaaggaccagctgggctgtagtgattcctggggccagagtggcattatgtttttacaaaataatgacatatgtcacatgtttgcatgtttgtttgcttgttgaatttttgaacagccagttgaccaatcatagaaagtattactttctttcatatggtttttggttcactggcttaagaggtttctcagaatatctatggccacagcagcataccagtttccatcctaataggaatgaaattaattttgtatctactgataacagaatctggggtcacntgaaaaaaattcttttatccntcttttaaggatatgtttaaatattattttatgtgtcngcatattgcggacagtctgaga

SEQ ID NO: 442247 - DNA, 431 bp, Homo Sapiens
  misc_feature (379)..(379): n is a, c, g, or t
tttttaaaatgacacttaaaacaatcactgaaaacttgatccacatcacaccctgtttattttccttaaacatcttggaagcctaagcttctgagaatcatgtggcaagtgtgatgggcagtaaaataccagagaagatgtttagtagcaattaaaggctgtttgcacctttaaggaccagctgggctgtagtgattcctggggccagagtggcattatgtttttacaaaataatgacatatgtcacatgtttgcatgtttgtttgcttgttgaatttttggaacagccagttggaccaatcataggaaagtatttactttcttttcatatgggttttttgggttcactgggcttaaggaggttttctcaggattatcntatgggccacaggcaggcatacccagttttccatcctaataggggattggaa

SEQ ID NO: 442248 - DNA, 994 bp, Homo Sapiens
gcccctttcccttgttcggggaaaggtgacccgagggccgttcttggttcgggaaaaccccaggtggtaaaggtaggaattgggacttggctgtcgggctcgggaagggggtgaagggctcctcaggcgggtgatggtgtctttgcaatggggagaggacccgaatcactgggcgctccttggatggtgaaggccttgtcggcgtgcctggtcacccagttttgtcatcacttccatacagtttgtggcaaagcaccgcaatttccttatgaaacttggcttcaaggctggagacgtttttgaaagtattaacataaaatccaactcgtcttgaccataatgatggtaactcttcttgtaagtcaacgttaaactcttcaaacactttctgtgctttctgaaattcttcttctgccttagagattcgactctcatccttcctcttggagctctgcagagcttccagatggtggcgggcactgtcatagtccactagcttcctgctgcgcttggcgatgcgattctttatgtcaggaaattgccccaggtaggtatccagtgttagcaaggacccatccacgagtttttgatggaagtcttcccacagcacatcacatttctcaccaaccattttcacatcttcccgcccataccagtcaggctcatagacttcatgcagcgactctgtgagcttcatggaggcctcctgcatgcctttgattgctgctaaatatcctcggagttctcgctgaagtctggtaccctctgcttcttgccgtttgaagttctggacatattcttcgaactgttcgtcttttgtctcatcagctttccccagcttttggaggaccttttcctgcgcgcggttgagtcgcttctggacgttcttggcgaagatgcccgtcttgatgtcggccatggctgcgggtccggggagctgcgaagagcagagcgcgcagcggggctggcccgtgatcggaggaattccggaccg

SEQ ID NO: 442249 - DNA, 838 bp, Homo Sapiens
  misc_feature (36)..(36): n is a, c, g, or t
  misc_feature (54)..(54): n is a, c, g, or t
tttctgaaactccttatgttgtgcaagttgtgtttntattttgtctggatcatntgcgatttccagttcagaatccaaagacttttctgactcttctagccactccataagtttactccaagcttcatggaactgcttggctctcttccttgcatcatccaaagatcttcctctctctaccaaccgttgaaccactttttcccatcgactttgtacactgataagtagattcttgattagaacaacatcttgtttctgactaaaatattttaggtgggttccagttttgtccagctctattatctgctcacgatgagaatttacttcattggcaaaaaccttgtgttcgtcaatttgaaataaggactgtgtccacgatgagacgttggccgagaagctagatttagggtctgttcagcctgagtaagccagttgatgaagtcttggagagaattgtggaactccattgccaagttgagagcctcttccagtttagttttctctattcattagacaaggtagagccgagctcggctctaccttgtctgtggcagaacatgtgaggctggagcatgtgcaggggttggtcatggctgtgcaatatgtaaagcatggaaaggttttcttctgagcctgcagtgtgttcaaacgaaggactcagcaatgcctcaggccctgcatgcgaggagcttatataatttcactccacaactatcacttgagcatctgtagcaggcaaagcaatgtgttggctactgtgggcactccagggtgggggaagctttgctccagtccagagcgggagagcagaacagctcgctcccgtgccggtgacgtg

SEQ ID NO: 442250 - DNA, 141 bp, Homo Sapiens
ctaacacaggatacctacctggtgcaatttcctgacataaagaatcgcatcgccaagcagttccatgaagcttggagtaaacttatggagtggctagaagagtcagaaaagtctttggattctgaactggaaatcgcaaat

SEQ ID NO: 442251 - DNA, 1190 bp, Homo Sapiens
  misc_feature (81)..(81): n is a, c, g, or t
ccagtccaccgtgtaaacgcgggcagtgattgtatccgctcacttaggcgaattggtccgggccccgctcgagtttttttntggtttttacgctgggaaagtcttttatagggaggacagcctgcaaaatcctccctttaagagcccaggccagcctagaacctccagaccacagaaggggagtcctgggacaggactggtgtagacaggcatctccaccgccccggttagccagtacctaacacccactcctgccctcggccgatgtggcaaaccggggaggcttttgtgtggggccggggctgcggccatggcagccaccctccagctcccgggggctggggaagacgctggggtccccgtggaggctggagcggcgttcaggtcctgcggtcactcggcgtgctcctgcacctcttccccacgcagggcctgcagccggctgcccacagtctgctgcacggcctccagcccctctgcatccagctcccgcagcagcagcaggatggcagtcaggacgttcctgcccctgtggctgctcgaggcatccctggctgagagggaaggaaactggccccgggaaggcggcttcaggccacgttcatcctgggcgccggttgcctcctcctcgctgtccagcgggtcccggccagtctcagcagcggagctgagggagctcagtgtgcagcatagcttggggccgccgtggcctgtgccctctctctctggggccgcagtgatctcctctccctcactcagtgcacgggacagctcctcctccgtcacagcctggttgtccagcttctgtaggcgcggcagggtgcgcagcacggtcatgcggtagcggtgggggctggtgccgcagcacgggttctcggccagccacagcacccgcagacgcggcagccccttcaggtagaagagctcagccaggctggggatgcggttcctccgcaggtacagctcactcaggcgctggcaccggctcacaggctccagggtggagatgctgttgacactgagcgtgatcacctccaggctgggcatctcctggcaaatggagatatctgtgaggcggctgccccagcagttgagcttgcgcacgctgtgcagctccgaggccttggcccgggtcagaaccatcttccgcgtcagcttcatggcggccgcatcccgggaattccggaccg

SEQ ID NO: 442252 - DNA, 1707 bp, Homo Sapiens
  misc_feature (1387)..(1387): n is a, c, g, or t
ccaatggcaacccccccttccaagttccccggggggctgggaagatccctggggttcccccgtggagggctggaccggcttccaggtcctgcggttcactcggcgtgttccctgcccttttttccccacgcagggcctgcagccggctgcccacagtctgctgcacggcctcccagccccttctgcatccagctcccgcagcagcagcaggatggcagtcaggacgttcggcacactcggagaatctgagcagaggagccccgcctgtggacgcgtgtgtggcacctcttccacgtgactcctgttgccctcagcccagcagggcccgggcccacattccacagaccaggacagcaggagaggctgaggggccaggacggctccgtgcggggcacgtgttacacgtgtgtgcgcattcacagacccgcacacgcagctccccctggggcacagctcttcaaggccctgtgaggctccatgctccctccccacggggccctgtgaggctccatgctccctccccacggtttctgtgcagtgggtgcagtgggcagaggcagccgcggcccctagcggcccgccactcaccctgcccctgtggctgctcgaggcatccctggctgagagggaaggaaactggccccgggaaggcggcttcaggccacgttcatcctgggcgccgctgctgagagggagacaaaggcgtgtgagggtcagggggctcgtggcaccgggggggcctctgcaaaccctgtctgcgggtcgcatccaagcaaaggaggggctcatacaaatcccacctggcacacgggggcaagagaagggaggcaactcctgggaggtcaggggctacagatggcagctcctggagagcccggcacttacttcacctgtggggcgccctcccggcaccctggggctccccagctgtaacaccttccacccaggcttcaggggcagggtggggggcacccgaacacacaaatgccgggggagagctcctgaccatggggtcaggccctgtgccggatggcagatgctctaacagagatcacatcccgatgcccccaccacaggcaccagcagcgggtgtgatctgccaagcaggagagaagtgcccagcttctgtcaaatgcgttcgtgacccgctgccaactgccctgggaggcgccggcgtctcactgcagagtcagccctgtggcccctccacggcccccaggcccaaggccatacgggcactgatggccgtgcccacaaaccattccagtcactgtggccctaggccaccccccccaccaggggctccctgcacactcacgagctctggtgcctgtgagccttctctgtgccagggcacggggcctggctcaccccctctcctgctccntggcacatccgctgttgggcaaaacatggacctgccactgaaatcactacctgggcactgagtcacctcccagagaatatggatgagaacagacactccccccggataatccctgtccctcacttcccagagacgcagctcacgggaagccccattcactccccgtgggaggaccctgggggacagggatgggctgcggagtccccgctgccctccagcctcacgttgcctcctcctcgctgtccagcgggtcccggccagtctcagcagcggagctgagggagctcagtgtgcagcatagcttggggccgccgtggcct

SEQ ID NO: 442253 - DNA, 1437 bp, Homo Sapiens
  misc_feature (340)..(348): n is a, c, g, or t
  misc_feature (1377)..(1377): n is a, c, g, or t
  misc_feature (1388)..(1388): n is a, c, g, or t
  misc_feature (1418)..(1418): n is a, c, g, or t
gtattgtgtgttgtaaattttttaagtgaaatttgcttgcgctctgccttgccatttctttccagtaagtataattttgaaaaaattagaatatatgccaaatattgagtgctgtgactcttcctcataagagatgtgccagattctatgtctaattgcatattctcttcagaggagatgatgcttattttaaacctttttctctataacttttaaaaagtggtgctgagtattcactagagtggcaagtctttgtgctttaatgcactcaatttgtggaaattacttaaatagcaggttatcagatggttctgaatgacaaaggtgttaaatttgggannnnnnnnncaagctttagatatggctggagagtaatgagacagaaggaatgtcttatattgttctgactgctgacaattcctaaagaaaagtgatagaagggtttttaacaaaataagttgcatttattctctttcccagggttactcctttgaagagggcaaaattcagttgggaatataaattctggaatcttcatgaagaaaattagttaacagtatagacatgccctacaaatatcatccacaggcacttcattcaagaacttcaggtgtcagagtgcctggagctctggagcttagacattagagttgattccttggggattggttccaggacacctacttggataccaaagtccacagatgcccaagccccttttataaaatgatgtagtatttgcatattatgtatgcacatcctcccatatactttaaatcatctttagattacttatactgaatagaatgtaaatagtatttacaattgtgaatacaatgtatttagttatgtaaatatgtaaattttaaagttatgtaaatatgtagctatgtaaatagctataaaataatatttacaattgtgaatagtatgtaaatagttgtgaacataactattgtgaatactatgttatatgttatagttgtgaatgtaaatagtattcacaattgtgaatacaatgtaaatagctttcacaattgtgaatacaatgtaagtagctatgtaaatagtgaatacaatgtaaatagctatgtaaatagttgttatgctgattagggaataatgagaaggaaaaaaagtatacatattcagtacagatgcagtcatctttttttcccctcgaacatttttgatccacaattggttgaatccacagatggggaacacacagtcttggtaaatttaaccaacaagggggggtaaacggcatccccaacaggggaagggtaaactggcacatcccttcagttacctcttggggggggcatcactgggttttataggcttccattacagtggactattttccaggattantgggccttttngtttttccccggaaggtttaatttgggggnttgccgtttgtttggattg

SEQ ID NO: 442254 - DNA, 904 bp, Homo Sapiens
gttcagggtcttgtggctgcaaccatcacgccaatgactgagaatggagaaatcaacttttcagtaattggtcagtatgtggattatcttgtgaaagaacagggagtgaagaacatttttgtgaatggcacaacaggagaaggcctgtccctgagcgtctcagagcgtcgccaggttgcagaggagtgggtgacaaaaggacttctctttagccctgaactatcagttttgtatccagagatttatcaactttgttgtcaaactaggttttggagtgtcacagaccaaagccatcatgactctggtctctgggattccaatgggcccaccccggcttccactgcagaaagcctccagggagtttactgatagtgctgaagctaaactgaagagcctggatttcctttctttcactgatttaaaggatggaaacttggaagctggtagctagtgcctctctatcaaatcagggtttgcaccttgagacataatctaccttaaatagtgcatttttttctcagggaattttagatgaacttgaataaactctcctagcaaatgaaatctcacaataagcattgaggtaccttttgtgagccttaaaaagtcttattttgtgaaggggcaaaaactttaggagtcacaactctcagtcattcatttcacagatttttttgtggagaaatttctgtttatatggatgaaatggaatcaagaggaaaattgtaattgattaattccatcctgccttaggagctctcattatcttcgtcctctgggttctaatcctattttaaaggtggctaattttaaaccactataatatggcctccattttaataaatattcatcttggaatctaagactcgtttaactgtttcacactcaaattccaccccctctt

SEQ ID NO: 442255 - DNA, 807 bp, Homo Sapiens
cccccagggtaggttaatagggtactggccccaatggcttcccagttgggtccccatcaaccaggagccttccaacaggttgcttcatccacccccccaaaaagggaaagcgaaactggttgctgggcgatttctgatcaaccacattgcccgaagtctaaggagatctgtatcactgattttcagccctttggaaggtggggatcttatccagaatcccatccaacaaatcctcagcacgaatctttacccctgtcaaggcaggaatgtgatagtaataaaatggcagggcaggggcggcagcagccacttcctttaggaaattaatcaggatatctttggtccatggcttgaggaagaacggtgcaatgacagcgatgccatcagctcctatttctgctgcatgttgggccagttcctgtgactccttcaagctcagtgctcctacgtgaattatcacctgatccagcttgtccttcccttttgtcacccactcctctgcaacctggcgacgctctgagacgctcagggacaggccttctcctgttgtgccattcacaaaaatgttcttcactccctgttctttcacaagataatccacatactgaccaattactgaaaagttgatttctccattctcagtcattggcgtgatggttgcagccacaagaccctgaagtttcttctttgggaaggccattgagctgctggtaggtcaggtaggtgaccttgagcccattaagtaacctctttctgcttcagtttccccttccaggcctccgctcttgtccgtgcagccgctccccc

SEQ ID NO: 442256 - DNA, 537 bp, Homo Sapiens
aaaaaatagccatgacaatttattaatataagtgaattaaccatttctcaggtgggaaattctctttttttaaaaatgtgtgtttatcgtctggtgtggtggctcagcctccgaaagtgctgggagtacaggtgttagccactgcgcctggcctcattgtactccttaacacaagaagacttcaacaatgataagtagttgtttataaggaagcaggatcattaccaaaataaatcctgctaaaacaacaggaatcatgttttaaagcctagtttgctaatttttgctagtaggataagagtgatcgtaatatctcgaacattacatagacacttaaaacctttagttgtatttcatcaaaaatctgttcataccccacgttggtttcaaaacatactatgctttttcttcgtgttatttcctatattcatttttgtgtgtatgtgtatgtcacaaatattgatatgcctggttgtttatttttgttttctattatgcctttttcaaaatataaaaataaacttgtaatttctaact

SEQ ID NO: 442257 - DNA, 695 bp, Homo Sapiens
  misc_feature (288)..(408): n is a, c, g, or t
ttttttttaattcaatactaaagacttcagagcctttaagatgcaatgatgggtttatcaataatactgttcatgctattcgtttcttagtccttgtccttagcctgaaattctaagtctctataaattagcaccagttttccaaatgcatattttatcaaatcctatgatcctaggctggtctaggtaccatcccccaatcttaccttgtgtgtttctgttttaagaccctctcccatgctggccttgcaaactgaaatgcctttgcttttggatctctctctctcnnnnnnnnnnnnnnnnnnnnnnnnnnnnnnnnnnnnnnnnnnnnnnnnnnnnnnnnnnnnnnnnnnnnnnnnnnnnnnnnnnnnnnnnnnnnnnnnnnnnnnnnnnnnnnnnnnnnnnnnnttgcctgcccttggatctctgtctccaaaacctaagcagtctttgagaaatgtcagggcaaatgtccctttcttcctcatgaggccatttcttactgcttacgcagaaactgatctactttctttacattccagcaaatttgttgtgcctgtccctcttcgtttaggtatttctaaaactagactcagttacttcacgtgtgaagtgggaagcagtattttctcacagggttttgtgtggttcgatgcacttagcgcagtgttgttgcatggtaagggctggcagcc

SEQ ID NO: 442258 - DNA, 1815 bp, Homo Sapiens
  misc_feature (56)..(228): n is a, c, g, or t
  misc_feature (315)..(357): n is a, c, g, or t
  misc_feature (422)..(435): n is a, c, g, or t
gcagcctggccaacataatgaaacccccgtctcgcttgggtgtgtggctcatgccnnnnnnnnnnnnnnnnnnnnnnnnnnnnnnnnnnnnnnnnnnnnnnnnnnnnnnnnnnnnnnnnnnnnnnnnnnnnnnnnnnnnnnnnnnnnnnnnnnnnnnnnnnnnnnnnnnnnnnnnnnnnnnnnnnnnnnnnnnnnnnnnnnnnnnnnnnnnnnnnnnnnnnnnnnnnntgcttgaacctgggaggcagaggtttcagcgagccaagatcacaccactgcactccagcctgggtgacagagtgagactccatctcnnnnnnnnnnnnnnnnnnnnnnnnnnnnnnnnnnnnnnnnnnngtcctatccgtaaatgagttagttaagttgtaatcaacagaaatagattctagctagattaagtnnnnnnnnnnnnnngagagagagagactttacagagatagtggggtgttttaaggcagggggaggaactgcacagcccagacctgggagggagggatccagggaaggagagatcctgggaattgcaatagcagcaggcagaggcttttggttcctattgtttcctggctgctatgaatgacttggctttaatgactcccaaggttctggatctctccagttcaaatttcaaattattgacaaaacaatctgattggccaggttggctcaggtgcatatgctaggactaagctttggccagtatgactcacatggtaacagacagggctgctggggccctgtctgtcaccagaaagggagtcacaccggctgctacccctagagggagctatcctaatcaatcataggcaaggtcaaaaaaataattatggaattattttccatttgtgatttctctacgccaccattacactccacttgaccagctaactgagaacccaactgagtacagagactttagagggttagctctgaagagtcctgaagataaggggtagggagggaaatgggttgagtttagaaagaagggcctgggtcccaatcccacaccctctcttgacacctagccctagctccactctgggccagcaggtcccagagttaaggtgcaagtctctcatagagccagtcttcctccccgcggtgggtcatgggccccaaaggggaatctcctgtgggtaggccccgccgaaagactatccggtcatgcaggcggttggtttgaccttgccagaactccatcacctgagggtacaggacatagccaccccaggattttggcttgggcacctcttgatcctggtagagctgttccagttcctcatttttctttctcagatactcccgatcagggatcacagaactctggtggctgaccacagccccaatctggctgctcttggggcgggagtggaagtagcactcagcctcctcctcaggcagtttcttcacagggccttccacacgcacctgacggttaagtggctcccagtagaagacaagggaagcaaagggattagagtccagctcttttccttttcgactctcgaagttagtgaagaagcggaagccatctttcccgaagcccttcagcagcaacatgcgagcagagggttttccatctctggtgcaggtagccagacacatggcattggcttcccctatgtcaggacactgaacagcctcctcaaaccaggcagcaaactgtttcactgggtcaagggaggtcagatgagtctcctcaaatgcctctcggtccccgcggtaactcttgcgcatgggtcccaggtccatggcagcactgcgacccctcgtgccgaattcgccactcaggcc

SEQ ID NO: 442259 - DNA, 588 bp, Homo Sapiens
agggggtatgaacagcaaccataaagaaaggaatctccaacagaagggacaatggccagcagtaggtgaagggaacccattagatgacaccacagtcatctagaagtcaggttttctcttcttttggttcttctttttatatgctacctttttgcctctctgatttatggggaggctcttttagtaaacattatacaagatagtacaaggcaaaagaaaacaaggaccaagaagcagtgctttgagtaacttaggaaagcagcagtaggagctgccagactgaaaaggtaaaagggtttaaaaccaaaaccaaaaccaaactcactatccagtcttcctctcagagatgagatatggctggtgaggcttgactacagctaaatacaagtcacaggcttagtaagttaagacaacatacaaataaaagtcccaaattcacactaaataataggcttatgggatgcttaagccagtgagtctgctcaactcagaagaaaggagttcaagataccctacttttgcctggaagatgtactttctcaggcaggatgacaaaaatattcatagatctgagaatgcagtataaac

SEQ ID NO: 442260 - DNA, 665 bp, Homo Sapiens
  misc_feature (619)..(619): n is a, c, g, or t
ctgaggagaaaaaagaaatttttttatttagctaaattaaaatggctgtgttacttatttgaaatatgcaaagctcaaatcaagtcatggaaaccctgaattctccctaaacagaaccaaaattgcttatacattaccaaaatagcttcactaaaacaaagtagatttaaatttcttaatatgagaaaacaacaaggtaggttaggttcgtataacaaacaatacacgctctataaagtctcaggaatacccaaatgtgttctggtttggatatgaaagagggaccacttctagctggtgttggtaagcaagccaatgaggtgtgcagcaaacaaaacctgtcactaaaaacaactcaacaggccattatgagtatgagcccatcacagccaaaatcctcaactgtgaccggcaggaccagcaagggggggtgttgaaggggttatgaacagcaaccataaagaaaggaatctccaacagaagggacaatggccagcagtaggtgaagggaacccattcttcagctctgttgcatcatacacattcctgagggtcaggcacctctgccttttagatgacaccacagtcatctagaagtcaggttttctcttcttttggnttgttaattttatagctcttttgtcccgaaatcggaccggaccacc

SEQ ID NO: 442261 - DNA, 612 bp, Homo Sapiens
ttctaataagagttaatatctttgcttttgagttttttttccaaccttaaatattacatacatacaccaaaaattacatagctgcaatgtgctcaacagcatcctctcggcctggagcttcacattatcaaaagcttagaaaacttgtaaacctctgggcctgtctctgggcactaggagagcccccgccggccgtccccttcggattgagcctgcagtttgtaagcgaagggctgacagtaggccttctagtccaagagagggctggctcgcttggagttcagtgagctgcacgcctgtcccagtgtgaccatgtgatgggggaggggccctagcacttgccctggccttgtgcagctgctcttgcccccagcagcctccgacagaagagcaaggcacctatagctgttgctttccctgcagctccctggtcctcaactccatgtgcatgtgtgaaggccaccacctctcctgggcagtcacccggaacctagcctggtcccaacctctcttagagagcaagttcaacaggcctgagggctataacgtggtcgacaggccatgtatagccgggagtcagtgacagcagctacaactcccaagggatagtgt

SEQ ID NO: 442262 - DNA, 590 bp, Homo Sapiens
cataaagaaatgccactttattattttcaagtacataggtagtacctcaaactaatgtcttacaaaaggtcaccaataaagatcctgtagatgtttctttaacaaatacataaagattgatgataattagcccatgcactcgctgcttctaaaaggatatttctaaagtgcctgaaaagtattgtttttggtagactaaacatgccacctctagcaatattgtttatgctcttaatttactaaaaaaatgccatttttattgattgtgcaaagataaacttttgtccacagttagtaatctccaattaatcggatccaaattaatattgtctcccacttagattcccaggcccaaggcaatgactcccttacttccttgcttctgataaagcaaaattccagtgcaatgaaatgacagcctttgggaggtggtttatgggtctgacccaatgcttgtcttttgtgcttccttcctgtctgccttaggtcttccattttcctcagatgtctttctcacttgcatgacctatctaggtctctctctacaggacattccctggtgccgaattcctgcagcccgggggatccac

SEQ ID NO: 442263 - DNA, 1198 bp, Homo Sapiens
  misc_feature (767)..(899): n is a, c, g, or t
  misc_feature (921)..(991): n is a, c, g, or t
  misc_feature (995)..(1056): n is a, c, g, or t
ttcataaagaaatgccactttattattttcaagtacataggtagtacctcaaactaatgtcttacaaaaggtcaccaataaagatcctgtagatgtttctttaacaaatacataaagattgatgataattagcccatgcactcgctgcttctaaaaggatatttctaaagtgcctgaaaagtattgtttttggtagactaaacatgccacctctagcaatattgtttatgctcttaatttactaaaaaaatgccatttttattgattgtgcaaagataaacttttgtccacagttagtaatctccaattaatcggatccaaattaatattgtctcccacttagattcccaggcccaaggcaatgactcccttacttccttgcttctgataaagcaaaattccagtgcaatgaaatgacagcctttgggaggtggtttatgggtctgacccaatgcttgtcttttgtgcttccttcctgtctgccttaggtcttccattttcctcagatgtctttctcacttgcatgacctatctaggtctctctctacaggacattcccagtgccttctaagccaggcttagagaatgggcaaggctgcctgcagagcaaaagtgttagatagggagtaagggaaagaaagctatctcctgtaggaacctgaaaccaactctccagcccagggtaagtgggcacaatgatcgtcggtttgaagggcaatttgcctggagggaacagccctgccacctaagacgtccaagccaatcannnnnnnnnnnnnnnnnnnnnnnnnnnnnnnnnnnnnnnnnnnnnnnnnnnnnnnnnnnnnnnnnnnnnnnnnnnnnnnnnnnnnnnnnnnnnnnnnnnnnnnnnnnnnnnnnnnnnnnnnnnnnnnnnnnnncagaagaatcgcttgaacccannnnnnnnnnnnnnnnnnnnnnnnnnnnnnnnnnnnnnnnnnnnnnnnnnnnnnnnnnnnnnnnnnnnnnnctcnnnnnnnnnnnnnnnnnnnnnnnnnnnnnnnnnnnnnnnnnnnnnnnnnnnnnnnnnnnnnncgtgctctggaagaggcaaccgaatgcgcattagaatccccctagcatttagtcacgcgttcttatttcgacgcgtgggtcgacatatcccgggattccggccgtaccagcctctttttaacaacgttctatacataatgcc

SEQ ID NO: 442264 - DNA, 1097 bp, Homo Sapiens
  misc_feature (89)..(91): n is a, c, g, or t
  misc_feature (97)..(97): n is a, c, g, or t
tccccatgatttttcggaaccagggcatgatgccagatggttttaggggcatgaaagttggttctgagcaggaggaccataagagagannnggatgnccagaattttattctggagcctttcacatggaaggaagttttgtgtggtagctctggtgtattaaaataaaacatcaattgtatgagtgtaatagacattctagttcttcagcagctggggatctgtcaccttatttcctaatgaattcatgtgtttttccataagttgttttcacctgctaccattacagactggtccagacctgcttatccttttgtttcccacagcctatttcagtgcaaggccttatttccatgagactctgggagaacagcatgcattctgggcagggtgggacacagtgaagggatggaaggtggtctggctgggaagtcaagagatggattccaggtttgaggatagattgcagctggatgcattgatggcataaggccagaaagtagaaggtgctcactgtgtttgggtcacaggggatgccttctgaaggagccctctgcacaggactgtgttaacaaatcatctgcccttgatgctcaagtttgttcctccaacctagaaacttttaaacactggtgtagtttctccatgttgggaaggcttaggggttgggaacttggcacaggacccagttactcatcctcttttatgcctcttgggattctacagaaaagcattttctgctctcttctcttggctaagggctcaggagaatttcctcaaggtgtcttgaaacctgcactctccagttccttggcaagcaaacaacagcttaccctactgcctacttgcctctttttccttttccccttggtaataaatttgagggatctaagaatgccagaacaggaattctccaggcccagtaaataagaaccattctgtcaatttctatattttcttatatagaaatcatactcttttaacatctacaacctcttctaccaggagctgtctctgataatcaccttggttcaaggagcatgagtgatttttagatggtgaacgttcagtcaatgtagatcccaggaattccggacc

SEQ ID NO: 442265 - DNA, 644 bp, Homo Sapiens
  misc_feature (19)..(19): n is a, c, g, or t
ttttttttctgcctttagnaatcattttattagaacacattcaagaaagtgacatacggaaaaaagacagcagcaattctcagtcatgcaaatgcccgtgttaaagttctccattggatttaaattcaagtacaaagacagtcctttcctgagccaggtgcaattccagagaatgacactttgcattgagagcacgattccttcgaaaagttcagaacactgaacaagtcacatcctcacaataagattgtgagatacatagaagtgtaaacttttttaaggatccctttaccctgccctcccccataacccagccagggaaataagcccaacttcaggacctctcagaaatcaggtttaatctattgaaaataaagcagtgggcctttaaaaaaagttagaaaatgagtgtatatatgaaatggaatcatcatctctgcctcttgccttggtgtggggtttccatgaaactctgtgtttgggggttggggctctctcttgagtgtgttggaaactggaggacttttaaaacttttttattatgaccatcatctagtttcaacaattatcaacctcgtgccaaattcggcacgaggacaacctctttgagacgtccttccctaactcatgggctggcatggcgc

SEQ ID NO: 442266 - DNA, 547 bp, Homo Sapiens
  misc_feature (67)..(67): n is a, c, g, or t
ttacatatggtttctgagtgatacagatgtgagtcaggtagcatttgatttccccacatatacacanctgaggtgccctgccattggcatcccctgggatccttgattcactgacgttagccatacgaatccagtgttcaaactcagaataataagcttagtttctgcattatcagtcagcataaataataaatccagaaaacgtgctgtatttgttgttgtttcctccatgggctttcccgccatctaatttgatatagacttcatctcccggctccaaatgaagaaccacactgttactggcatagtcgtaattctgatcagcatcttgggcaattgcactagcacgcacctggttgtttttgcagagatcagcccacatgctggtgccgtcccctccgcgcatcaggacgtggtaggtgaagaagtagatgcccgggatggagcaggtgaacttgccggtggtggggtcgtattggtttccgaggttggtgaccacgtcttcgaacttgagcacctcttagccttcatgctgccgcttgaggcc

SEQ ID NO: 442267 - DNA, 1638 bp, Homo Sapiens
ttatgtttttttggctcagcattctttatacggtcctctttggggtggattccctccttcccattctcccacgcctcccatccaagacttccgttggctccagtgtcctctgttaaggaaggttcttggtgcgcaatgccctactctgcaggagagggaggaaccttgtccctttgcgggagtcgctggtctcgtctgatgtggggaagaaggaaggtggaaggggcactgtccaccagcactcagagctccattatgtccccagctggggttgcagggtaggggggactgggggtgtcccccagcctcagcagacggagggcctcagggatgaggctgccaggatagcgccagagaagcagctcagagcaagggctcctgagtgggggcagggctggggagaaggtcatgggggggctgcagtaggggtggtcattgtgcaggctgagttgagagaagtgggtggccatgttctcctcagacagaaactgcttgcgcagaggctcctgctcctcctccaggcgccgcttggtgctcatgggcacagctcctcggagaggggagctggcgtccaggccccaagtcacccccaaggcggcccgcgggaggcgctgggcccctccctgggggcctcgctgcaagggctgctgcaggatcattgggttttggggtcctgcgggtgggatctgggcgacaggggaggagtctctgagggcgtggccaagagaggatgggcgtggctttaggcgggcacagccgcgaggttctgcgcgggcgcggaagacgggcggcgcgtggcggaaggcaggcttgctcctcggggtgggggagggtatccggcttaagggggctgcggtggacaccacttcttaatgtcgggggtcttcgcggcgctcacctcggctcctagggttcgggacggtacgcaccagccaccttcgcgccgaaggcggtagggcgccacggagaggaaccgctctaggcacgtaaggcctcgtgaggttgcgtcgcgcgcggagcactctgggacttgtagttctggagatggagcgagctgtgccgctcgcggtgcctctgggtcagacagaggtgttccaggccttgcagcggctccatatgaccatcttctcccagagcgtctcaccatgtgggaagtttctggcggctggcaacaattacgggcagattgccatcttcagcttgtcctctgctttgagctcagaagccaaagaggaaagtaagaagccggtggtgactttccaaggtgggtatagctgtggagtctggcttcaggactttgggtgggattggctcactcagttctgcatttctctttagcccatgatgggcccgtctatagcatggtttccaccgatcgacatctgcttagtgctggggatgggggaggtgaaggcctggcttttgggcggagatgctcaagaagggctgtaaggagctgtggcgtcgtcagcctccatacaggaccagcctggaagtgcctgagatcaacgctttgctgctggtccccaaggagaattccctcatcctggctgggggagactgtccagttgcaacactatggaccttgacactgtgactttcacgagggtcctccggggccacacaagactacatccg

SEQ ID NO: 442268 - DNA, 1028 bp, Homo Sapiens
  misc_feature (51)..(51): n is a, c, g, or t
  misc_feature (126)..(126): n is a, c, g, or t
  misc_feature (226)..(226): n is a, c, g, or t
gccagcgaccagaatcagtccctgtagaagggtgacgtgcttctgtggccncccggatggggaagatggtgttggtgtggaggatcggaggtcccagagggtgagggtggggccccctccacaggnccatccagtcggaatcagtgccaaacatcccaatccagcgcccattgtggggcctcgagcactcctcgtgcttatagacctcgatcgtctggacctcctnggctgtgcgcaggtcccaaagtcgaacagctccatcctcgccacctgacagcacctctgggctcctttcccgcagtgccaggcagtggatgtagtctgtgtggccccgggaggactctcgtgaaagtcccagtttcaaggtccatagtgtgcaactgacagtctcccccagccaggatgagggaattctccttggggaccagcagcaaagcgttgatctcaggcacttccaggctggtcctgtatggaggctgacgacgccacagctccttacagcccttcttgagcatctccgcccaaagccaggccttcacctccccatccccagcactaagcagatgtcgatcggtggaaaccatgctatagacgggcccatcatgggcttggaaagtcaccaccggcttcttactttcctctttggcttctgagctcaaagcagaggacaagctgaagatggcaatctgcccgtaattgttgccagccgccagaaacttcccacatggtgagacgctctgggagaagatggtcatatggagccgctgcaaggcctggaacacctctgtctgacccagaggcaccgcgagcggcacagctcgctccatctccagaactacaagtcccagagtgctccgcgcgcgacgcaacctcacgaggccttacgtgcctagagcggttcctctccgtggcgccctaccgccttcggcgcgaaggtggctggtgcgtaccgtcccgaacccttccgccacgcgccgcccgtcttccgcgcccgcgcagaacctcgcggctgtgcccgcctaaagcca

SEQ ID NO: 442269 - DNA, 779 bp, Homo Sapiens
ccgttttgctatcgtttagctcagcaatctttattcagttcttcttgggggtgggatgcctcccttcccatgctcccacccctcccatcccagaactccgttgggctcagtgtcctctgttgagggaaggtcttggtgcccagatgcctactctgcaggagagggaggaaccttgtccctttgcgggagtcgctggtctcttctgttgtggggaagaaggaaggtgggaggggcactgtccaccagcactcagagctccattatgtccccagctggggttgcagggtaggggggactgggggtgtcccccagcctcagcagacggagggcctcagggatgaggctgccaggatagcgccagagaagcagctcagagcaagggctcctgagtgggggcagggctggggagaaggtcatgggggggctgcagtaggggtggtcattgtgcaggctgagttgagagaagtgggtggccatgttctcctcagacagaaactgcttgcgcagaggctccctggggagagatggcagagaggcaggctgggatactgacacaggaggcagcctgttggggaccagaggtgacagagatcttgttgggagtccctccctgcccccaaactcactgctcctcctccaggcgccgcttggtgctcatgggcacagctcctcggagaggggagctggcgtccaggccccaagtcacccccaaggcggcccgcgggaggcgctgggcccctccctgggggcctcgctgcaagggctgctgcaggatcatt

SEQ ID NO: 442270 - DNA, 1233 bp, Homo Sapiens
  misc_feature (789)..(789): n is a, c, g, or t
ctatgttgctctctctgctcccttgatagcttgctgtcttctcgtagtttcttctactgggtattttcctggttgcttccttccgtgcggttccttctggtccgttcttcgtctgcttgtcttctgcttgtggccttgcgcactgttgcgctgagctgtcccgttttctctggggccccgaagccttttggtggcttgcccaaaattgtgtctcggctccccgtcctcgactcccccttgtctccgtttgcgcgttgttccctctcttcgtctgtgtcgttccttcttcttgctatcgaaccatttgcacggatgttagtcacgcgcttttcggtttactccagtcgggggcatccataaggtgtggtccgctcgcgtgttttctggcaaccctggtgaacacaccaaacgtgggtgtgtccggaacttccgtttccttgccccaatgctggccagtctcactgagcccgcgtttggttcacacttgcgcgtcccatgggatatgcgcctgcattggtgtttattatatacttcttttctcacaatcagtaatcaattcttctttggcttgcgaattcctcccttcccaatgctcccacccctcccatcccagaactccgttgggtctcagtgtcctctgttgagggaaggtcttggtgcccagatgtcctactctgcaggagagggaggtaaccttgtcccttatgtcgggagctcgtctgcctctcattctcgtatgtgggggaagaaggaacgctgcggacgagggcactcgatctcatccagcanctcacgagccgtccatttatgctccccaacgactggggtttcgacagcgcgtaggcgtgggactgggcgttgtcccaccagcctcagcagacggagggcctcacgggatgaggctgccacggatagctgccagagaacgcagcctcagagcaagggctcctcgagtatggggcagggctaggggagaaggtcatcgggggggctgcagtatggggtggtcattgtagcaggctgagttgagagaagtgggtggccatgttctcctcagacagaaactgcttgcgcagaggctccctggggagagatggcagagaggcaggctgggatactgacacaggaggcagcctggcgtccaggccccaagtcacccccaaggcggcccgcgggaggcgctgggcccctccctgggggcctcgctgcaagggctgctgcaggatcatcccc

SEQ ID NO: 442271 - DNA, 748 bp, Homo Sapiens
gctgggtggcgaattcggcacgagggttctgcgcgggcgcggaagacgggcggcgcgtggcggaaggcaggcttgctcctcggggtgggggagggtatccggcttaagggggctgcggtggacaccacttcttaatgtcgggggtcttcgcggcgctcacctcggctcctagggttcgggacggtacgcaccagccaccttcgcgccgaaggcggtagggcgccacggagaggaaccgctctaggcacgtaaggcctcgtgaggttgcgtcgcgcgcggagcactctgggacttgtagttctggagatggagcgagctgtgccgctcgcggtgcctctgggtcagacagaggtgttccaggccttgcagcggctccatatgaccatcttctcccagagcgtctcaccatgtgggaagtttctggcggctggcaacaattacgggcagattgccatcttcagcttgtcctctgctttgagctcagaagccaaagaggaaagtaagaagccggtggtgactttccaagcccatgatgggcccgtctatagcatggtttccaccgatcgacatctgcttagtgctggggatggggacggtgaaggcctggctttgggcggagatgctcaagaacgggctgtaaggagctgtggcgtcgtcagcctccatacaggacccagcctggaagtgcctgagatcaacgctttgctgctggtcccaaggagaatccctcatcctggctgggggagac

SEQ ID NO: 442272 - DNA, 929 bp, Homo Sapiens
  misc_feature (15)..(15): n is a, c, g, or t
  misc_feature (504)..(504): n is a, c, g, or t
  misc_feature (511)..(511): n is a, c, g, or t
aatgctcctaagaanaatgctacagtctcagaaaaggatgacaggaacatactgggagccacttctcctaggaccctgcccagctgctgatccagggtttccccttgaagacgttcatctctctggtaggcctgcaccagaatgaagatgttgtccactccaacagccagcaccaggaacgggatgacttcaatcacaatgagggtcaagggcaacccaatgtagctgaagacacccaaggagcaagccaccgagctcagcacgatcaagatgcccgcgatgcctagtgagaccttcgaatccaccagaagcctgcgacagcttttgatgtgccccaaggctagggaaatatatagaaacatgatggcatagctaattacaacggtgaagacatcactgtcactttcacgatttagttcatcttcaatacttcgttcagcagtgaaggaaatggtcagattgggattcttgtagtttttcacaaaattaataaactctttttcnccaggcnctgggcccctctggagcttctctgtatcattatagtaattattgacagggaaggtaatcacaagggcagtggcgttattgtagttttgatcatcatagcctcccaacacaagccacgggaacactggtccaccaaacgtacccagacaagggtcatggagcaaacttgtatcattcagagaggcaggagcccgtacgcagtacagaaagtgcgtgtggtaatcggcatacacaaagaagtcgtcccctttcttgtggtccagcacggaatggctgttctggaagtaatttaacacactcaaaatggtgcagttcgtgttatacggtgaaagaggggccaagcagatgtcttgaagtgtcacagtctcattgtcataagaggcagtaatgttttcgatggctatttgtaagtcaagaac

SEQ ID NO: 442273 - DNA, 1024 bp, Homo Sapiens
  misc_feature (883)..(883): n is a, c, g, or t
  misc_feature (890)..(890): n is a, c, g, or t
  misc_feature (895)..(895): n is a, c, g, or t
  misc_feature (919)..(919): n is a, c, g, or t
  misc_feature (926)..(926): n is a, c, g, or t
  misc_feature (959)..(959): n is a, c, g, or t
  misc_feature (982)..(982): n is a, c, g, or t
  misc_feature (987)..(987): n is a, c, g, or t
  misc_feature (1002)..(1002): n is a, c, g, or t
  misc_feature (1010)..(1010): n is a, c, g, or t
atcaggccaaatcggccgagctcgaattcgtcgagagcgagagagaaagcagtcctttgttgtggtggtttctcatatgtggctgatcccaccttttcctcctgatgcttagaggcccagagcccatcggacttgagatgtggtcactctctgacctcatctctatagatgccaagtgtcaggtaccctgttacatctgaaaactagtcccatatctacctagatagtagtagtttgtatttaagttttaagataggagatatttcagagctgtcacttcacatctgacaaagttcctagggggatgaaggtacctttggaaacaattatatctattgactgaccacttgcccacaaagagatggtcattgtgagcctgagtggctcccaggctagagaggcctggggaaactgtgttgaagccccaacagacactgtgcctgctctgagctgggctacaaatggggcccaggagcactgaggagacatcaggctcagtggtcttccctggaaagccatgctaggtgtggccataactgacagtgaactatacttgtgttttagcttcttttgggaccagggtcagggacattgaaggatctgaaacaggtctcctaaaatatatcaacagctcgtcaagattctctaaagtcctaagaaaaatctatgattggcaaagaggatttagattgcactaagaaacacaggaaggtccatgtttcattagtatatcccaaatgtcctcaaagtacaccaaatctaccccatgctgcagtctcctgaggagtgctgggtgaatctgctttgaatataacctagggcatttagttaataaagctccatataatcttatgcctgttgttggatttgttttcctgttttntggtttnattanctatgagagaatgaattaccaganccacatncatggagagttgttcaagtttataaaccacatncctggccggcgtgttgctcacanctggngttccagaattttgnaggtatanaggccagcgacgga

SEQ ID NO: 442274 - DNA, 608 bp, Homo Sapiens
  misc_feature (218)..(466): n is a, c, g, or t
  misc_feature (552)..(552): n is a, c, g, or t
tctgtaaatgtaagaaaaggggaataatgaagtaatagagacctctgatgattctcattacttgtctttgtaataagatacttaaaaaagaatgtgtggcaaacaaaggaaaataccagttctactaaataaatgtctgctctccctgaactctcccatacttttaaacatgaatctggattttctgtagtgttctcttcccctattcacccagcttnnnnnnnnnnnnnnnnnnnnnnnnnnnnnnnnnnnnnnnnnnnnnnnnnnnnnnnnnnnnnnnnnnnnnnnnnnnnnnnnnnnnnnnnnnnnnnnnnnnnnnnnnnnnnnnnnnnnnnnnnnnnnnnnnnnnnnnnnnnnnnnnnnnnnnnnnnnnnnnnnnnnnnnnnnnnnnnnnnnnnnnnnnnnnnnnnnnnnnnnnnnnnnnnnnnnnnnnnnnnnnnnnnnnnnnnnnnnnnnnnnnnnnnnngtaaaaatcgcgttaaattttgtaatcagttctttttaaccatatgccaattggcaaatccttataatcaaagaattgacgaattnggtgaaggtgttcagttggacaaagtccctttaagacgtgactcaccgtaaaggcg

SEQ ID NO: 442275 - DNA, 575 bp, Homo Sapiens
ggagttacaattgaacctgggaggtgcaaggttgcaatgagctagcgttcttggccactgcactcccgcctgggtcgacaggaccgcgactccatcgcaaataatttaatagctataagatatgtctgcctatcctgagactgccctgctgtgaggaagcccaagcagtcacgtggacagtgcctgaccagccccagctttcaagccatcacaagcccagtcaccacaacatgagagagaagaagccttcaggtgattcttgactccacttacatatgactgataccgcatgatacatcccaagtgagaactgccccataaatccagaacaggtaactggaacagagggcaagcctgatgaatgggcacacagactcagcccataccttccctggttctaatgttctcagggagcccggaccaaccctgggagcctcaggaacttaggtttccactggacagttctagaagggctatagaccaaatcaggtaactcaccagaccagcctttgaatctatcaaatctaactgctgagctacccaatgcattccgatcctcatcacacttctttgat

SEQ ID NO: 442276 - DNA, 297 bp, Homo Sapiens
gtggaactgctccgtagatccagaaaaccacattgctatcttaagtccctaagtttggggcttatttgttccacagcaacaggtaactggaacagagggcaagcctgatgaatgggcacacagactcagcccataccttccctggttctaatgttctcagggagcccggaccaaccctgggagcctcaggaacttaggtttccactggacagttctagaagggctatagaccaaatcaggtaactcaccagaccagccttggaatctatcaaatctaactgcgggcgtccacttagg

SEQ ID NO: 442277 - DNA, 865 bp, Homo Sapiens
tctcttgttatcaccttttcagaaggaagagtatcaaaaaaggtgataacaagggagtcatttacaagccagccaccaagatggagactgaggcccacgcttgaggtccccggagctcccgggcacatccaggaaggaccttgctttggaccctacacacttcggctctctggacacttgcgacacctcaaggtgttctctgtagctcaatctgcaaacatgccaggcctcagggatcctctgctgggtgcctccttgccttgggaccatggccaccccagagccatccgatcgatggatgggatgcactctcagaccaagcagcaggaattcaaagctgcttgctgtaactgtgtgagattgtgaagtggtctgaattctggaatcacaaaccaagccatgctggtgggccattaatggttggaaaacactttcatccggggctttgccagagcgtgctttcaagtgtcctggaaattctgctgcttctccaagctttcagacaagaatgtgcactctctgcttaggttttgcttgggaaactcaacttctttcctctggagacggggcatctccctctgatttccttctgctatgacaaaacctttaatctgcaccttacaactcggggacaaatggggacaggaaggatcaagttgtagagagaaaaagaaaacaagagatatacattgtgatatattagggacactttcacagtcctgtcctctggatcacagacactgcacagacctttaggaatggcaggttcaagttccacttcttggtggggatgagaagggaaaaagaactagagggaccaagagaatgagaagacatgaatgatctgggaaagtctcactttggg

SEQ ID NO: 442278 - DNA, 879 bp, Homo Sapiens
gggggagccctgagccagcaggccacctttttcgccctgcgcagggccctgccacctgggggagggccaggaggctggccaggctttcagcaaaagctgttgcagctcaatcagctcctcttgtgggacccggaggctttctgccggtagatttcagcggtgaagggctcttcgtataggagagccactatgtaggtgagggccaccagcaccgtcaggagcaggcccgtggggctggcgtgcatgatggcccagcccaggtagttggctgtgcttccccagtacatggggttgtccaggatgttgaaggggaacacggtcactctcgcctccttgaggatcccgaagtaatcacctaggaaagttccagcgaaccccagtgcaaagaagctggagagcacgagcacgacgcccagtcccaggagcgcgaggcccaggctgtaggccgcgggggtgtccaggctctccatcctgggctggctcagcatggcctgcgtgaagcagtgcgagcgcaggaagttcaggagcaggatggtgacgcttagagagtagcaggccaggtagggggatccgaaggccctgctcagcttgcgggtcttgtgttcccatcgtgcaaccacattccagtagagcggattgaaggtgatggtgatgacggcagccacaaagctgggatccagggggtccacgtagcccagcagccgggtcataacgcagaagtctgcctgtctaaaatcaatattgccgaggcctccgcagcagtcaggccctgccaccgagctgttcgttacctcggctcccgggttcccagatctcttcatccgggggccgcctcaggaggcaccacgcgggccccgctgcagccacgcgcccccggaa

SEQ ID NO: 442279 - DNA, 1050 bp, Homo Sapiens
  misc_feature (56)..(69): n is a, c, g, or t
  misc_feature (899)..(958): n is a, c, g, or t
ggtggagaagaggggttttctttcttgttggggggaggtgccccctttggttgtannnnnnnnnnnnnnccccccaagaaccactcttcaggggaggcgggtcccccgcgggggctctggtggtgcccaataaaagctctccaagcccacgggttattttggggggtgggggttctccccaaaggcaaaagggggttgtttcccagggaatgctttaatagggggaaatcccgggttccctttttgccctccccttgggggttccccgagaagttaattccccttagggaaaagtttccaaggggaacccccaaggcccaagttaagctgggagaacccgggagccaggaccccccccttccccaggaagggggagggccccggctttaggccggggggtttcccggattctccattcctgggctggatcagcatgtcctgcgtgaagcaggtcgagcccaagaatttcaggagcaggatggtgatgtttagagagtagcaggccagctagggggatccgaaggccctgctcagcttgcgggtcttgtgttcccatcgtgcaaccttgcttgtaagagaagggtccccacagccagtccaggctcaccagccaccaacaccacattccagtagagcggattgaaggtgatggtgatgccggcacccacaaagctgggatccagggggtccacgtagcccagcagccgggtcataacgcagaagtctgcctgtctaaaatcaatattggcgaggcctccgcagcagtcaggccctgccaccgagctgttcgttacctcggctcccgggttcccagatctcttcatccgggggccgcctcaggaggcaccacgcgggccccgctgcagccacgcgcccccggaaccggacctatagagccnnnnnnnnnnnnnnnnnnnnnnnnnnnnnnnnnnnnnnnnnnnnnnnnnnnnnnnnnnnntgacctcccaaagtgctggaattacaggcatgagccaccgcgccctgtcttcctttgtttgtgttgattacgaatacattcacttgcaaaaa

SEQ ID NO: 442280 - DNA, 1578 bp, Homo Sapiens
  misc_feature (170)..(179): n is a, c, g, or t
  misc_feature (283)..(364): n is a, c, g, or t
  misc_feature (426)..(562): n is a, c, g, or t
gcccccccgttttttcccccggggggaaaatttttttcccaagggggccaaagggtgtttattcccccggggatttttaggttttttccaagcccgcttgggagggggtttcccgtggggggggaaaggttttatgaaatttcaaaccaatttttccataaaatggcccnnnnnnnnnnctatttttatattggggccggctgggagcccccgtggaaaaaccccgtaaggcccccagaaacccctttgggatttttttaaaacctctggttcaccccggggnnnnnnnnnnnnnnnnnnnnnnnnnnnnnnnnnnnnnnnnnnnnnnnnnnnnnnnnnnnnnnnnnnnnnnnnnnnnnnnnnngggcccggggcccaaaaaaaaggtttaaaaaattttttgggggggggggggggcgcaaagannnnnnnnnnnnnnnnnnnnnnnnnnnnnnnnnnnnnnnnnnnnnnnnnnnnnnnnnnnnnnnnnnnnnnnnnnnnnnnnnnnnnnnnnnnnnnnnnnnnnnnnnnnnnnnnnnnnnnnnnnnnnnnnnnnnnnnnnggggtcagggtgcctttattggtgaatgggaatgtgtgggttggagctcaatggccatatgtcggcacgtccagggtccccaaggcagcaggttccaaggcactggggcagcccacgccgggggcgagccctgagcagcaggcaccattctcgccctgcgcagggcctgccacttggggcaggccaggaggctggccaggccttcagcaaagctgttgcagctcaatcagctcctcttgtgggacccggaggctttctgccggtagatctcagcggtgaagggctcttcgtataggagagccattatgtaggtgagggccaccagcaccgtcaggagcaggcccgtggggctggcgtgcatgatggcccagcccaggtagttggctgtgcttccccagtacatggggttgtccaggatgttgaaggggaacacggtcactctcgcctccttgaggatcccgaagtaatcacctaggaaagttccagcgaaccccagtgcaaagaagctggagagcacgagcacgacgcccagtcccaggagcgcgaggcccaggctgtaggccgcgggggtgtccaggctctccatcctgggctggctcagcatggcctgcgtgaagcagtgcgagcgcaggaagttcaggagcaggatggtgacgcttagagagtagcaggccaggtagggggatccgaaggccctgctcagcttgcgggtcttgtgttcccatcgtgcaaccacattccagtagagcggattgaaggtgatggtgatgacggcagccacaaagctgggatccagggggtccacgtagcccagcagccgggtcataacgcagaagtctgcctgtctaaaatcaatattgccgaggcctccgcagcagtcaggccctgccaccgagctgttcgttacctcggctcccgggttcccagatctcttcatccgggggccgcctcaggaggcaccacgcgggccccgctgcagccacgcgcccccggaaccggacctataaagccccgct

SEQ ID NO: 442281 - DNA, 911 bp, Homo Sapiens
  misc_feature (12)..(12): n is a, c, g, or t
  misc_feature (30)..(30): n is a, c, g, or t
  misc_feature (40)..(40): n is a, c, g, or t
  misc_feature (66)..(66): n is a, c, g, or t
  misc_feature (111)..(111): n is a, c, g, or t
  misc_feature (731)..(773): n is a, c, g, or t
  misc_feature (788)..(834): n is a, c, g, or t
attccttccttncattccattgggggctgntccactctgncacaggcttatcactggtggtgcagnactgcttttccaaggcatgtacttttggacccttaccaaccgggntctgggtaggtagtgaggactgagcaatccaggccagcagtatgcagatggctttccctcttcagatggacacactcttaggcatggctgggcactaaaaaaggtcctttgacaatgttggtgaaagctggagattcagccagagtatcaaacagtgcggattgatgtgccacaggtacaatgtcaagtatgactcagaggacaaattatctagatccttctaataatagcatgtaccccaacaactggattccttagtattcttcaaaattctgaggtaaaatcactctcgctttaaaagataccaacttcaccccttcctctcttcccaactccctcctgcttccttaaggatccatgccagctagcaggtaaaccagaggctgacttgctgacatcttccttaccttattccttaggtatccatgctagctagcaggtaaaccagaggtttacttgctgacatcttccttgccttattcttggaagaatgagacagttatctgagggctcccaagggcctcctgtgcataccatctttatcttccaacttagaactaaccaaattcagtctttttgtgtaatgaaaaaaggataagctgggcacagtggctcacacnnnnnnnnnnnnnnnnnnnnnnnnnnnnnnnnnnnnnnnnnnntgagcccaggaacannnnnnnnnnnnnnnnnnnnnnnnnnnnnnnnnnnnnnnnnnnnnnnaagaagaaaaaaggatgcaggaaattaacaataggatagccaacaccctcactaaagcatcaatttccatatgatcc

SEQ ID NO: 442282 - DNA, 786 bp, Homo Sapiens
  misc_feature (560)..(606): n is a, c, g, or t
  misc_feature (621)..(663): n is a, c, g, or t
  misc_feature (744)..(744): n is a, c, g, or t
tgttcattgtttaatcttgatagcagtattgaggctggtatttatatgataggttatgaaacaggttcaaagaagttgtgtcttggaaaaaaagtgacaatgcttttgaaaatgatgacgaaaaaggcatcttgtctgttaaccacagcttgctttaatagaatcctggggagggtgattgggactttttagtattacaaccttagtgtcattgaggaggattttggtctagttagtgggctgagtttcatatacctctccctccatgtgcaggtttgttaagataattggtagtttttaataatataaaatacttaagttgaaatacaaaagtgtggcaacaattattaaatattggctagaattctaggagagttacacaactagtggaagtccatgtttagaaaataaatggcttgtttaaggaaaagtttttgtgtccaaagctccttaaagtcagagagatttctacctggtacttaacatcatatggaaattgatgctttagtgagggtgttggctatcctattgtcaatttcctgcatccttttttcttcttnnnnnnnnnnnnnnnnnnnnnnnnnnnnnnnnnnnnnnnnnnnnnnntgttcctgggctcannnnnnnnnnnnnnnnnnnnnnnnnnnnnnnnnnnnnnnnnnngtgtgagccactgtgcccagcttatccttttttcattacacaaaaagactggaatttggttagttctaagttgggaagatnaaagatggtatggcacaggaggcccttggggagccctcagga

SEQ ID NO: 442283 - DNA, 908 bp, Homo Sapiens
aatgcatcacggggaacgggtacgtgttcccgatacatttcggattctgtgggagctgttccccgtcgcgtcggcaatttattgttgcgagcccgcgcccgcctgtggggcgacctctcagcaccgaatccctccgatctcgcccgtgcggcgggaagaaagaacagtcgctccacctaagtttataaccttgtttcctcgcggaagtgaagacgccgttattccgcccattacgcagaaatgcgccgcggcgcgggtgttgtcgcccgggaaaacaacaacccagacaacacgttggcgcgcccccctagggcggctagcattggtggaaggccaaatttctcaagtgcgtccacttcgcaatagcgacagggtacacaagaggtccagccgacggacctagaagtgggctctcttatcaacccaattatggccataccgggtgaacgagagataatttcctatcgccggcaggcgctgattggtgccaagccactatgcgtgcatttttttattggcaatggcagtcctaaaaggcccggtttccaatctttcctttcagaagggtgcataagagtttgtacagatgaaatgccctcttgatcatcaagttggtaatgcttctgaccaggcagaaggctcttgctcatgttcttcatctgatgtcccatcaaaattctggtcatttatcaagggcctcattacatccatatctagctcctcgcgcctcgccgccccggcagccgccggcgtcgccgccgcttccatctctcgcgggtctccaggacgccgccgcccgagtgctcactctcccgccgctgcgtgttcggcgtcaggcccaggcctacctcccctgcccggagggacccgcgcctggtgcccgcctccctgccccggcgctccccccc

SEQ ID NO: 442284 - DNA, 850 bp, Homo Sapiens
  misc_feature (599)..(628): n is a, c, g, or t
  misc_feature (665)..(665): n is a, c, g, or t
agttggtgttggagaattgtttaatgttcagcaaactctacagattcgggtgccaggaaaaagatatcacagaagtctggcctggaataaaactctaggtgtttgggaatgggagctatgctgtctggtcacaggctgtcacactgcccattgtcctgtgattccaggtattctcccagggtgacagaggactgaaaacttagaagaaaggagctctgatgacagacccccttttcccacagctgccaccacaggattcccacccactcacaaacacacacactagacattgacatgtccaccctcctcccaggagtaggcaccaccctcaggaccttcaccacggcgtttttgatcctagtgtttcttgccaagaacccacaagtctctacaagtctcctggcgtatccccacccccagacactaaatctgcagcagcaacctgttttctccaccaacctagcattttgaatcagctgttcataatctcatatgtctgcatgcacacagtaataaatcagagtacagctgcaccaggacaactatctgtagcaaaaatcagtcctctcacctacattgcaatctctcccacccagggnnnnnnnnnnnnnnnnnnnnnnnnnnnnnngcttcggcgtacacatgggtttgctttggtgcatggnggttttgcgtgcagattattttgtcactgaggtattaagcatagcaccaaacaggtatgttttctgattctcttagtcttccaccctccaccctcaactaggccgcagcgtctggtggtctcctctttgtggttgtgtgttcttattatttagctggtacttataaataaaaacatgcatttggt

SEQ ID NO: 442285 - DNA, 608 bp, Homo Sapiens
  misc_feature (537)..(537): n is a, c, g, or t
ctatacaagccatttatttgaaatgccaactatatgtaggataaagtcagtgttacatgcttatcagtaacagtagaaaaatagaagcagtgaaaacctctgtacaactgtaatggtactcaaaagagaaatgtatcgttttacaatgcttcacacagacgaattcaagtttggaggtacctaaataaaaatactatatatttctttaaaaatcactatgtacaattgaagcgtaaacaagttttacaaagtactggttatgcaggttgtagaaaacacttgcataggacatgaaatcagtttaagacaaccacaagaaacgcagtgttgtagatgattttccacctctctgaagtacagatgtggtgcatacacagcaaggagagttcaggaacctttatctctcagccaccccatcgaagagcaggacttggtaccgcctgcccatgtaacccagatacagttacatgtaggtacagatgatgaagcttccagagcttatctgatctcttagacagaactcacataaacacacanattcaagaggttattttcagacacacacttgcaagtaatctttctatagaaatggccacagcattattata

SEQ ID NO: 442286 - DNA, 1180 bp, Homo Sapiens
  misc_feature (209)..(237): n is a, c, g, or t
  misc_feature (346)..(391): n is a, c, g, or t
  misc_feature (530)..(558): n is a, c, g, or t
gaaggcttggtacctggttccggaattcttccggatcaaatatgtgggaaagatatctctcaaagaagcaaggacagtagttacaagttatactggcagttattgaagatacttaagatccaagaacttcttgcttttatgctagaaatcattatgatagtgctggacactgaagcaaataccatactgcttatacttggtcttccagnnnnnnnnnnnnnnnnnnnnnnnnnnnnngaagatgatagcaatatgctatgaaatgcttgtcccctatatgaatattctgttacgcttgaaaaatattttctccagcgttggttactgaccaccccaccctcccacnnnnnnnnnnnnnnnnnnnnnnnnnnnnnnnnnnnnnnnnnnnnnnaagtggagaaaaatgtatactcaacaatgtcattttgtgactttggaaacaagttatgttttgtgtttttgtctcattgtgttattgtctgactaaatctaaaaccatacccatgttgaaactagtacttttccctttnnnnnnnnnnnnnnnnnnnnnnnnnnnnntaactttttaattaaagaacctagtttgctatgcttaaaattaccaagaattttttatttctttgtcatagacacaatttctcttctgtatgccactagttacatttctaaattctgagcggtctcagttaggcctgtatgtgtgtacatgtccaagtaaagctggaaaatgtcagtcttgacacagctgtgtcttagtatgagaaacagaagactgaagaataaaaactaaggaacaagaatgagtctctttttggtggctaagtagaatcttcctaaaaccattgtcataaaagcagttaaaggcaataaatttttaaaagggacatatcactgattcattcctaaaaagcatgaacaaaaagtttttgttctgttccagctatatcttgtctaagtgctaacactgtttcagtgaaaatatctagccataagattaaaaaaatatattatttgcaatgcttaagcctgcagatacgtaatgtgaccactgttttgtgttgacaatattgctttatacagttcttgtatttgaaaggaattgatccttttaaagaaacatggtgtatattgttcttacaggactaatttcagtggtgtaaataataaatatcttttctta

SEQ ID NO: 442287 - DNA, 816 bp, Homo Sapiens
gaacagtaaaagctgaattatgatttattaattagtaaaacactacacagcatcaaaaataaactcagccacatgcaccaatacagagaatcttaaagacatagtattgagcaaaataatcagtacacgcaaaattccacttatacaaagctcaaaagcaaaattaagcaatatttttagaaatgcacttataaatgatgactgacccactatcaaggaaagtatttaacattgctctgaaagttctggaaattcttgattttcctttctcaatttctacacccatcaccacgcccagtcttccccaactcactaaacagcaccgtcatccatttagcatttcaagccagtgagaagtcatccttaattctgctttttcattaatttccctacttctaatctattacgtgtcttattagatctaagatcaatatatttcctgaatatgtctatttatgtccatttccaacactaccactgaagtctaagccattgtcacctttctttctggattactgcaatagcctcacagcttccactcttgaccacatacactccattctgcactcagccctcatagtgatcattataaaggataaaatggtgtggccagttagctcagttggttagatcatggtactaataaaatgcaaaacatgtcacatcactcttcttcatgggttcatgtcctctgtgggtcaggtcttccacatgtagagtagaggtagggtatgttcacaccttcaatgacaactacacatttttgctccaacaggtccaaaattgttcctaggtttcaaagttgttgtttgtttg

SEQ ID NO: 442288 - DNA, 1355 bp, Homo Sapiens
  misc_feature (1176)..(1176): n is a, c, g, or t
  misc_feature (1309)..(1309): n is a, c, g, or t
tacttttccacaggcaggagtggcacagagatggaggaaatttagcaggtttcaggagtgattgaggtagagggtcaggatttgctgaagggattaggaggtctcagaggaatgtttagatttctggatgcacaaatatcttcatgttgggggcgttgcctgaaacaagagacaatgcaagttgctttggcggtgagtgtggtgttagacgtgataaagacgaggagattttgacatagtccaatggagatgtcatggaggtactttgttcaattctagagctcaagagagaggtttgggccagaggaattagtatgaaaaacagaggatatgtcaattgattttatttcagtagagcatttttctaaaggtaagttgaacattgcttttgaaagtttctcttagtttatgttgtagtatttttattttccccgttacctaaatgtacaaattcagtcccctgtaccatgtttggttacctggaatttcattctatccaatattattttcatgccttatttatctttggtttgaatgtaatatgacagtgaaacctgttatttgtattcaatttttaaagaaacgcttttagattttaaaagtcaggcttctctatgtgctcaaatgaatctgacttactttataagaagaagggcttggcattctgatggagtcctggaaatagattcttggagacacagctatgtattggtcttcctacatttgtctctgtgattgtggattatgatgcaggtggactttgcttctttcccctgtgctatgcagcaaagtgaccttgaacaagctgccagccctactggatcatgattactcatattttgaggagaggactgaagtaacatgatctctgaagttcattttagccttaagatccagtgaaaagttagcattaatcctaggaaaatagttagagataaggatggtggagtgcagttattttaagtgctggaaaaattgtagctctctggaggaattgaatcttctgaaattattcactttgtaatacaggggagcttaaaaggtccacccttccatctttctacatatacttaaaggcagttaaattgctgctaaaaatgtgaaatggaggtgtgaacatttctagaggcaattaagtagttctgcatcttactggtaaattctatcattcttaanaaaagagagaggtttatataaaaatggagaacaaagaacatgcatgtgcagatgtaaaataccatctgtgcttctggatttttttcatgctcacaccttcgttgaaagaaattgtgattgaaagctcagattntgcttggctagtataaaagccttctgcgttgcttatcatgcatttt

SEQ ID NO: 442289 - DNA, 463 bp, Homo Sapiens
aaaagtagctactaaaaaattaaaattacatatgtggcttatgttagatctcttggaatgatgctggtctagaatattcctctattctctcatcatttcagagttaatctgattttaatgcttatgactttttcttaaacctgcctataatggtatatattgagagtgaaaaatatttagaagtctcaaagccactgccttaaattcttatgttattctacagtattcttatctcatgcagatcttagaacattgttcaagtatcataaactataatacatcagactatgggtgggaaaacatcttcatataattttagaatcattatttacactactgttcaaatcctttaattctacttccagagctactaccatcatctaggccaccgtaatctctcaactgatctgtatgactgaagtaacttcctaactggtcttctacctctatctcattgttttcc

SEQ ID NO: 442290 - DNA, 1599 bp, Homo Sapiens
  misc_feature (1468)..(1482): n is a, c, g, or t
agtagcaaacactggaagttacagaaatctgtaaatctttctgaaaacaaagataccaaacttgccagtagggagaagggaaagttttgctttaaggcaataagatgtgagaaagaagaagcggccacacagtcctctgaaaaatatacctttgcagatatcatctttggaaatgaacagataataagttcagcaagcccatgtgcagacttcttttatcgaagtttatcttctggaattgaaaaaaccacaagctcacttgcctgtgcatacaggaaaaacagtcaacagagggtgctgtgaggttggttccaaaaatgcagtgaggtagatttgaatatgtcatattatggaaggcatacgttgtggaagacagtaaacagcttattttggaaggtcaacatcatgttattcttcgcactataggaaaagaagccttttcatatcctcagaaacaggagccaccagaaatggaactattgaaatttttcaggccagaaaacattacagtttcctcaaggccatcagtagagcagctttctagtctcattaaaacgagtcttcactacccagaatcatttaatcatccatttcatcaaaaaagcctttgtttagtaccagtcactcttttactttccaattgttctaaggctgatgtagatgtcatagttgatcttcggcataaaacaacaagtccagaagcactggaaatccatggatcattcacatggcttggacaaacacagtataaacttcaacttaaaagccaggagattcacagtctgcagctgaaagcatgctttgttcatacaggtgtttataaccttggaactcctagggtatttgccaagttatcggaccaagttacagtgtttgaaacaagtcagcagaattccatgcctgccctgatcatcatcagtaatgtgtgacaacttggaaatttgtactgaaatccacaataatcagtttttgctggatgggttttacagcagtatttgatatacctaacttgttatggaggttgattgatatctgatccctgcaaaatactttgacttgtcattttgttgatgatgcaaagcacgttggactgagaatacttaacattctttttctgtatttctttaaaccctgagaataatttacatgctcataatacaggatatcagcatatttgtgcaccttattaagccccatcttaagaaaacacaagtctaagtctgctgttacaacttgtcaatggtatacgaatattaggagatgattctgagaaaggaaaggccttgttggcagtactcctgttaagccattagtctctaaattccagctttactgtgaagttctatagagtgttaaatacaaaattttcctgtcttgcttcacacagttccttatcagttttgctttggtcatagagtcttcatatttcagtatttggtggtccctatgacttatacataactttgtnnnnnnnnnnnnnnnttttttctgatgctttgaatatagttttgaaaggagttttgacttttttcccctcattcatctcagtatagagtgcgctatttcacaatacgatttttgtaattaaaagtgacaata

SEQ ID NO: 442291 - DNA, 625 bp, Homo Sapiens
tcggtcggaccgatgagtaatcttggctagaaaaacaaatgtcagtctaggccaagtctcaaaattaagtaatttttaataagcacaaagacaacagtattagttgtggcattttcatggtttactttttcttcattgatctaagttgagattttgtttttcattttgtgaaatatctagaaacattttagttgtttttagaagattaataaatgaaaataaaatagttctgtgaatgtatatattctgatatttaatattgtcattgtattaatatattttttatttacaatataatttgtcttgagtgattttggaacttgagctttttccttcttgaatctgattgtttttaaggagcttatgctctgttacatagtcttaagtgttattttcaggaaaattgcttttaagaagaaaaaaatatataacttttttgtttatttttcttccatagcctttgtttagtaccagtcactcttttactttccaattgttctaaggctgatgtagatgtcatagttgatcttcggcataaaacaacaagtccagaagcactggaaatccatggatcattcacatggcttggacaaacacagtataaactctcaacttagacccagcg

SEQ ID NO: 442292 - DNA, 429 bp, Homo Sapiens
cggcacgaggtcaaagtcatacaggttattttaccgtttacaatcctataattattgcagtagttaacatcagcatgtacaaacattttcaccaaaacccaaactttatgagacacctgaccttttacagaactaggatatgtggaaaccacatttatcgtaatgtttttcttttccgtaagataatcgagcatggttaaataaggtctctatataatgaacacttaagataactgtatgggccttttcctttgtcggaatgaaacaaaatccacatgtgataacctatgtttggggtgggggctggtcacatgattccttgtcatgaaggctgctcttcactcttttgtacttgtgattaaaatctcacactaagtttactatttaacttaatcctttttctcaaattaaacctctttttatactgtc

SEQ ID NO: 442293 - DNA, 1538 bp, Homo Sapiens
tccgcccaagaattaggtcgccccccgggaaaaaatatattctttcccccccaaaaccgccagcctttttattttaacccaaaggaggaatccttcttctaaaatgaactttttcaatggacccatttttagttaactggggcacaaatcaaatatttttccatctaaaaattcctgggagaaagtcctttctgaccccaaaaaaggaattccacttccttatttcttcagtaggaaaaataatagagactttgctttggcgcattggctgaggaccatctgaatcttcatggttgactagtcagcaggttatcttgatcatatatagtagcaccattgacggcagcagtagtaaagttggggacaatgagacactgcatcctaggaattttatagatatatatatcacattttaaaacacaaaaggaattcttcaaaatgttatgtcctcttcatgcacacttgacatcggctaattcgtgtcctcaagtctcctgctttcagcgtttctgactgaggtttactgaacatgtctgacacatctacagttgccagccaaaagctgtaggagttggcatagtagttacaggtacccctcccatgacattcgatgaagggagctgaacgaaactcttccaagcaggaaccaggggaggctagggcttgacctgagccttctgcccctgcacttgtatgcatcatgaaggaataaccaatccacagagaatcccatccctgaggacaatggggaatctggatcgtctgactgtgaactgcgatcaccacagctggagcttcacatactgcacatcgactaatgaatggctggatgctctggccctttaggggttgcatgctcattggcatgggctctggggtagagagccagtaagaatagtcatttcttgaagcaaagttgcaaacattattgatgttgcagaacatgaaaggcatggtactaaagcgacgaaggcagctgccagccgtccccaagtcttgaccgtgggctcttttatttccttgtacatacaggagagaaaagccttcatagacctgaagtgttccctgtgggcattgtggtgcatccgttgtctggctgtggcgtgtaataagaaatccatgtgcaacagaggaggttccagggggacctgggggaccttgcaatccatctggaccagggggaccatccaaaccacgggtacctggctgtcctggcagacctgggtctcctttgcgccctcctgcaccatcaaagccagggagtccattgcgtccaggatctcctggagggccagttggacctggtaagccttgaggtccttggggtcctggtagaccctttagcccaggctggccagggattcctggaggaccagcatctcctttaattatgatactctgtcctgaaggaccaggtaatccaggaggacctggaggaccaataagtcccggttccccctcagggccagctgatccaggtactccactgggtcctttcatgcctgggaatcctggaacaccagggagaccagatctcc

SEQ ID NO: 442294 - DNA, 826 bp, Homo Sapiens
cctttttcttaaggaatccattcatgttggaagcccagattccctaacatatgcactagtggttggctctgggaagtaacagtcaccagagtctggaagttcttcgcttgaacttgagtagccactgtactattggaagccagatggccaggtattggcaatggccagggaaatcccaagctggctcaagagccagtggttagggaagaagaaggtcaagtggactggtaaaaattctacttcaactgcccttattcatagatacaactttcctaacagtctcactctccaccagtcccatatccacaacccactcacaggcttcaagcagcaggaccttgccatattaccctaaatctccatattgcagcagctctaccctgtcccctcagcttcttcaataatgaccttttttaaaattctcttccctgactgctatatttacacataaatttcttagtgttactgaagcttcagagctgctgcctatatgctataatgcaacaaaaatagccttgagggccaaatataaatatgatttcaagatctaccacagtcctagaaaataaactttatgggctgtgaatggtaccatgagggtttctcaagaaccatatctggttccctatattcaggtaaccatgagtttgtgctttgggaagaatgcagagggctataaaaattcatgaggcttatttaagccttgccttctttaaaacatttcatttttattttagtgttcagttcgggttctagtcttagcagtgtcttatggttacaatctactcttctgtttcctcaacaagttgcaaataacacaaacttc

SEQ ID NO: 442295 - DNA, 512 bp, Homo Sapiens
aataaaccaaagataaactgaacatttaagacataatcagatttttagtgaatttttaagtcctccagaaaagtctatgacttaataaatattagcaagtttccaaaaatataacaaatgtttataaatatgtgtgcactgcagtgcaatggtgtccccagagaaataaaatgcataacaaagcaaatgttatgttgtagtgtatgtatggcacatttataaatcattacatactttagggcacaaaaatgctgcagtactaaaagtgttgttcaagttctcaattctgttaacaatttaaaatttcattaattgtgtttaatatcaatgaatctcaaaaggctcctgtggccatattagttgaaaatagactctatttgcatacattatttaacataagagtaccctgtgttcccttaccatttaattaattctaactagtcaaatattaattctcatctcacaaatcattacacaggaagatatcaattattcaagtaaaatacaagccc

SEQ ID NO: 442296 - DNA, 1176 bp, Homo Sapiens
ttcttttttttaacagaaagaaaaaagttcctggacaccagacccacatatggtatttacaaatttggtgtgaaccctgcctctggttctgcccagagctgaagagtgaatctattacagagatcagagctgtcaggataattatcaagtgcagtaaaaaatagcattttgaaaaaaatatatacctttagtattgcctttctagaattaactataagcaagaaaaacttattttttaaagaagaaaagaatactttttcactcttacttataagagctggttgtagcagcactactaaagctagttggtatgctggaaagaaatctaaaaggaattctatgaatcaaaagaaactctccagagattttctctaaaaatcaaacgaattctgccccttttgcctaaatccaactcaggagccccctctttgcacagtcctttagctgagtcccacggtgcatgggatggcacagggtgatgctgtgtaaaggcctttctttgctcagacatgcaggagacagctgtggctaatggctgcaagctcagttctggagctgggcagactcaggttcaagccctcctcgcccctcaagagttgtgtggctctgggcagtttccttggctgtagggggactaatattgccgatctcacagggctacggagaagatgaaacaggacaacccatgagcaattcccagcacagtgtgtggcatgcaggaagcgggagtatcactaaatggttcatagaaatatgaggccacgcattgctattaattaaaaaaagttaaaagattaaaaatcacatctcaggaagggcctgatgaacaaaaaagggaaccttggggattctggcccatcactgctttatccttccttcaacacctgccacttctcagagcatccggtcagctcccttatctataaatgggggctgttatccccctccctgtgggatggctgttggggccccttgagacaacgctcataaaggccttagcccgggagtcatgaaagcattcaacaaatgttggctattatttacttgagagatattgcaaattttaacaaataaggggcggtcagtgtcatgtcccagaacaccagcaccagagagggtcttcccgatgccccccgctggacttgcccaagcctctgggagcccctcatctcagat

SEQ ID NO: 442297 - DNA, 507 bp, Homo Sapiens
accgcccactcctcaaaccaccggtcaactcccctaaccaaaaatgggggctgttaaccccccctcccctgtgggatggcctgttggggcccccttgaaaacaacgcctccataaaagcccttaagcccgggagtccatgaaaagcattcaacaaatgttggcctattatttacttgaagagatattgcaaattttaacaaataagggacagtcagtgtcatgttcaacacagggatctgagatgaggggctcccagaggcttgggcaagtccagcggggggcatcgggaagaccctctctggtgctggtgttctgggacgggagccctgcagggggcacttctctgcaaactctcactgggtttgagggaagaacggcctggagttcttttttgaacttttcagaagctgcaacaagagaaacctctactatgctgggtccctctagtgagccacggtgccaaaagcctccaataggttttttttgcatttaaatcctgtttcacc

SEQ ID NO: 442298 - DNA, 694 bp, Homo Sapiens
  misc_feature (562)..(562): n is a, c, g, or t
  misc_feature (637)..(637): n is a, c, g, or t
  misc_feature (639)..(639): n is a, c, g, or t
caggaatactaggtagaaaaggtaactctttaaaaacatttttttaattgtgaagttaatttattgtcactttgtttgatatttattattagagtccctaggttaattctgtttttattgcttttcagaataattaagacctaaatcttctgccgaattctgtttggtttccttatttcttttgccatgttctttcattccacaaatgttattgagcacttccagtgtaccaagccttgtgtttactgctttgatgataaatgcaataaggtaatgctgcttttaaggatccttcaggataggctcttgtagcagtaaggacttagtatttttgctatagaagtgtatggagagctatctatggtgcaataactgtggaaatacagtttttattctatttggttcccatatacattgagtcctcctttggtgggaatttgatcaggttggtctcagttgaatcctggctgcatatgcctcagtaaggaagaaggcctaggggactgtggaaagcccttgtggtgttcctggaaggcttgagaataccttgagctggaagctnctttgctcattggtgacctttttcatatgcagcagagctcttggcattcctagcatactacctttgaaagactgngncttcgcttctaggaaatcttgaccttggtagaatcatattggttatggtatttta

SEQ ID NO: 442299 - DNA, 945 bp, Homo Sapiens
  misc_feature (677)..(677): n is a, c, g, or t
  misc_feature (702)..(702): n is a, c, g, or t
  misc_feature (790)..(790): n is a, c, g, or t
  misc_feature (823)..(823): n is a, c, g, or t
tcggtacctacttttcacaggtagctggagagcgattactaccgggtggttatgacattgacagtgaatacccaccccctcatgaagaggagttcttgagtcaggaccagctgcctcctcctctcccggaggacttcccagaccaatatgaggccctgccaccctcccagcctgtctccctggccagcacactgagcccagactgcaggagaaggccccagtttcatcctagccagtatctccctcctcacccattccccaacgaaacggatttggtgggcccgcctgccagctgtgaatttagtacttttgctgtgagcatgaatcagggcacagagcccacaggcccagcagacagcgtgtctctgtccttgcacaattccagaggcacctcatcctcggatgtgtctgccaactgcggctttgacgattccgaagtagccatgagtgactacgagagcgtgggagagctcagcctcgccagccttcacattccctttgtggagactcagcatcagactcaagtgtagacatcacatcttgggtacttcaccctgtttgttacagaaaagtggaagcagattggctgggcttctgtcccagtggagcattgtctgtggaatgagaagggaatactggatttttccactagaaacttcttcacaagtcatactgtnccaacaagcaagcttgattccagtngggtgaaaatgaaaggctcagacattgctttttgagagtgactggaaatccttgatgtaagtacctatgttcacagcttaaaatgccnagagggaaacattattcacccactagtttacangccagtctgatgctttgtcagaattggcccttgaagtgtacagatcagccttggagattataatgatgtggaaagtagcccttagcgaagaaaggaaccatttttaacaaccgaaagggttt

SEQ ID NO: 442300 - DNA, 1424 bp, Homo Sapiens
aaaatctaaggacctgctgttttttcccaataaattcaattgttttcccacaatgtagaattttaatcttcaaattaagtgtagctaggaccagtgagtggaaactaatcactgcttgacttttattttcatctaggaaaaataacatctgatgtcaccacattaaaatgccttcctgcttaatatcagagaaaaaaatacatgttgccagtttagactcagcgcagtttatcatttggtccaaatttcatattcaaactacaaaaaatattttttaataaagaaaacatattcaaaacatacatatacacacatacacacagtgggaggaggcaaaaacccaaaatgaagctgatgctattgtagcatttattagcaagatcattagggaaatgtaaaaatgcaacaccctttctttcacattaacatctggaaaagaagaacaaaaaccactctaagtgtccaaatattggaaaaagagaagcaagcggaggtcctgaattcttgtaaaagctgctgaccaaactcttcagtttctcttaagaagagtcaccaggataggcagtttctcaacatttgtgcttcatggcaagcttgtgcgcagtttctgcaaactgctgggcgctgttcttcaggtcttctgtcttctcctctgctcggcctaatcgctctccacgctcattcaaggcctggcttgccttctgcactgcgctggtcacgctgtcagcagctgaatggaggatgctgtttcctcccataattttggattggcagttaataaactctggcttcctgtccgtgaggtacctctggcaggtatggtggaggatctggaagaaggtgcatttttctgacgctgtgctggctacccactggtcaaaagcattttcaaacaacaaatcaaactctgccgaatccccattaggatcgataccattaacctggcgaagctgctcgagcatccactgtgatctccgaacaaatgatgtggagccttcaaactgtttgacctttgtgatggacgcctgtgtgggtttcttgtttgtcactgacaggcagatataagttaaatattcgccttgacctccagttgccaagaaaggaatctttttctttgtcctcctcttgacttggacagctcccagcatcctttcatcaagaggtgcaaaaatttccttgctgatagcagatttggcactcattgtagaacaagtgaggacagcacgcagtgaatcgtgcagcctggctcgcgccccagccgtgccagtgcgcggcacgcgtcccagagcacgaggctcctccccggggggctgccccgcgcggggctccgggctccggacaaggcttagccggcccgggtgctggctcgccgccgctcgcggctcccgcgccggctcctgctgccgcgcgcgaaaaggcccgct

SEQ ID NO: 442301 - DNA, 954 bp, Homo Sapiens
  misc_feature (251)..(543): n is a, c, g, or t
tgctagtgtgggcaaagtatattttcaaacttttctaatgttatggccccaaatttcttagttttggcctttttactacctatactatttttactgttttgttttgtctccatgtggtagtacttctgtgaactctaaagggaaaaaaaattctgcaagcagcattagtatataactactactgtaagtaaaactgcctattgacactttaggagttcctgcttcagaagcttagttaagaaacagcttgnnnnnnnnnnnnnnnnnnnnnnnnnnnnnnnnnnnnnnnnnnnnnnnnnnnnnnnnnnnnnnnnnnnnnnnnnnnnnnnnnnnnnnnnnnnnnnnnnnnnnnnnnnnnnnnnnnnnnnnnnnnnnnnnnnnnnnnnnnnnnnnnnnnnnnnnnnnnnnnnnnnnnnnnnnnnnnnnnnnnnnnnnnnnnnnnnnnnnnnnnnnnnnnnnnnnnnnnnnnnnnnnnnnnnnnnnnnnnnnnnnnnnnnnnnnnnnnnnnnnnnnnnnnnnnnnnnnnnnnnnnnnnnnnnnnnnttgactttcaacaaattgatagtgagcattaagggtttccaagttggatttgtaactcctcatcattccttgtatgacaactttctgaatatatgtcactatgtagtaaaattaaacactccaaactcatctttctgttgttagaagttttcagcggtacttccatgcaactttaaatctcactgctctctatggttgatgtcaaatgaccttcagtaatgactgagaattgaatacaaatagattacaaagcccaaatttgatgttaaatgactccggaaaatttagttggattttcaattccagtacttagtagcctacttttgcttgggcctctggttctttatggaaaaaaagcctttgtagtggccattgtgggaaccaaagaaaatgtttccacccttaattaaa

SEQ ID NO: 442302 - DNA, 1115 bp, Homo Sapiens
  misc_feature (46)..(46): n is a, c, g, or t
  misc_feature (113)..(113): n is a, c, g, or t
  misc_feature (709)..(720): n is a, c, g, or t
actatgaaatcaacatagttttaatttgtagagaaatatggtctanctggattacgcaatagaagaattcaagaaaataatattttatttttaaaatagaaaaacaaaataanaagtgttttaaaggcaaagtatttaaaagatatttttcttgcttagctgtattttctggaaaatggagactcttcttaactgggagacataaagtaattcccaccaaaatttagaactcaaagaaaagcatccataacacttcagagtgaatttttaaaaatatacacgcaggcaaagataactgagcagtatttagcttcttaattttccgcaacagtagatcctttatatttacgtacaattcaatgtttcaagagaacatgaaaccagtacttaaggtgtatttgatttgaactcaaactggccaaaaaaagttaggaaaggttcagatgaaacagttttcaacttgttaaaaaaacatgtatactcgcaaaagactgttaaagttgataacattttctacagaacattcataagatcagtcatctcatactttaaatgcaaccaatgttagaccattagaatgtgttcaaacaggctgggtgggtgttaggacggaatcattctttagatgtacagtcccaacattcatatataacagcgcaacataggaccatctgatctgcttctttctatgtgccaaacaggacacagnnnnnnnnnnnnctactttgaaattctagttacctaaatatacagtagttggataaatagctaatcgatttacacatacatctaaacagtaactctctatagtatgaactgttcccccaacttccctgcacagtacaattgaagagtagtagtacaacaatttgaacaatcaccagttgtacaattttaatgttatattaatatatgtagactaaaagttcttaagcaaattattatttccagtcttattcattgatctacaacttccattaattgaaattatagagaagtcttcactgttttaattaaagattttgtccaggcatgagaatatcactaatttttattgtgactttaagtctgtaacatttactgcagtaaagagtcaattacagttccaggccgct

SEQ ID NO: 442303 - DNA, 794 bp, Homo Sapiens
  misc_feature (537)..(571): n is a, c, g, or t
  misc_feature (593)..(593): n is a, c, g, or t
gaaatttgttcctgccagcagctgccaaagccttgaatcagatggaagctaccaaaagccttcttacatcctttaagttcaaaagaatcagaaacaggtgcatctggggaactagagggatacactgaagttaacagagacagataactctcctcgggtctctggcccttcttgcctactatgccagatgcctttatggctgaaaccgcaacacccatcaccacttcaatagatcaaagtccagcaggcaaggacggccttcaactgaaaagactcagtgttccctttcctactctcaggatcaagaaagtgttggctaatgaagggaaaggatattttcttccaagcaaaggtgaagagaccaagactctgaaatctcagaattccttttctaactctcccttgctcgctgtaaaatcttggcacagaaacacaatattttgtggctttctttcttttgcccttcacagtgtttcgacagctgattacacagttgctgtcataagaatgaataataattatccagagtttagaggnnnnnnnnnnnnnnnnnnnnnnnnnnnnnnnnnnntgacagatgttgaatgcccacnagcaaatgcatggagggttggtaatggtgcaaatcctactgaatgctctgtgcgagggttactatgcacaatttaatcacttttatccctatgggattcagtgcttcttaaagagttcttaaggattgtgatatctttacttgcattgatatattataatctttcatacttctcattcattccacgtgtgtagggcctaaa

SEQ ID NO: 442304 - DNA, 1311 bp, Homo Sapiens
  misc_feature (415)..(448): n is a, c, g, or t
  misc_feature (549)..(565): n is a, c, g, or t
agcaactgattatattaactgaatgcacactcgggaggagagggaacagtgatgacagaaaaatacatacagacgcacacaatgaacacacacacccacgagccatgtcctgaaaatacacagggaatgcagcgggacagatgagctttataacttaaggctggataaaatatgcacacacaaacagaatccaagtctgtcgttttcagaaaatggaaatcaaactatcccccgaccccctccccacaacaaagaaaagcccacgattgaaaacttcatacatgcaattccttttctgttattgcaaataaaataatgccatcgaagtcaaataaaaccaaaaccataggacaaataatgaaaaatcttcagaatccagaaaaaaatgaactgaaggtggtttgtgggtgcttgnnnnnnnnnnnnnnnnnnnnnnnnnnnnnnnnnnaaacaagtgttttatcacacaggcagtcttagatttatatacaaaagtaaaactgaaaatatagttttgttctctgtacatttcttttaattttttccctnnnnnnnnnnnnnnnnncacgcttgtatacttttctaaacagagtaaggtaaaacagagcacaaagttctcttctttctgccaagttcattcgatctggggtggggatgggagcagcagggcctgggaatcagtccaatgaaataatgtctggtatgatgccaaagatggatgccgtgtccgtgctgctcctgtttgtgacggtgtggctatggctttcccttaggctgttggaagaaaccaggctgctgttactgccactactgcttccattggtggttggcagagaagtactgcctcctgcacttaactgatcaagaaacatctgtgaggaggtatacgggaaaaaccgagacgagtgtaggaggtcttgatcatctgaaactgctgctgctgcagcggcaagcaaggaggtgttgtaatgctgattgtctcctgataagaaaggaaagaaatctaatccttgtaagtcgtaaggcatgggtgtcatgtggaaaggatgcctatagtcttggatgagggaggtattaatgtagcttgtgtctacagcaggaaggcttggggtgcgggatactggagatgcttgatgtggaagacttaaaatgcctttattatttagtggtgatgtgggagatagggaaggacaggtcctcttggcagatggctcttcttccttatttgaggactggtggtgagacgctacctgatgctccaatgtggagctcaagcatccatcgactccattgtaagaggcagaaacttcc

SEQ ID NO: 442305 - DNA, 774 bp, Homo Sapiens
gggactgcggatccagacagtgaaatagctacaaccagcctaagggtttctctactatgtccacttggtaaaatgcggctgacaattccgtgtcgggcccttacatgttctcatctacaatgttttgacgcaactctttacattcagatgaatgagaaaaaaccaacctgggtttgtcctgtctgtgataagaaggctccatatgaacaccttattattgatggcttgtttatggaaatcctaaagtactgtacagactgtgatgaaatacaatttaaggaggatggcacttgggcaccgatgagatcaaaaaaggaagtacaggaagtttctgcctcttacaatggagtcgatggatgcttgagctccacattggagcatcaggtagcgtctcaccaccagtcctcaaataaaaacaagaaagtaggaagtgattgacctaaccataggacagttcatctgatgaagagggaaggaaggagcccatctgccaagagggccctgtccttccctatctcccacatcaccactaaataataaaggcattttaagtcttccacatcaagcatctccagaatcccgcaccccaagccttcctgctgtagacacaagctacatttaataccctccctcctcccagaactataggccatcctttttccacatgaaccccccatggcctttacggactttaacaaggaatttagaatttccctttccctttcccttaatccagggagaaccaatcccgcaatttacaaaccaaccttcccc

SEQ ID NO: 442306 - DNA, 421 bp, Homo Sapiens
  misc_feature (304)..(304): n is a, c, g, or t
  misc_feature (386)..(386): n is a, c, g, or t
  misc_feature (394)..(394): n is a, c, g, or t
  misc_feature (401)..(401): n is a, c, g, or t
atctacaatgttttgacgcaactctttacattcagatgaatgagaaaaaaccaacctgggtttgtcctgtctgtgataagaaggctccatatgaacaccttattattgatggcttgtttatggaaatcctaaagtactgtacagactgtgatgaaatacaatttaaggaggatggcacttgggcaccgatgagatcaaaaaaggaagtacaggaagtttctgcctcttacaatgggagtcgatgggatgcttgagctccacattgggagcattcagggtaggcgtctcaccaccagtccttcanataaaaacaaggaaagtaggaagttgatttgaccttaaccataggacagtttcatcttgatggaaggaggggagggaggggnccttcttncccaggnggggcctgttccttttcccc

SEQ ID NO: 442307 - DNA, 774 bp, Homo Sapiens
  misc_feature (176)..(176): n is a, c, g, or t
ggctttatcaggctcactggtgtaagcttttttgacctctgaagtcaggatgaaatgatctccaaggaaaggctaggcaaagggcggtgagcccatatgtgtgtttctcactatcagggtcctggggagctggagggtccttgtcctagacccatccccttgcctcctgggcaggnccaagcttagcttcctagtaagccagtgaggcttccccctgagtgcttggaagaggctcacctaagaggctctggaagacttcaggacatttgcaaaaagccaagttctgggcagagactttggggccaagaggcagaaacatcgctttctgaccatgtcagtgtgatggcatctggggcatgcacacatgtgtgtactggacttgccagtccacatccatgcccagcttggccatggcacaagccaccttccactccatcccgtcagcagtggctggtttctgcagaatccgcacagatttagagaaggactctccaggtagagatcccagctctaccacttccaagcttgaggcgttgtgcatggcacctatgtttgtgcagaaccatcggagaatccccaaaggaggaaggaggacagagccatcactcttcatccatcccccaatccctgcttccccaaagatcttcctcccaacacacccagtgagaaaccaccacctctctttctattaccacccccagtagccctattgcatcctgttggctcatgctccagaacagacctcaaatctgtccattgcatccttccccaaag

SEQ ID NO: 442308 - DNA, 866 bp, Homo Sapiens
  misc_feature (182)..(182): n is a, c, g, or t
tccaaaagaccactttggtgatctgacctgttcctgaaagggaaagcctagaaccggaaactactaggaacctgggtcctcttctaggaaatggggagacaggtattctgcaaagggagaacttgacaaggaaatgctaccaaaatacccagtcacttctttagaaagctcctccccacttntcctgctccatttgatggaatggcaggctggattcagagaggcacgtgccaaaggagctgtttaaatccctctagacatccctttttcaatggatatctcttttgagtataaagagagctttcaatgtgtcttgctatcattttcctgaccctaatcccagattaactagaatcacctttagcatctaagtgagtgggtgctatgaccttccatcaacgcatgtggcatagatgctaaagcaccagtcttacatggtgggaaccatgttaaaaatcaatggataaagtagcagagcctctaaactaagaagaaagagacatagcttaattacagaacactgtattttcataatcactatttcattgtgagtatgaagttctcctcttttccttaaaactaaattccatcttccctgagaatagggttaagagaaatattaaaacgcaaaatgtcaagggccttttaaaagataacacaatgggatgtctatagctaactgcaacgtaaatgtgtttctactctaaaagcttttccattactcaggttttaacctcacctcccctctggactctaggaatacatgtagagatgcgcaaggtgagacaagagactgaggaagtgagtagctgtcacgtgccggctgttctcactggatggcaaacggccctggaccaaggctggac

SEQ ID NO: 442309 - DNA, 336 bp, Homo Sapiens
acactgtctgggtaagaatcaagctcatcttgttgaagaacatctatttgtgattctttttgcatatctgatggtggaatgtagttcttggcaaagtagtctccacgaaacgtccgtcttctcctatagcagaatattccagccaaaacacttacaagtactatgaagagagccccacccactacactagcaatgatcgtggcaattgtgtcatccttaattgttgccaaagttgacaatgggaagggcaattttttaggttctgttgctagatcctcgatgtcagcagttgagggatgccactgaattgtaggctgaagggtggtagtagtagga

SEQ ID NO: 442310 - DNA, 615 bp, Homo Sapiens
ccacagcgcataatgggtgcttccatatcagacctgacatttcagaccaactactagatgtaagatgggtagagaagtctttcatggtcattacctcctaggatatcacattctgctttgccagtttctcataaacatgatcagttcacagccaatcccaggaggatggagcaaatgtagtggccccagtctcactgctgtgaggctcagcaggaaggtttctggccaatctgtgtctgacatggccctggcatgtgtctgctgcctggagtcctccatcgggggcggacacatgcagctctcaggaatagcctactctgaaagccagcctacattcactagaggacttatgctcagttttggcttatgtgtacagtgtgtaaaatgtaaaaaatactacccatatcaaaacagaggcttttcatctgtttccataattttaggaattcaaacttggatatgtttaaaattgaaaacactagaacttctacgcacagatagtactaagtcttacctcttaataacttaaaccttgccgtcaaacaatttcaaaatacacttatttgcaaaagtggtacaagcccaaactatggagtctctcactgttgatgaaca

SEQ ID NO: 442311 - DNA, 845 bp, Homo Sapiens
  misc_feature (48)..(48): n is a, c, g, or t
  misc_feature (52)..(52): n is a, c, g, or t
  misc_feature (56)..(56): n is a, c, g, or t
  misc_feature (81)..(81): n is a, c, g, or t
  misc_feature (90)..(90): n is a, c, g, or t
  misc_feature (94)..(94): n is a, c, g, or t
  misc_feature (103)..(103): n is a, c, g, or t
  misc_feature (109)..(109): n is a, c, g, or t
  misc_feature (125)..(125): n is a, c, g, or t
  misc_feature (130)..(130): n is a, c, g, or t
tggccagaactttctgttgacccacagcatgagctgggccactacatntgcnccancctcctgggattggctgtgaactgntcatgtttntganaactggcanagcagnatgtgatatcctaggnggtantgaccaggaaagacttctctacccatcttaaaaacaacgaaagaaggcatggaccttctggatgcccatccattggttgtaaacacttctagtagttgttctgaaatgtcagttctgatttggaagcaccccattatgcgctgtggccactccaataggtgctgagtttacagagtggaataagacagagacctgccctcaagagcaaagtagatcatgcatagagtgtgatgtatgtgtaataaatatgtttcacacaaacaaggcctgtcagctaaagaagtttgaacatttgggttactatttcttgtggttataacttaatgaaaacaatgcagtacaggacatatattttttaaaataagttctgatttaattgggcactatttctttacaaatgttttgctcaatagattgctcaaatcaggttttcttttaagaatcaatcatgtcagtctgcttagaaataccagaagaaaatagaattgacattgaaatctaggaaaattattctataatttccatttacttaagacttaatgagactttaaaagcattttttaacctccttaggtatccagtattgaaattcttccatggaattcccaaagtaatttggaaattaggttgaaacatatctcttatcttacgaaaaaatggtagcattttaaacaaaatagaaagttgcaaggcaaatgtttatttaaaagagcag

SEQ ID NO: 442312 - DNA, 438 bp, Homo Sapiens
  misc_feature (397)..(397): n is a, c, g, or t
aaagcaaagtatccaatttttattgattctataacatatatatgtgcatatattgtagtatctttatcaatcaggatttacttgctgataacagaaaccactgcaacctagtttagacacaatgtgcttttgttagtttctggccatgcacagaagcctcctgcttacaagatgaatggaaaggctgaaggagcagcctttagtctgacttccaggaatgactctcagaacactatcacataactggctgtccagaagagatgctatctctgcttacagcctggaagctggaaagtcatgaagatgctgcccattgctggctccagagccacattattttagccacaatccccaccagcaaaatggatgctcctcgtcctgccacaccacaccctgnggtctctgttattgctcttctagaaaaataaaatgctctgt

SEQ ID NO: 442313 - DNA, 468 bp, Homo Sapiens
  misc_feature (438)..(438): n is a, c, g, or t
tgtgatgtcaatatttttattaggtatggcctctggtgttttcttagtccatttgggttgctatagcaaaataccaaagatactggacaggtaataaacaacagacatttattgcccacagttctggagactggaagtccagtatcaagatgcggcagattcaatgtctggtggggacccactttctcattcatagacagagccttccctctgtgtcctcacactgtgggaaggagcaagcgagctctctggaatcctttttgtaggagtgctcatcccattcatgagggctccactctcatgacctcatcacctcccagagggctccacctgaaactcatttgatttgggagatttaaagagtaggctgtaggggcatgttgtacaacttttaggaaacttttccgaaatgttaggctgcatttcattatttaaccntccattccattttccaatcatcttttcggg

SEQ ID NO: 442314 - DNA, 1290 bp, Homo Sapiens
  misc_feature (134)..(134): n is a, c, g, or t
  misc_feature (775)..(783): n is a, c, g, or t
tcgctttttttacataaggattgagttcctttttatgatgattttacctttatagcaattttgaattttgcattctattgctagtattgattcaggtacaccattaagatacaacattctagaagtctattccnttaggagttaattaaacatgatatttgaagaataatgaaatgctttatagttgtttgaggcataacaatgtgtatttgttttactggatcatgttttgaactgactagggagggtagcacctgcctcagatagtaccaacaattctgtttcactgggtagtctaaaactagcttatagtttagcttaacttgttgtgtatgtgaatttagggatggaaactttttttcccctatttattctttgtttccttctgggaaaaaaccccacaaaaatcagcactcctttatggatacattggagcttttgaaagaattgtaaactctaggaaggggaaatatctgtgtcttgatttcttagttgccttgaaaatcatgtactgaactgtaaccgctaacttgactggatgaactagtttgcttgtgtgtagagagtgtattgcttcctcagatttcactgttttcatctccttttccatcttagtctttattccttaagaccaaaaactgtaatatcctttagaaatgctctagaagatctgtattgtgtagaatgatcatgtatttataaatattttacaagtttagattataaaatgaaaaagaaggtcatgtgttttggggggtattttgcatgttcggannnnnnnnncccttcaccgaacccttctgattctttcaaactattgccaggtagttgttagtgtttctaattggactcttaatatgaacttcaagaagctgttaccagttatcggctctgtcatctgaaattttaaccacttaatttaaagttacaattttagaatttgtttttgttgttttaccttaagaaacacaataaatcactgtttaaaaaagatctcaatttatataaagtactggaaaaaagctaagtaatttttagttctatctataatctccgtaggatgaattagaaataaattgtgatgaaaagaaattaactgcttatttatgaatctaatcatttagaaatgtctgagagtaacactgcattcttatagaaacaaagcacaaattgcattcaagctctgaattgattttttgcttggggctgttgttacagtagctgtaattttgctaccagattgtcttaatttttaaattttgtttttatttccaagctcttggcaatgac

SEQ ID NO: 442315 - DNA, 1058 bp, Homo Sapiens
  misc_feature (187)..(187): n is a, c, g, or t
tttctctctctgggctttctccctggcttggctctccccgtggtgtgtctcgtgcccgggtgcggctctcctccgatccgtgtcttacgggaccgtgtgctctgccgattgtccccattcacggctatggcttgctgactgacatactctgcgtccttaccttttttgacccctcgggagatttgcnttgatggttcccctcagttctggcccacatcagagtcggttcccccagcatggttctgttcccaggtcaagcgccagttgtgattctccatagggccttcagggatccttctcgtctctggactgtggcaccgggtacttccggaggggcttgattctcgatgtggcttttccatatgaatattggtgaaaatatttgacagcagcaacctcgataagggccgaaaatacaaagcaaacagaacagcaatgaaccagtcctgctgttattcataggacacctttgggcaaagcattgtccgtgcctgatgtcttagtctgttcattggtgaggcacacttgttattccaaatacagtcctagcgggaactgattcttttgtttgatccagaatgaaacgttgagaaagaatcactgtcataatgcacggaatataggtctgaatcatacaattacccatcttccgtctgaggtggaagtaaaccgtcataaccatatattcacccgtaattgatttgatggtttcacttgatacggtttgcccgatcaaatcatatgtgaactaagctggaagactccttcggaacttcaactgatttctcaggaccttttgtccaggtatagatcatctcactctattggataggcataactcccgaatttcaaagggcatgcatgaccatccatgggaaaatccaccaatctcatgggacactccgcacttatggtgagtctcattgtgtataaaatagtaccatttctcataattctaaaaagcttatttggatctgtcatattatgtgagacagatttctttccctcgtgccgaattcgccacccaggcctcgctaccttagtaacgctaagtactg

SEQ ID NO: 442316 - DNA, 773 bp, Homo Sapiens
gtttctcaggaccttttgtccaggtatagatcatctcactcttggataggcataactcccgaatttcaaagggcatgcatgaccatccatgggaaaatccaccaatctcatgggacactccgcacttatggtgagtctcattgtgtataaaatagtaccatttctcataattctaaaaagcttatttggagctgtcatattatgtgagacagatttctttccattcctgaagaaagtatcaggggtccacactttcgttaccatcatattgttcaatctcaaaatttcaatggggccgtcatattttaatcttttgtcaatccatgtctgcctgaagaacacatccattgtgtattccatttcaacatcagaaacaggtccaaagctggtgacatatatgtcagttttcacttctgtaacaggacccccaaatccaggacgcagcctgttgtcataaccatcgagcaaactgtccaggatgcgggtgaaattttctgtgcacaatttctcctccttttggttctgtcctggggattcgtttaaacaaaccgccaggcacaggaagcgcaggagggcgaaactgaccccggcggacagagcgatcgcgggtaccttcttggcagaaaccatctttgcaacatgccatacttcaagcctgttcacgtttccaggctcttcagatgccctgagcagggtgcgaggagagggcagagaggctcccgcggcgtgcgcacactcgcgctcacactcgcccgcgctcagccagccccgct

SEQ ID NO: 442317 - DNA, 1414 bp, Homo Sapiens
gccggggcccgggtgtggtattttggagttaatggagtcagaaggacctccagagtcagagagttcagaatttttctcacagcaagaagaggaaaatgaagaagaagaagcccaagaaccagaggaaacaggccctaagaacccccttttacaacctgctctcacaggggatgtagagggttgcagaagatatttgaggatcctgagaatcctcatcatgaacaggccatgcagcttctcttagaagaagacatcgttgggagaaatttgttgtatgcagcttgcatggctgggcaaagtgacgtgattagagctttggcaaaatatggtgtgaatctgaatgaaaaaaaccaccagagggtacacactcttacattgtgctgcagcctggggtcgtttggaaactttgaaagcactggtagaactggatgttgatatagaagctttgaacttccgggaagaaagggctcgagatgttgctgctagatattctcagactgagtgtgttgaattcctggactgggcagatgcaaggctgactctgaaaaaatatattgcaaaagtctctttagctgttactgacacagaaaagggatcagggaaactccttaaggaagacaagaataccatcctcagtgcatgccgtgcaaaaaatgagtggttggaaacccatacagaagcttccattaatgagctttttgagcagagacaacaactggaagatattgtgactcctatcttcacaaaaatgactacaccatgtcaagtgaaaagtgccaaatctgtaacaagccatgaccagaagagaagtcaagatgatacctccaactgaacatacgttctgtaaaaggccacattttcctttagtatctgaaaggcaaacctattcatgccatttgaaatcgagaaaacagatgtgggtttctttaagtatttaagtacaacattacatcgcccttgttttgtttgacctgttcagcatgcttatgtccggactctggcctcgcctctgctcctccaagcacagccccatgtgagtttcacgtgctccttcaggaaagcacttgggtataaatcattcgtgaagaccatgtggaggctttaagaactactcagagaatctaataattttctgtgtaattgaggcattccatataaaaggacatatttggctatttccagagaaaaaatttgttctccctgcctaaaaaggaaatcttatggaatgacacttggagcaaggacaatattaagaccagcttggattaggagcctctgggtacaactatcactttttatgtccacaattaaatttcacctgtgaggtggggtatacctctgagtaaaacccctctttatctttgacctcctttctaatctgttaaaattaaattaaaaccaccaaaaattctgg

SEQ ID NO: 442318 - DNA, 200 bp, Homo Sapiens
cagtggggctgtacctagaatagtggttctcgaagaatgcggcctgcagatcctgggagtcccaagaccctttcagggaggatctgtgaggtcaactgttggcactgtggcatgaatcaaggtggtggcagcaaacttctagtagttttgatatgtccttgatagaacaaatagcaatggttaactattaaatgttgacc

SEQ ID NO: 442319 - DNA, 791 bp, Homo Sapiens
  misc_feature (776)..(776): n is a, c, g, or t
gagaaatagaactgacatcagagaatacattcaaatcaactgaatttaaagggaaaaaatgcaatttctcctaaattccattcaaagccaaaacattcagattttctgacaccaacttagcaaatgtttaaaatacaagggtatacttcttattgataagttaccatgggttccactagtagagctggagagataagcaaacatgctgggtgaaccctagagtaagcctgagactatggctgcacagacagaagagaacacagaacaaaacagaaactcaaaggtttcctcatccagggcagtcttcatgaagacagttcaaattccaaactgttagatcattaaaggaataggcatgtgactagccctatgaattattcaaattcttataaataagaagacaataatggcttagcagttgaggtaattacatagtaaaattctatttttcttcacattacggagactgagtctaaataaatatgagggtgggggacccattactttaaattttcagtgaaaaagttacaagtcatatataatggcttaatactggctagtcactccattctgatgagctcctgcccatcagaatacttgctacttaaagaatctttcgtggcatgttaagtgaaaaatgtgttccttctaagtttcttctgaagtctacacttagagtcttgtatatagtggtccttgtaaagaagcacttagtgtgtgatgatgaacaacgtttgagaccgttagctttaaagaccctttttgtagagacatcnacaagtcttttatga

SEQ ID NO: 442320 - DNA, 948 bp, Homo Sapiens
gaaaaaagatcacagaataattttatttataatgaatgttattctctccagacttcaactcatcagtttactcttataacagagaatcaatttaaataacaccatcaaaatggaatgaatataaaacaatctgctattacgtatcgatttctttgataggatataattatagccaattagtcttgcaacacatggtccatttccagtgaaattctcaataaactgctaggaattacagtccttcatattgacattttattgtaaagtctgctagacgtggctctcttgattgctttggaagtcagtcaaacaaatgctctgaagaaaaggctgacaccgcaaaacaacttcatatgaaatctgtccacaaatgggatagcaatgccttcagatcctttggtttttatcagtccctttggaaagttaattaattgatgattgttcccttaaaattctattttaaataggacaatcactgtctatacagtctgtgccagcgtccttgactttcttgcttccactgatttgtttatcaaatcatacagtgatggtagtcttattttatccatatttttgctgtaaacattaagaaatataccaaggacaactaacaaaccagaccatacatactgaaacgtgaatggtttagcaaagaatataaacgaaagtacaatggtcattgcttttcttcctgttgtcactgttacagcaataagtgcaccaaaaattttaatcaaagccagaacaaaggagattccaaaatatccagtgagggaaaaaaggaacgcataaccataggtccgaactggattctttgcacaaaatgttactgcagggcctaatccactagtgcatgtcaatcccagtaaaatgtatacaaaaccaattgaatacgaatacaatacctagagcagatactcgtgccgaatcctgcagcccgggggatcc

SEQ ID NO: 442321 - DNA, 466 bp, Homo Sapiens
ctttaaggtgacaaaaagtgtgggaaagattccacacctccctccccacgcccgccaatggtcctttacctgtccatgtttcagattaaataattagctcaagagatttgcacagaaagcgaattagcccttttctagtcagactgttaagctctcaggcgggcaactcggaaccccgtttcctcaccgaaggctcaggaggccagcccagtgagggatggaggtggctttagagggcgacagttgtgcagcactcatgagcaacagtgcccaggacttttgaagtcacgaagggctcctgaaatcgacagctcaggtcccgcccctggggcgacaaaggagtcttgggggcgtgccgccgggttggaattgtggtagcagatttttgggggaggagggcgcaaagcagctagaaacgcacatcctcattctggaactatcccaaggcccccatgcttctcagcag

SEQ ID NO: 442322 - DNA, 1059 bp, Homo Sapiens
tgatgtaaattgtaaatttttgttgccatggtaaagtttaattgttacaaagctataaatatcattatgctctatcttccatatcgttatgtataacctgggcaaggttaatagaattaatgagcactggggatctatttctgtgatgatccaattccacacagtctcttgtaccttaatactcttaaactatatgttgctttaagttccatttagaaccagatgacaatacgctaagaagctcatgccataatcatcaccctatttgttcctggtaaacaaagtaagcaatgcatatgtgcctagaaaagttacttgagactgtatcagaactggaatgttgctttttgtgaagccaaactgcatttgtttgccttcgggtataaccagttaatactgaagttgttaaaggattttccagactcttgcttgtgctggtctctaaatgcaccagtccaggaagcagaacttaatattctgaaacgccgtaaagtgaattctaaagacagcttagtaaaattgctttaaaaggtgttactttacttttaaaagcatctgttgctccaggtgcatggtttttgtctggatgaaacttcaaagcaagctttctataagcttttttcaaatcttcatcaccagcatctttcgtaactccaagtacttcatagtaatttttacatttgtttatgctgagaactccatctacttggtctttggtatagccttttccaccttcaccactaccagatgtgctgtcctttgtgcaattaggcttgctttgatcgccactacctgatggttttcggcaatgagggctatttccagccgtgcttccatttttcataattatttccaatagtgcgcgggccgagggcagtgggtagagcttctcggccttctgcaggaagcgctgggccttctcgcggttgccggcgttcagggcctcccgggcgatctcgacacatttctcagcctcatgcctgttcccctccatagcttgctccttcttccgtttcctccggcagcgcagctaagaagggcggaagccgccgccgcccc

SEQ ID NO: 442323 - DNA, 1082 bp, Homo Sapiens
  misc_feature (20)..(20): n is a, c, g, or t
  misc_feature (31)..(31): n is a, c, g, or t
  misc_feature (170)..(214): n is a, c, g, or t
  misc_feature (217)..(217): n is a, c, g, or t
  misc_feature (667)..(683): n is a, c, g, or t
tttctcttcctttaaatccnccagtccttcncacttctctttccatttctactttaattctcctacttaacctgaaagcagaaacatatcctatcctggaatactgtgacaaagaaaatgccaccactgtaatctaggacgtttctttgaaaaatattcacagctttcannnnnnnnnnnnnnnnnnnnnnnnnnnnnnnnnnnnnnnnnnnnnacncaggccttgtgctagtactgcagatacaataagtatgtgtgacattctcatccttaaaagttagcaatgccaaagactcagaatgaagaaagctaggcaatacatgccctgtgatgtttcagcatgctcctaatgaccatggtattttcccaagagtagatagtgcatgtaaacagtggtaacatctgtttacatatgagaggtaaacaatttggacctcagttaatacacagattttaactaaaaattatcatgttaagaaaacttcatcatatttagagataaagaattcgctttattgtataaatgacaatttcaacaagggtacaaattagatataattatataaactgaatatttacatccaatttacatccatcattctattaatgagcactttaaatatataatacaattcagaatgataaagatatctacattaaggcatcnnnnnnnnnnnnnnnnngaaagcaaagacaggaagtctacttgcccactcagtaattaacaaagatttatgtaaaattcccacaaattgatctcagaatcagaatcagcattttctattagcaaaaactgtgaaatactagtaattgtgctttatataaagctgtttgaggcaatctgcataggaaatattatcaagattcataattgcacaaatctgaaaggccttacatgtcttatcacatgttacactgctgtcataactcacaaagaagtaattgtagtattttataaactgcttactgtctaggattgtaaattgtttagctaatccatataaactttccggctgcaaatcttcaatgtcgtaggtctgggtcaggatatactccagcttccagatggactctccctttaa

SEQ ID NO: 442324 - DNA, 1187 bp, Homo Sapiens
  misc_feature (73)..(73): n is a, c, g, or t
cttcatgttgagcaactgagggcaaaaatctccttctcctgtttaaggtgatcacatcataagagtgtctggncattgtcacccagaagtacaaacttattttagacggggacaactgtgacatctgaggaaatggctaaagcgctcttttgcccacagaaagtaaaactttatgacatagcttcttttaaaacttggcatttttgggcatagtcacttcacctatacccaccacagttcaaagactttaaaaatcaatattcactccagcaacccctgctctattctctaagtccaaaactaaagcaatcatcaagagttttggaaacaaaccaaaaactttatttacaaaagtaaattttaacttgcttttatatgtcatataccgttaatgatgacagcaacagatttaaaatacattgaggtttgtgcagctcatttccccctagttataccataaaactttataaacattgctttagctttgatgtttggtcacgtttgttgtgcagaagtcacgtttcagggtaggttcaccgccagacacggtcacatcaccattggctgtggatttccaagaagcaaaggagccaatctcagcaaagctcgcactggcatttttagctgcttaaatttgaagagcagttcagcaaagcttgtgctcccttctagtcctataggtggcaggtgctgtggagctggcacagagtggtagacgaggaagcaggccagcatgctcagctgtgattcctccaagggctgcccgctgaggtaggcgtgcacacacatatcacccccgacttgtagccactggtccagggtattatcaatggtgcacttcacaacagggaggaattccgagttcataaagagcccccgcttagggttgttctgcagccgctcctgatggcttcgggagctgaaaaactctaacaccaactttatctgccaaagttcagaagtctcagacatttctcttctcccaagtcttcttatagcctgatccattgctatgtatgcaggcaacatctctggggtctcctgggtaacacattcatagagtactgaagaaaagagatccagaatttcctgtttctgacccatgttcacagttggcttgcagaaatattcagcaaatgacagaagtgctggatcagaagtgaatgctgagattgtttctggcttcc

SEQ ID NO: 442325 - DNA, 865 bp, Homo Sapiens
gagagttacacaatagacatttattcacttcaacatcacaatttcacacgaagttggaggaagcccttccctaacaaaacaagcattcgcattaggggaaggaggctgacctgctctagggatgaaatacatctaccaagatatagataaaagcaaaaacaaaacagatggtagagccaaaaaacagagacattaaaggaaatgaaaaacgttataccaagtaatgtttataaatccagatcataagtgaacgtaggttacaaaaatggaagttgtaagtattgttattcttgtacttttcacacaaacagaatttttagaaaagcttaaggtcagggagtgctagagagtttctgtatggcaggcaagaattcttccttttgaacaagaccgaaaaacctcaggacaaagagaaagtatatcttttaaaaactgatttcatagtaatgtttctacatattttgaagcacctttatgtatttagagcatatcaaattaattcatttctttccctgttaataaaaaaggtacattcacagaatcagtgtacttagaataaaaaataaacagaggaaataagaactaactcgagttaataacaacatctttaaggacaagtttggtcatttaaaaactaagtcttgttttgttttgcttgtttttaattactcctttcatacttaatatttcaaatatagctgcttcagcaggacagcttttcagtatcacagtaagtacagcccaatacaggatcatccaaaaacacgttgacacttccaagacactggcacggggtcctggaaggctttgcggagctccgggccgggcggatcgctgcctgcagggagtcggggatgccaggttc

SEQ ID NO: 442326 - DNA, 1065 bp, Homo Sapiens
  misc_feature (918)..(918): n is a, c, g, or t
  misc_feature (1006)..(1006): n is a, c, g, or t
  misc_feature (1029)..(1029): n is a, c, g, or t
agtgaacagagttttgaaaggcattgctttaaaggaaaaaagtataggtatgtgtacatatataatacatacaaacacatgtacttctgtatacatttacatatttttacaattcatactttaatttctaggctataactcagaccaaattatacctaaaagttccaacaaagtccctttttcaatatcacattaccaaaaagatggctgcaaatgtaatttggacctttcattaattttgttttcaaaactagaataatctcaccacagaatcagaattttctaccgttccacacccaaccccttcaaatacacacaaccttgttacttttcactccagcaccttcatacgcttttctccagggaggaggttcttgcagctggaaacagcctattttgtggtcactgtcaagtgggatgggatattctaggcgctcccaaaaaaggcactatgggccttatatgcagggaaggcacataccaccaagttcaatgagaaatattagagctaaccgtactctcttctctgcgtacgttcgagtatacgttgcccatatccctcccatattttctttttgctgcttttgctctggaactttgcttttagcagggaaagcagctgtcccctgagtgctttgaattgggaatatacccagtgtgtgttctcccccctcttacgaggctacataacacatctatgatgctgctttaagtttttagaggctatacctcaaagtagctgcggattttgtctcctgcactgccaatatgcaactgatcccgcttttattaattttttgaagaagtacacagaatttttacagaatgtaggtattttgatatcattaaggtaaaccaatcaggaaaactccttgaggcaatagttgtttctttgtcagtttcagttacaatcatctntacccattaagacttacattaacattccttttatataaagagttgtatatgtccacctaaattcctatgtccacacttaacctttaangatgtacattgagggaatatcanaaaatagcgttcatggctacgaatatgtagaatgta

SEQ ID NO: 442327 - DNA, 678 bp, Homo Sapiens
attgacttgaaatcgaaatctttttatttttcctcacttttagaaaggagagttatgagccatgaagtgactaaagatgaaatcaaagtagagaagaaaaaaaggcataaataattcacacacagtgtggtcaacacttgaatgattaaaaaacattttaagtatatccctctaatttgttgctcttttattatttgtcttttaagcatttcctaggtgtaaggccctttgctgggcttgatggaaaggaagggacattcctgctcttagagagcggtagccatccataataaccaacttggatatgacgtcaaaagtgatgggggcaccaccattgagggcaggggaggacgtgatgcgactcacagagcacccagcaccggactgggtcagaaggacattgtcattcttcactagaagaaaggttaacccaagaggttgatctttaaagtctttgaataagtgaaatacttttggaattaggacacaaaataaaacttgtcactgaatcagaggtagagtgtctgaaagggtggattgactcaggaaagtctaaagtcagatcgcatgtgttaggaagagcccagaagaatatctttaacttagttggtaaaagatggactcatctaagcagaatgaatctatttccttgcagtattcaaatagatgtctaatagg

SEQ ID NO: 442328 - DNA, 1066 bp, Homo Sapiens
  misc_feature (39)..(39): n is a, c, g, or t
  misc_feature (65)..(65): n is a, c, g, or t
  misc_feature (81)..(81): n is a, c, g, or t
  misc_feature (93)..(93): n is a, c, g, or t
  misc_feature (625)..(847): n is a, c, g, or t
gataatttttcaaaactgaccctttctcaaaaaagaccnttcaatacatgagtcaaggatgtttntgcttttttcctttantgtggtgagggncggatttaaggatcaataaagtccctattctgtcactaaaaaaatttcttgatctctaaagattaaaataaaaataccaacatcagacagctttcatgttaaaaatcagaatttatgttaaagtgctctgtaaacagaactgttactaagtggaataaacagtactgtggccgataagaataacttgaagctgaaaagcagtactcacagcaggaacaatttgaactcaggccatgtatacacaccctctagtggactcatgccagtgtcactccattgaagtgttgtgctttcctaagaaggtaatctagccactgaatttgggtgcagggtatcgctggactttgagcatttgtgtagtttaaatagcaaatcattatacctgagtattaatagctaactactacacaaacaactcaaaaccagtaatgtcatgtcattaccatggcttcttttatgtaacattatctgctacattttaccactcaaaatatatttaaaatatgtattttaaaatatattagagcatatnnnnnnnnnnnnnnnnnnnnnnnnnnnnnnnnnnnnnnnnnnnnnnnnnnnnnnnnnnnnnnnnnnnnnnnnnnnnnnnnnnnnnnnnnnnnnnnnnnnnnnnnnnnnnnnnnnnnnnnnnnnnnnnnnnnnnnnnnnnnnnnnnnnnnnnnnnnnnnnnnnnnnnnnnnnnnnnnnnnnnnnnnnnnnnnnnnnnnnnnnnnnnnnnnnnnnnnnnnnnnnnaactgtgaatgacacaagtgttggtcttagaaaaatacaggaacaatactaaattggatccatttacagacaggtaaattgactatccctaagccaatctatggtcattcctatactttcccaaagttccaaagtatgaatgtcacatgaatgttgaattcttctttgaatgtatctattcttaaaatttacaccagcatagttaaaaccctctttgcc

SEQ ID NO: 442329 - DNA, 1226 bp, Homo Sapiens
ctttgaatctccgctgtagcgtcacctgggaggcagatctaacagagaacctggactgtctcctatcatgattcccgggaaatatcgctctgtttctggccgggctgcgaacaacgtgaactgcgggcttcatctggttattcaaacatcatcgcttcctgaaaaaaacaaagttgaattcaagctaaataaagacacatcgtcattccccggtagacttttacaacatgaccttgaaagaaactactcaagtaggcaaggtgatcatattaatttggtgagctcatcattgtcatcatttcctattcttcaacgttcttctgaagagaaaattctttactcagacaggttgagcctagaaagacaaaagctgaccgtatgtcctatcatcaatggggaagaccaccttcgtttgttgaactttcaacacaattttataactcggatacaaaatatttctaatctacagaagttaatatcgttggatttatatgataaccagattgaagaaattagtgggctttcgactctgagatgtcttcgtgtccttctgttggggaaaaacagaatcaagaaaatctcaaatctggagaatctaaaaagcttagatgtcttggatcttcatggaaatcagattaccaaaattgaaaatattaatcatttgtgtgagttgagagttttaaatcttgccaggaactttttaagtcatgttgataatcttaatgggctggattcactaactgaacttaacttgcgacacaatcaaatcactttcgtgagagatgtggataatttgccctgcctccaacatctctttctcagctttaacaatatatctagttttgacagtgtttcctgccttgctgactcttcttccctctcgggacatcacctttgatggcaatcccataggctcaaggagtcagggtacaaacacactgtccttcagaatatgatgcagctgcgccagctagatatgaagagaatcacggaagaagaaaggcgtatggcatctgttttagccaaaaaagaggaagagaagaagcgggaaagtcataaacaatcttgcttaaggagaagaaacaggttaacaattaacaacgtagctcgacaggtgggacttgcaacaacgagtagccaatattgctacaaatgaagatagaaaaagattctgactctcctcaggacccctgtcagattgatggaaagcaccctctctgattcca

SEQ ID NO: 442330 - DNA, 1928 bp, Homo Sapiens
  misc_feature (73)..(82): n is a, c, g, or t
  misc_feature (312)..(312): n is a, c, g, or t
  misc_feature (319)..(320): n is a, c, g, or t
  misc_feature (322)..(322): n is a, c, g, or t
  misc_feature (327)..(332): n is a, c, g, or t
gttgtccaagccggccagagttttttggcgggaaaaaaaagggattttcaggaaagatccctttgggatcccnnnnnnnnnnggcccgtttcattaggggggggttaaattcccccgggtactggcagccggatttattaaaggcagggttacccgggctttttggaaattaatacgggctcccctttaggggagaccgggcagattttcccactttgtccaagaaaaagctgggtcagggaaacaggtatggcccatgtgccatttcattaccttttttttccgcacccgacatagatgcctcgagttttnttttttnntnttttnnnnnnggtaattaaaggccatttttatttttggtctgttatctgctgtaggcagagcttcatataggaatttttattgcgaatttctatgactgcatcccataacaagctcaatgaacatctgtggccaaagcttctgcaaagcctcatttttcatgttgatttctgtggcttccttcacaaggtcttctatatatgttttacagaatttcttcttttcctttatttcctctagcttttcattataaaagtctcttgtagtataatttaatgtagcacgatttgtgttttctcctacaagtcttttgctgtcattattttcttcgttgataataccaggtttttttcctttggattctagtagataccgaaattgctttttcctggcatcacccagaatggaaatcagacgatactggggtaactcagaagatgctacatgtgctaggattccaaagagcctttcagccattatcatatcattctgtgtcacctctgttccatttattttctgcatactgaaatggcttagcctaaacagtacatagtatttccagagtgtaaaattgacaactggatttccttgaggatcaattgtcaactggtcaatacgacggagttgggctagtgcgttaaattgctgcagcattacaagatttgtttccttgaatttaagggccagagaattaggaaacttaatctccagtttagggaagcacttggacgatttcatcaaattctatgaaagtgaaggagactgttgtgatcattcctgctgtttgaacactccgaattcctatccagagattcccagtgctcctgagccatatagggaaagtgtatccccgtccacttcaacaaggtatgtgtctatgacagataaaccttgtaaagcattgttgagtcctgagtctagaggcccctgtttcctctgggaatgcagagagggtgcttccatcaatctgacaggggtcctgaggagagtcagaatcttttctatcttcatttgtagcaatattggctactcgttgttgcaagtcccactgtcgagctacgttgttaattgttaaccttttcttctccttaagcaaagattgtttatgactttcccgcttcttctcttcctcttttttggctaaaacagatgccatacgcctttcttcttccgtgattctcttcatatctagctggcgcagctgcatcatattctgaaggacagtgtgtttgtaccatgactcttgagctatgggattgccatcaaaggtgatgtccgagagggaagaagagtcagcaaggcaggaaacactgtcaaaactagatatattgttaaagctgagaaagagatgttggaggcagggcaaattatccacatctctctggaagaaaatagacagcaaaacttaatcagatgaaagaaaaaaatattataaatgtcttcttgctaagctattgaaatatataatcatttctatttactgcaacattgctacatcactgatttctactggacagtgagctccactctcctccactgcagattaaatgggagggtttcagtacatccgcagaacaagctgcaccactcgcaaggtaaaaagcact

SEQ ID NO: 442331 - DNA, 812 bp, Homo Sapiens
  misc_feature (735)..(735): n is a, c, g, or t
aattatcagctaaaagtaggtagatgcagctcatgctgaatcatcagcaaatactacgtgctttgggctatagcagggcaccaatcaaagcaagaaccaaggatgcagtgccacgccatctctgaaaactgtttagttcccaaaggttgtttggtcctgacatacaggcaattaatccttcctttctcctgctttccttctttccttcttaacttttagctatgagaacagtgggcaataatgcttttatactagtctttctagtttataggatagtgttgttgttgttttaacatgtataacctgcatattttcaaccttcaaaaaataaaactgccaaaatcaactgtaactaaaggccatttttatttttggtctgttatctgctgtaggcagagcttcatataggaatttttattgcgaatttctatgactgcatccctaacaagctcaatgaacatctgtggccaaagcttctgcaaagcctcatttttcatgttgatttctgtggcttccttcacaaggtcttctatatatgttttacagaatttcttcttttcctttatttcctctagcttttcattataaaagtctcttgtagtataatttaatgtagcacgatttgtgttttctcctacaagtcttttgctgtcattattttcttcgttggataataccagggtttttttcctttgggattctaggtagataccgaaattgctttttcccggggantcacccggaatgggaaatcaggacggatactgggggtaactcaggaggatggctacaagttgccaggggttcccaaa

SEQ ID NO: 442332 - DNA, 678 bp, Homo Sapiens
aggttcactgtcattcaccatattatttgccacaacattccctgttaaatcattactggactgtgaagaattacttaatgttaagtgctctgaaggctcccaatcatcaaaatcatcttctttctcttcactttcctggaataaaatttcagaaatggaagattcaaatcccataggtttgtaagtcttcaaatcaaatgaccggggctgtgaatgtttcctaaaattctcttttgggacatgggttggattttttacagtgttttcttgccctgaactatgctgcctagtttctgattctttgatccttggtaaaggcagctggaaacttgtgaaataagtcccactttcagtcccattgggattaggtatggaattttctattttacaaggaggaggaggctgaactatattacactgttctagggaagtggttttggaactatgattacatttcaaagttcccctgtagagcagagtatctgcatcaaatactgagctgctttctattgaccctttttgagctccatccctttcacttgaattacagccatcagtgttctggatgggtgcactactgtcacccggggaatggctgtgttctgtgcgctctgattcacagcttctattttcttctttctttatacagggatctgcttcagaagggggttcctcctt

SEQ ID NO: 442333 - DNA, 1110 bp, Homo Sapiens
  misc_feature (289)..(307): n is a, c, g, or t
  misc_feature (360)..(371): n is a, c, g, or t
  misc_feature (437)..(437): n is a, c, g, or t
cccccccgtttgaagagagcacgccccgggaatgggcggccctgcgggggaggctcgccgtttagggggaagttttgtttcacaaagagaccggcttggggtgtggcgccccccccggggtggggctgttttattatgaattaggggcggggcaactattgcacaggggccccgcgtaagggttccgaggtgccccccagggtatttctcctgttggggagaaaagcccgcgctgttgagcgggccccacggtgttcgcccgtcttcgtccggtttatccgggggggannnnnnnnnnnnnnnnnnnaaaaagtggaggaagagggtgtttctccagagaaaaaagggcgttttgtttannnnnnnnnnnncccgagagaggacgcggtgtccccggagagacaaaggggaggagcgggtggggggatcagttgtgntccgcgcgtgcgatggcttgggtctgtgtttaagggaggggaaaagggaaccccccagtaaagtggggattttttattttccaggaggaaaggggttggaggatttaccacacaggggttggggatttatttcccattcaagggtttttttccttaaatagttttttcaataaatggcgaaatggtaatgaaaaaatgtggccccagagatttcattaatgcacatttttagggaggaagacacaaaaatagtccctttcagtttgtggactaaagccatagaggtggagggtggccctaccatgatcgtggctgtggcggtggcatattctccacctccccaacactctccaatattgggacatcgagcttcctcacatacctttctcctttctggcgttttaggtttcctttatattcatcccaggtgctcctgtctgcaagatcaccagatacaaaatcttgaaggtctggtccattctgtaggagttccttttttttatctggcaaggagcttaacggtctgactgggctgcaaaaatatctcccaaatacccggggccccagggtgcgggctgcatccccgcagcgtagagacatttcctctttaggactagcgcagtgcaggggttgagggatcgctaactcccgggaaaggacaggtcgaaattac

SEQ ID NO: 442334 - DNA, 906 bp, Homo Sapiens
  misc_feature (797)..(797): n is a, c, g, or t
  misc_feature (881)..(881): n is a, c, g, or t
gtggttatgattctgctaatgataatgtttgtctcttgcttatggatagccttagcctggtggagatgacaatattctctggcctatgcaagaaaagaggagggaatcccacttaacgaaaacttaagtcattctcaaatttattcaaatcatacttgaaaaggcggaatgaaatttagggggatatgttttaactatataagcctttgctaataaaagattaagaagtatgtggcttagcatcttttaattatttttttctagcaacttgaatatacaatgtttgaaaactctggttggatcaacattattttgctcagaggtttgtggactttgcatactgattctttcctgtttccaagtacatttgcttttaggctatttttattcactttaaaggaattttaataactttctgttgacagcatggacagctggtcttgagaattaaagaaaattcacttgctgactgaggaaggaagtgacatcaatgagcttctaaagtcagcccagcgggggaaattggctggtgagagagtagcctttcattgcactgtatttatcgagcgatgccttgagatgcaaattgctgtatcaatcaaacctgtggtgcctacctccaaccaacccagtgcaaactgaaggaacaatgccctgaaacactgagaataaaaaggatgaggggtgcaggagcccagaggctaagtgaattacggagctcagaatgctctctcaccaagcctatacttcattctctgtcaaacctcagtttctttgtctagtgcttaaagggacangtacctatatagatagtgtagacatgctatcttaatacgtttgtccccaagagagcttataattgctttttaatccctactganagcttattagaaattggatttttag

SEQ ID NO: 442335 - DNA, 511 bp, Homo Sapiens
  misc_feature (244)..(244): n is a, c, g, or t
  misc_feature (411)..(411): n is a, c, g, or t
tgcagtgtagttataaacaatgaatacagggttttaaaacaaaggatcaaggtagtagctaagtatgacagctaaaaattcctatttctaaatagctctcagtaggggataaaaagcaattgatagctctctttgggacaaacgtactgagatagcatgtctacactatctatattagtacctggtcctcttagccatctgtcaaagaaacagactgacttcaaccaacagtttccataaaacntctttttctaggccaaagaaactgagggtttgacagagaatgaagtataggcttggtgagagagcattctgagctcccgtaattcacttagcctctgggggtcctgcacccctcatccttttttattcctccagtgttttcaggggcattggttcccttccagtttngcactgggggttgggttggagggtagggcaccacaggtttgaattgatacaggcaatttggcatctcaagggcatcgctccgataaatacagtgcaatgg

SEQ ID NO: 442336 - DNA, 984 bp, Homo Sapiens
  misc_feature (224)..(457): n is a, c, g, or t
gaaatggccccttttggggcccaaagcggagggggtttccgccaatttgtgtggggactgcccagtgtgtgcttttgaaaccccccggggggggctggggaaaacttcgcccttgggaaggggggtttcaagcgccaccggccgccaagggaaggctatgaccttcgttcatgttttagaataggttagagcaagacccaagcggtggtggctcacgcctggannnnnnnnnnnnnnnnnnnnnnnnnnnnnnnnnnnnnnnnnnnnnnnnnnnnnnnnnnnnnnnnnnnnnnnnnnnnnnnnnnnnnnnnnnnnnnnnnnnnnnnnnnnnnnnnnnnnnnnnnnnnnnnnnnnnnnnnnnnnnnnnnnnnnnnnnnnnnnnnnnnnnnnnnnnnnnnnnnnnnnnnnnnnnnnnnnnnnnnnnnnnnnnnnnnnnnnnnnnnnnnnnnnnnnnnnntggcagagctagacttggtccgttatctaggaagtgttaacagctctttctgtgacagtttgggggccctgaaaagggccttttggagtctgtagagaagctgtggggacagctcaaccgccgaaaccataaagggtgcgaccctggcgtttcagcgcgtacaccacatccatggccgtgacggtcttgcgcttggcgtgctccgtgtaagtcaccgcgtcacggatcacgttctccaggaagactttgaggactccccgggtctcctcgtagatgagaccagaaatgcgcttgacgcccccacgtcgggcgagacggcgaatcgccggctttgtaatgccttggatattgtcccgcagcaccttccggtggcgcttggcgcctcccttacccagccccttgccacctttacctcgcccagacattctgaaatcacagcgcctactcagcagaaaatcgggctgcccactgtgattgccagtcgcagaccagggcttatagtctctcgatcgcaggaattccggacc

SEQ ID NO: 442337 - DNA, 836 bp, Homo Sapiens
  misc_feature (175)..(342): n is a, c, g, or t
  misc_feature (344)..(406): n is a, c, g, or t
  misc_feature (801)..(801): n is a, c, g, or t
ggaagaacaagttctttaattataggctgtggtttaaaatacaagacagttgaaggccaggactaagatagatgggaaaggctattttgtcagggaagcctcaaaaatgctgtattttggggaaaaaaaatggaactctgattttcatttgattctcataaaacaaactttcttnnnnnnnnnnnnnnnnnnnnnnnnnnnnnnnnnnnnnnnnnnnnnnnnnnnnnnnnnnnnnnnnnnnnnnnnnnnnnnnnnnnnnnnnnnnnnnnnnnnnnnnnnnnnnnnnnnnnnnnnnnnnnnnnnnnnnnnnnnnnnnnnnnnnnnnnnnnnnnnnnnnnnnnngnnnnnnnnnnnnnnnnnnnnnnnnnnnnnnnnnnnnnnnnnnnnnnnnnnnnnnnnnnnnnnnaatggctgtaccctatattcttcttgatttctagccttttattggctctcagattgccagagttgggactcaatagtaagtaaccattttgttgaggtggtagtgattctaccagggtgagttatcatgacagcagaatcactgcgtttttctctctactctgtggcatagactctatgccatagagtgacgtgtgaaaggcttgaggctccctacctacgagacaccctggtccattctagcagtatggcacgtgctgactggggttttgagtctccttgctgtataatcacattactgcacttccctgcattttctcatccagggtatctagcacggtcccccacatggcacattcagtgttagccacacttccatactaactgccctgcggngatatttaatgagctcttaaatggcagaaatgttg

SEQ ID NO: 442338 - DNA, 167 bp, Homo Sapiens
ttttttatcactggctcattcttcaagtacatctctggactatgaattgtaacttaactacttttccaagaagtcttggaagtgagataattctgtaagtactctttaagcagtggtcaaaagtttaaaaggttgtgttttctcattaaatcagttagtaaaacttt

SEQ ID NO: 442339 - DNA, 543 bp, Homo Sapiens
tttttaactgtacttcaaatattgaatttttattcaaaattctttataactttattacaatatagattttgtgttggatagttttgcccactgtaggctaatgtaagtgttctgagcatgtttaaggcaggctaggctaagctatgatgtttggtaggttaggtatattaaatacatttttgacttatgatcatattttcaacttatgatcatattttcaacttatgatgggtttatcaggatgcaaacccatcacataaatggaggggtgtctataaaacattgttagacctataattttgctgttgattattgggaggtggtatggcacagtggttaggggcagaggccttggagttggactacatgggttcaaatcccagcttggctgttttctgtgcagttctaatccagttctgccacaaacttgttgagtggccttaggtgagtcacataagcactctagatatagcttccttattgcaaaatgtctcaagctaagtttagtattctccctccaccccgaccctgcttctgttcctc

SEQ ID NO: 442340 - DNA, 1938 bp, Homo Sapiens
ccaggggaatttttcagggggtttttcaacaataggttctctttttaaaaggggttaaaaaaattttatgcattactaggaaattgacctggatggtaaacagatcccatgtgtgacaaaataatgtagtgcagtcctatctgaatataatttctttttcactttgtctcattaatttatacctcaattaaaacattctatatgcaagtgacatatttctctaaaacattccgtatttcagatttccattcagactatcttcccctcctcccttttctcaaatcagaagtgattcttgtggcataccctttgctttttctctccgacaatgaaactttttttcaactcaaagtattatagtaatgcaaatacaaaatgtagcatatattaatatattagaaaaaggatagtaaatacatatggatccatgccaaattagaaaattgaaagcaaaaacaaacaaaaccatgctatgctcatctattctgaaccaccatgggaagaccctgatagagctggctcacataaactaatgttcccagacagagctaggatcctgtattccaacataattaaatgctctgttaaaaatgtttccgtgttcttttctgtttgttcaaaatagtttaacagcaactgactactaatcctaatcctgaacatgataatgtaataacatatttttaatcaagccatagattctaacctattttctactattacccatttgcttaaaaacagactttcaggggtgtaagcaacagtaagttaaggagtttttagttctacctttctcttgattgattgattggggatttcagatgtgtcaattaattatcctctatttcagtggaaaaggattcttcaagctatcaagtcaaggaggctgactcaggggcgggcaggtgaagatacctatccacatactatgctcataacgctccatctcctctgtaagaatgtgctgctctccacccaacagtggcccagcacattccatccgctccacctagatgcaatcaggacaccatgcaatcccacacacaatcagaacatgggcaccaggtagaactaactcaaaacaacttttgggacaaatatgagatttcaatttgtcaattattccatagtgcagtattctcacaaaacagagattttgtgttgaaacatttgttttttcttctcacatcaagttgaattgctaaagtaatgtcagaaagaacatgaaaaataaacatgtcttctccaaaagaggcactgcatctggaagtagaagtaaggctaaataaatagtgctgttttgtggttcatacagtaacgcattaattatgatttcaaccaacagcttcactgtttgtcctgtatgcctgtttatgaagatgcgtctctatttcctccctgaagaccagcattcccaggtgggagtgagaggcctcattcatggctttagactggatgcacatgcggtactgctcgggggtcagctcatcagcacagcgcttttcatgccagaggtggaaaagaccaggaaccggagtccgaatcacaatgaggtcaccatgtaagtattttcgataaagatgaacatcttctccaccccaacctttcacttccatgtcaaatccaccaatggtcaggaaatctgaacgatactgacaagtcattccaaagccaaaatctcgccaaaagccagaatcctttttgtgaaccagctgctgctccacaggtggtggcacttcctggttggcataaacaatggcaggattgtaaagactgaacaccacagggtaaaacaccttcttacctggctcagcatttaaccggcagctgttaaggaattcggctgagaaatagatatcaacatcacagaaaaacatcaagacctctcccttgtcccaagctcgggcacccacatttagtcctcgtccacgattaaat

SEQ ID NO: 442341 - DNA, 531 bp, Homo Sapiens
cattatagcttttatttattatatcttcattcaatcatttattcacaattagtctaattgcattcttgatgaataactgacttcagcaaaggagtcaatccactaagcaaagttcatttatttttcatgatgttcttctttcgatcttgtgtctttactctcctggattcccaagagaactgcattagcctctagtacagttgtatctgttgttgctcccaggaacctagacgtaagttcaagatctaatagccgcaaccggaccctggttcctttctggtatttctctccatccacttctggtcttctacatacacaatgaaactttccaccaaaatctatgtacagatcattctccacaatatgaaagatccgtccaatgaccagtttatcctttgcaggtcccatctttgttataggataatgtctcatcatagatgcaaaggattccacattttttggagaacccttctgttggggctccaccttctgttgaagctccgagtgccgctccaacgcgctcaaaaaacc

SEQ ID NO: 442342 - DNA, 839 bp, Homo Sapiens; identical to SEQ ID NO: 123444

SEQ ID NO: 442343 - DNA, 1049 bp, Homo Sapiens
ctcctacccatccccctttctcttcaagcgtgagactcgtgatccttccgccgcttcccttcttcatgactcggaaaaaaaatccccgaggaaaatataatattcgaagtactcattttcaatcaagtattgcccccgtttcacgtgatacatatttttttaggattgccctctcttttctctcctcccaggaaagggaggggaaagaatcgtattttttcccaagtcctaaatcatctatatgttaaatatccgtgccgatctgtcttgaaggagaaatatatcgcttgtttgtttttatagtatacaaaaggagtgaaaagccaagaggacgaagtctttttctttttcttctgtgggagaacttaatgctgcatttatcgttaacctaacaccccaacataaagacaaaaggaagaaaaggaggaaggaaggaaaaggtgattcgcgaagagagtgatcatgtcagggcggcccagaaccacctcctttgcggagagctgcaagccggtgcagcagccttcagcttttggcagcatgaaagttagcagagacaaggacggcagcaaggtgacaacagtggtggcaactcctgggcagggtccagacaggccacaagaagtcagctatacagacactaaagtgattggaaatggatcatttggtgtggtatatcaagccaaactttgtgattcaggagaactggtcgccatcaagaaagtattgcaggacaagagatttaagaatcgagagctccagatcatgagaaagctagatcactgtaacatagtccgattgcgttatttcttctactccagtggtgagaagaaagatgaggtctatcttaatctggtgctggactatgttccggaaacagtatacagagttgccagacactatagtcgagccaaacagacgctccctgtgatttatgtcaagttgtatatgtatcagctgttccgaagtttagcctatatccattcctttggaatctgccatcgggatattaaaccgcagaacctcttgttggatcctgatactgctgtatt

SEQ ID NO: 442344 - DNA, 341 bp, Homo Sapiens
gatctgcctaattaggttgatttgagataacggatgtaaaacacctaataaaataagcatccagcaaatgacttgttcactctctgaatacagacttctggtcatgtagttcggtcacactcctgatagcttctagaacatcagggttttaggagaaataggttaaaatgaacatcaagagtagcagaagactactttccttaatatttgagtgccagctatatgccacacagttctagttgctggcagtcagcagtaaacaaaaacttcacctgatgcagcacattccaggtgggggaacaagtgaaaatatagggaatattagtgataagtgcagaggg

SEQ ID NO: 442345 - DNA, 1216 bp, Homo Sapiens
  misc_feature (1186)..(1186): n is a, c, g, or t
gagatttctgaaactaatttgttaaacttttatgctgtagtctcattagaatcattttaaaagcactgttcttgcatttttcctagactacagagagtgttctttgtcattttttttcctattctgttgtgaagtttattgtttcagttatttgagggaaataacctcttaatatgtttattttcctgaactaaagttttcatgtagagaatacaattaaatgttttgtgttatgacccaaactggctggaagtagagttcagagagggagaagggacaagaatcagtgtgggcatctcaggaaagtggcgccagtgctgggctccagccttctccactggcatgatgggtcctcagattctcctctggataatgagggtgttgggcactgtgagctctgactcctggggaggataggccatcatggactccatacacaattttgatgggtatcagttctcattaaatacctgctacaatttatttattttgtagttgtttagaaaactgtgagcagtttggcattagtaaattgtagttatatcttaacgatcttgggaatcattgaaatatgagtttttttccctcactcctatttatttaattaaaaaattagggaagttgttcattcacagctgtatattaatataaaatctctttataaaatgattcagagaaaaggcagtagtggtcacttactgtgctaaaatacctttttctctaaaaatatttaagctttagggtttgtcatagttttactttttaaattatactttgtgtaacaatttacgttaactaggaaaaattagatatataataagttttgggtactaagaaacatttacattctacactcattagtcaaatgaacttttctttcccagtgctaacagattttgtttcatgtgaagaaaaataaaatacaaatgaaataaaagtctagaaacagcaacaggaaactcaccacagaaataaagacataacccttgataagtttgtgtaagtgccagaattattggaagcaggtgacgaatgattaagaaaagctttattgtggggacatgctttaagaatcagctctgtatttgtgccaaggagatcaggtattggtgtgcaaacagatcccattaatactctgatttgaaccatgaattccacctactctgcgttgaagccctccagtagnctgataggtgtaatcaaatgatcagctacc

SEQ ID NO: 442346 - DNA, 1116 bp, Homo Sapiens
  misc_feature (653)..(653): n is a, c, g, or t
  misc_feature (664)..(664): n is a, c, g, or t
  misc_feature (670)..(670): n is a, c, g, or t
aaaaaaggcaagttcccccttttataaggtttggaaaaatttaggcccggcaaaatgcctctcccctttttgcccctttgggaaatttaaccagggtataggttcatttaaaagcctggttttaaaaagtaaagggggcggctttttcctaaaagatcatcccttagggggtcataagcccaggtggttccccacagcagtgctgggggcaagtcctttggttttgaaggattccaagatggtactgttaggtagcgcaactagcaagattgcccattcgatcatattatttcatgttttgccccactgataataatccttttaatgatggatagggcatttaataagagaatgtcaattaaaataaaagttacttccatgactagggcttcaagagactattttaaatttacccctgaagcatactgttcaacacataacgcctttcaaagctagaattttatttataataaagcatgcattacttgatgaagttggcacttcaaacactgactatgtcccatgctaaattcggaaactgtaatgttattttagtttataggaagagtaagataaacatacgtacctttgcacagatttacacagttacttagttcaacagtgcaaaacactttgcaactacttcacttttnttacgtgtttnttcatnttctatgttacaactaaattacaggatacccaaagtaactttaaatctaaaagtaagccaatcagcagccaaattatatattggttttgtcttccagttttggctacaagtgtactgtaacacaaaatcaaaaatgatatccttgaggtatctctagatctgttgttgttttttaacgtcaaaatggagagcaaaggctgacatctgatgagtattagtaaattaggatatagagtttatatataaacatcaaaaataacatttatacatttattcttcaggagaggaaatgctaggtttcccaccagttgtcattaattctagctttggtaggtttcctggggctttgaccagataagtaagttaaataaataagtgcactcccctcagtagtaaatttacgcaatttttacattctgaattttaaaatttgtttaagagaactc

SEQ ID NO: 442347 - DNA, 1306 bp, Homo Sapiens
  misc_feature (48)..(68): n is a, c, g, or t
  misc_feature (71)..(71): n is a, c, g, or t
  misc_feature (120)..(120): n is a, c, g, or t
agggcagtgttgagtcccctgtaatagtaaacattttccatttctttnnnnnnnnnnnnnnnnnnnnngtnctacaattttgtagtacagtgcagcataatccttaaatataaaaatatnttctcttctgttgggataatagaccttgcatcctggaaagaagtaacaatactgctactgatagaagatctgtttatatctttcaagtcatgtaaggcaattactgtgttggtttatgatatatggctaaaagaaaagtccagaaagacgaagtatcagtttttgttatgttttccgactactccaggtatgctccggtgtacttttgtgttcaactgaatgttcaaatggagatctggagccataaggagatctctgatctagtggtgacctagggccactgctggaagctctgtggtccatttgccagtctgagtgatacctataatccctggaagatttatggtgcgtatattcagaacttgaccggtggtctgaatgtaaccgatgatctgagtgagaacgatgatcagaatgagatctatcttttaaacttccttccaaatttgacctgtgatctctactcctgtgatcatccagttttctgtgtttctctctgtcactgtaatatctgctgtcttgcttgtagtgatcccaatcacgatggtctttaccattactaaaagaagaatagggtcttttcctggaatcactttttttgtaagaatctccctgatgtcggtctttatgatgatcatggtactgagttaagtgtctatcagaggaataactgtccctgctgctatcatcgtgatttgtattctcttttaatctttccacatctggatttctaatcacgtgaggattcaagttgctgttttgatcactgttttgctgagactcctgccgttttttaatagcatgcttatataatttatgtaattttcttgcatcaaattcagtaaacttagatcaaaaatccacaggttttttctccattgcttaatttgttcaggatttgtatactcttttagacattctgtgatatggtctccaatttttattaaacattgtctagtatgctctagttgttctctttctgaaaggcctttctcaggcctatcaagttgtttcaaagctgctttaacaggcctcattctttctttacaaatgctgaatgtcttctgatccagctcttcagattcttcagaaatgggaactggttcaccacttgccgtgatatgaactggagcatctgacactgaagatttcttggatctttccctaccatcagacttggattcac

SEQ ID NO: 442348 - DNA, 965 bp, Homo Sapiens
ctggagtactagatacttaggtacttaagaaatagcctttaatcccaaggccttacttaaaacttaagtttaaacacaatctctgatgtgatgagtggaaataattcttttgtgttaaaacatacagacaaaacaaagctatatggccagaataataaccgttattgtatcttgtggaacaaaaaagggcatggtgattgctctgttcctcagggaaacacattgaatgtcttgttttcagacaccacatctgatgcatatacagatgtatgattggagtagattatttctaatgccccttaagctctactactcagattctttccttctccagagtaatggtaatggattttaagctgtgaaaaagcagttaagtactgccttcacccgctaagtaaaggcctattctaggctacttaccttgcacccattatggaggtgttaaaaccaaaaatgttgtggaattcaatttccttggagtctcatataactttatggagatggttgagtatttcttcttggaaagaaggaggagaatcatcacttgattgtgattaattacaacataggaaacaagaaacaatagttttatcctaacctgtccttacgaacattagtaactgtgctgttcattatttttagtaacagcacataggtaatacaggtgttatatcatgttttccttcacactggaagataataacacattcttcttatggatgaaaatgactgaagaatcaagaattactagcaactcttcttccagtagcttataaaactgcctttttcaagacagatgcaattttacttaatatctctgaagcttacttgtatcatctatgaatttaaggagatgagaattaatactaaatgattttttacgtccccttcactttatgaagtactcctgcagtagaagttcatggccttgaaaaagcgtactcacttgataaacctgagtaacg

SEQ ID NO: 442349 - DNA, 930 bp, Homo Sapiens
  misc_feature (62)..(62): n is a, c, g, or t
  misc_feature (75)..(118): n is a, c, g, or t
  misc_feature (605)..(623): n is a, c, g, or t
agatcattttacttcttcctttccaatttagatatcttaaatttctttttcttgtctaatgnctctctcttgatnnnnnnnnnnnnnnnnnnnnnnnnnnnnnnnnnnnnnnnnnnnnataactgatttttaaatgtaccaacatctgaaaaggacacctcaccaaagaagatatacatatggaaaataggcatatgaaaagaagctcaaggtgatatgagttgtcttccaaaaggtaatgaaaaatgcatattatgaaacaattatggagtccaaattttttataccaaaataagctcatactaacttgttataacatgcctgaacaggatgtagtttgaggcactaaaaaggtaagacgtaagtttgaaaagagcacctgtcagagcaacataaattctactaaaattgaagcaaaaccaaacatcaaatttagtgtgaagcttgggtggaagaatggtaaaatcattgatgctttatgagaagtttatggggatgattctccaaaagaaatcagcagtttgcaaacagataactcattttaagaagggatgagatgatgctgaagatgaagcacatagcagcaagccttccacatcgtttgnnnnnnnnnnnnnnnnnnnttatgtccatgccttaattgaagaagaacaagaattaacagcacaaacaatagtcaacaccatagatatctaaattggcttagcttacactattctgactgaaaaattaaagttgagcaaactttccactcaatgggtaccaaaactgttgtgcccagatcagctgcagacaagagctgagctttcaatggaaattttaacaagtaggatcaagatcctgtagcaatttcttgaagaattttaacaggagacaaaacatggctttaccagtatgatcctaaagataaagcacaatcaaactgcagcc

SEQ ID NO: 442350 - DNA, 827 bp, Homo Sapiens
catttgcccttttacgcaaagcctgttaaaaagctttttcaaacttccaaatttgattgagtcactctaaaaaggtgaatggggccttaacctgtgcatggttgggtctggtacggtctctctcccttcagttcagaccatcctttcagtgctccagccaagctagccttgcattcctccagttagaaggagccccggggcctttgcacaattcctccctttccctggaatgctcttccccaattgtcttagcttgatggctcacccttcaggtctaggctcaaatgtcagtccttcagggaagtattttctgatccttcaaagaggtcaggtcctggtgacctccttcagagcacctgtcaccacatcactggtgcatgtctgcctccttcccaactactgtttcaagagaggccccttccctgttgttgtctcagaccccttctttccttcaaagcacttatcacaatttgtaactgctttatttctttgttttcttcttagctgtctccccaattctctttgtataatttctatgaagagataagctgaggtctgtcctgctgtattcccaggacccagcactgaacctaggaacagagcagagattctcaaaaagtatctcctgaataaaaagtgtttgtggtggtggcacctctagcagtcaggaactccctctttgcctctgagttttgatcctcaggcagtatttatgctggttaatgagtaattcttctctgggtttatggttcagagtagaataggagacctcaggcagcctggcaacctctggcctcgtgggaaatgctgagagtctccgtcgaact

SEQ ID NO: 442351 - DNA, 610 bp, Homo Sapiens
ggtaaggaatcgactttattcacaggaacactgcagtaagggaggaggtgttgtaattgggagaatactccagccataagatctgcaagcatagcaaaggtcaggcataaaggaattttcttttatagggaagagtaaccaggcaagaaagaactagattcaggggagtgggatgagactgttttggatctgttgaccctgatatgtctgtcaaaatgtctgtgagtctagctgatgttcatgacgtctgaaagaaggccacattttggtctctgaagccccttcctaagattgggagcaaagtacctgacttagtgtttgggtccaggaggatggtggggggctccctgggcatgcctctgttctactgtggaagaggagatgccatgggaaagtaacagcacctagggtcctgttcaacatggacattaaggaaaggtctgcctgaaaaccccttctgcagtagctggcttccattgggtttgtggaagaactgagattttttccaaattcccaaaagaggagaagtaaaggtagttctaagtagtttattttgtgggctgtgagccaagtctaatcttgtggctttttttccttgtcgcacactcgc

SEQ ID NO: 442352 - DNA, 706 bp, Homo Sapiens
gttttcgacatttttgtcgcctttattaaaatttctcagcagttaaacaggccgctgatagacataaaggaattatttatatagcagattgcccaactcttgcattgtatcctaacctaggaccatgctgtgtccccatggctttcaagctgaagaaatgaaggtctaaagtgtgtcagacgtacctaaagaagagttcaaaagtgtagctgccatcctttccttagctatcagaggaagcagtcactccagaatgagacatacacaagcccaggttcatagactcaccctccataagctgtgttgctagattgaagtttttaatcaccagtgaagaattgattgtcataattttaggagactactgaagtttgccttgtttctttccctaggaaaggaataatgctgacagcatgtctgcacattccatgctctgtgaacgaatcgccatagccaaggaactgatcaagagagcagaatcactttctagatcaagaaaaggtggcatagaaggtggtgcaaagctgtgcagcacatttgaggcagaattaaaattcttgcagaaagtagaagctgggaaagtagctattaaagagtctcatttacagagcactaacctaacacacctgagagcccatgtggatcagcagaaaaccggaagagtttgtagtgtcctcatgtctttgctatacaaataccttatgag

SEQ ID NO: 442353 - DNA, 447 bp, Homo Sapiens
acgacacatatgctggacttgagagaacaaacccagaatatgaaaatgaggtggaagcttctatggatatggatcttttggaatcctcaaatataagtgaaggggaaatagaaaggcttattaacctcctagaagaagtttttcatttaatggaaactgcccctcatacaatgatccaacaacctgttaagtctttcccaacgatggcacgaattactggacctccagagagggatgatccgtaccctgttctctttagatatcttcacagtcatcacttcttggagttggttaccttgcttctgtcaattccagtaacaagtgctcaccctggtgtgctgcaagccacgtcggaatatgaagcaacaaatttattgatccgagctctgtgtcacttttatgatcaagatgaggaggaaggtctccaatctgatggtgttattgatg

SEQ ID NO: 442354 - DNA, 708 bp, Homo Sapiens
  misc_feature (109)..(109): n is a, c, g, or t
  misc_feature (112)..(112): n is a, c, g, or t
cctggtgcagccagatgttctaacttttgaacaaatgagcgtggtcagtaatgtacaataactcttgagtctgttactttggcctagctaagcccatctggccctcggnatncctgcaagatgacagacagaagagcaagggcactatcagaaatcggaacaggctgccccctactcctcccagcctctaccagtacacagagacagactggagatagagcattcgcagccagttggatcttggttcttttgtcttctgaaaataaaaataagtgcttgtcttgtctttggaggtcaaagagaaccgcactaatttatttcctcgagggggcttttctggaggagaggatcctcagtcctgtgccaaggtttcacgctgtttggccacacgccaggcctttcttctggatctggtctgcacgtccagagatgatggaggaattgcatcagcatcatatgcacagtgaaagggtggctcttgtccagagaggcccattccgggcctggctacatggcctcagggcctggcggcagtttgaagagtctggctgcagataggagctttcttatgtgtctctcctctgtgatgccggcctcctgaaggcaagtgtgagacagagaaggcacttggctcagtgtgctgaagcccgcggtggagagggtgccggcgtacatgggcagaccgatggaaatgagccaatctgacac

SEQ ID NO: 442355 - DNA, 988 bp, Homo Sapiens
  misc_feature (130)..(138): n is a, c, g, or t
  misc_feature (193)..(303): n is a, c, g, or t
  misc_feature (345)..(366): n is a, c, g, or t
  misc_feature (701)..(701): n is a, c, g, or t
  misc_feature (784)..(804): n is a, c, g, or t
acagaagagggggtttcttttcaaaagaatcccccgcgtggggtttttttcccccgcccgcgggtttttaaaaaaagggggcccgggccctgttttttaataggcccccccttaggggccccttttttcnnnnnnnnnggggtaacgttaaatttggccccccacggggaatttttaggggggcccccccccnnnnnnnnnnnnnnnnnnnnnnnnnnnnnnnnnnnnnnnnnnnnnnnnnnnnnnnnnnnnnnnnnnnnnnnnnnnnnnnnnnnnnnnnnnnnnnnnnnnnnnnnnnnnnnnaacagtcaataaatacatgtttattgattaaactgaattatnnnnnnnnnnnnnnnnnnnnnntttccttctactactaagccatgcaggcagagtccacaaagacaacttcctggccaaaacccagctgatccactgttggtataatcttaaaaaaaattacccatcaagaaagtcaatcgtgtgcagaagacaggaaccccagctctgctaaggctgtggctgctgcagagactaccaaagagtaggattaggttgtagatagacgtgaccaaccatagttcttgaactttctcaaaggcaaaggctgacttcaaagtccattgtctgtcaataaaatggcatcaggcaaaaagctggggaagagaagcccagatggatccttggttgttttcagnatgtcaaaggttcacaaagctggccaagctgtttctggaagggacttttccagttcactatattatagtgtgctgggggatgnnnnnnnnnnnnnnnnnnnnngcagggtggggtgggagaaatgggtggtaacaaatgtcacacctgtaccaccaggcccatcacatcttgagcattccccagtctgtgaaagcctattaaacagggtcacctagaaaacattttaagacgaaccacttacaagcttgtgcagtttggcttcttggcttacaggagggggaacatg

SEQ ID NO: 442356 - DNA, 610 bp, Homo Sapiens
ttataataattgccattgaaggctaggactggtttgtttgccacacccaagttaacccctaatgtattttgatttttctttttaaaaatatagattgcaattcagtcatatcaaaatgaagcttagaccaaatactgaactagcataagcagacccagtgttaggacatcaatattaccaggactctaaacgggcagtttgctgtacatctttagttaataaacaagcaaccatccataccacgtaattcacacttgcatatgcatgtacactttcatgatgtgaagcctttaagaccaaaatctctcttaaacattcagcttgaataataaagacatgttgcctagagatagaaaattcattattttaaaaaatataaccttaaaacttgattttttatgattttattttaagcataaagtggactactaatattgacatcaattataaatgatattgtggtacccttgtttaacttttgcaatatttaccatttaaaaatctcaataattgacagctactgtggctctttgggggtcaagatgaccacactttcataaagttgtttgcatttctcagaacacacagtcattatgctgatggaaatggt

SEQ ID NO: 442357 - DNA, 650 bp, Homo Sapiens
tcccacgagaaggccatcactttccacacattaagtggtggccatctttattagagatgtttaacattcaatagatatccaaggtgacaaaagttaggtcatggtttatgtgttagcatttgcagaaacagtaacaaaaagtagtaaaaagttaaaataacctcgacacacagccgcttttgccatcagccttcctaccgttcttcctccacctctggtttggtgtctgtcctcaaggacagcataagaggggctgtctgtgcagccaaccagcccctgaaataccaggagcctggtcctagaagaggacttggaaacaaacccgtgggcaaattatcttaaccagtaacaagtggaatgatcagtaagaactcgttaaacctccctaaatgcagtcactttcaatgtgtctgagtctcacctctggatgttctcagcttgcaacctttcttggagaatgagccggttcacaaccacagtctgggaatttcatagtctcctctttgaataacaccacaatccttaaatctcatacccatctaccactcaccgaaccgttctgtttatacactttttaattggctgtaccgtacttcataacccccaggattacacatgacttgtgaccaaacaccatttttttcactttg

SEQ ID NO: 442358 - DNA, 894 bp, Homo Sapiens
  misc_feature (702)..(702): n is a, c, g, or t
  misc_feature (751)..(751): n is a, c, g, or t
ctcatcttcgcccagccaaccccgcctggagccctatggccaactgcgagttcagcccggtgtccggggacaaaccctgctgccggctctctaggagagcccaactctgtcttggcgtcagtatcctggtcctgatcctcgtcgtggtgctcgcggtggtcgtcccgaggtggcgccacagtggagcggtccgggcaccaccaagcgctttcccgagaccgtcctggcgcgatgcgtcaagtacactgaaattcatcctgagatgagacatgtagactgccaaagtgtatgggatgctttcaagggtgcatttatttcaaaacatccttgcaacattactgaagaagactatcagccactaatgaagttgggaactcagaccgtaccttgcaacaagattcttctttggagcagaataaaagatctggcccatcagttcacacaggtccagcgggacatgttcaccctggaggacacgctgctaggctaccttgctgatgacctcacatggtgtggtgaattcaacacttccaaaataaactatcaatcttgcccagactggagaaaggactgcagcaacaaccctgtttcagtattctggaaaacggtttcccgcaggtttgcagaagctgcctgtgatgtggtccatgtgatgctcaatggatcccgcagtaaaatctttgacatatacagcactcttgngagtgtggaagttcataatttgcaaccagagaaagttcatacactatangcctgggtgatacatggtggaagagaagattcatatacttatgccaagatccgatcataaagaacttgaatcgatataagcaaaaggattattaatttttcgttcagactatctacataccttacaagtttcttcatgtttta

SEQ ID NO: 442359 - DNA, 869 bp, Homo Sapiens
gctgggttggggctgaggaaggcctatgcgcggagggtgcggccttcggctgaggcagaggaccagggttgggtccgtggcggcgggaggggtggcctcctgcgctggtcgcccaggggacctgagaggcgcgacaaacagtcggcgcgtttggtactcgcgcctgcagagctttcaacctccgcgccggctgcgcctgtttctcggccaggggagcaaggccacgcggctatcgcagccgagtcggaaccaaccggttgtttggtgaaacctaccccagagcctcccgcggcccacagatgcacagtcctccttacagcctagaaaaaatgacagatctcgtagctgtttgggatgttgctttaagtgacggagtccacaagatcgaatttgaacatgggactacatcaggcaaacgagtagtatatgtagatggaaaggaagagataagaaaagagtggatgttcaaattagtgggcaaagaaacattctatgttggagctgcaaagacaaaagcgaccataaatatagacgctatcagtggttttgcttatgaatatactctggaaattaatgggaaaagtctcaagaagtatatggaggacagatcaaaaaccaccaatacttgggtacttacaccatggcctggtgagaactctgagcacctcgtcttggcaacagacgcctggctcatgcgcaccgtactggtgcacatggcgtaccacaacttgggagaacaccgtggtgcacgccaggtcacactgcccgcgcactgcaaactccaccacgagtatccgcgcaccccattgaaccgctcacataaccaggctggccccccgctgcgcaaccggcaacacacgggactcctc

SEQ ID NO: 442360 - DNA, 443 bp, Homo Sapiens
atgacttccccttggaccatttatttcattgttctttagtcgagctcttccctaaacatctttagatctccaccacaggctcttttccagaaatttgaaactgtgttcttcttgccatcttcacgacatcccctgccctcttacataagatatttcaacatcaaggtggaagcaggaacttagctgagttttgcaacagagaagcgtattctaggcctacatttatagaaagtgggggtggggaagagccatgagtccacgggggtatatccacaccgagggttgtcacactgggtgggcaagtgagatgggaacgggtgtgtgagtcctgggaacttcagaaacatcagaaattaccgacatcattggggaaagccttagaaaaatctataaagacacactgtctgcacatgggaggcgctcacttccccctaatgtagact

SEQ ID NO: 442361 - DNA, 953 bp, Homo Sapiens
  misc_feature (195)..(195): n is a, c, g, or t
  misc_feature (423)..(482): n is a, c, g, or t
  misc_feature (616)..(726): n is a, c, g, or t
attttttaccaagggttacccatgggaaggcccatgaggaaggatttttcttaccacaagtttttcttggtggaatgggtaaaaaccaaaataaacccccccaccaggtgggggagtttgtgaggaaaaaagaaagcccaagtttcttgaaggtattttaccagaccatttaaaaatagaaacttttatacttcncagaaataataatccatagagcaaatttggttaaattatctaggaaaactatagaatctgacaatgtacaaatacaagaaaacattttctcatttagaaggtaagacagagaaatcacaccagaaataaaatagggacgatgacaaccacaatatgtaaaagcaaagaaggtttcctccttgcctcttacggataaagtatttatataaataaggacacaacccaacnnnnnnnnnnnnnnnnnnnnnnnnnnnnnnnnnnnnnnnnnnnnnnnnnnnnnnnnnnnnttgattctcaatcattagcagtgtcctttaaaaaattaaaatttagctttctattataaataccaaagcagatgtgtccctctgtgtaggtgaaattcttgcacctttctcaataaatgcatcaatgtaattcnnnnnnnnnnnnnnnnnnnnnnnnnnnnnnnnnnnnnnnnnnnnnnnnnnnnnnnnnnnnnnnnnnnnnnnnnnnnnnnnnnnnnnnnnnnnnnnnnnnnnnnnnnnnnnncaggccgtagttaccttgttaagcttcctaataaataatgccccctacagtagtacccccggggatgacaaaacctcacaggtttagccattccttggtttgaccctgtcgcagagtcagggaaagccctggctcctattgctcagaattctctaggctgtgtggtcacaccaagagaaaataatttgagtccaagatttggaaatgctggaaaggaccatagggac

SEQ ID NO: 442362 - DNA, 1757 bp, Homo Sapiens
  misc_feature (658)..(668): n is a, c, g, or t
  misc_feature (1703)..(1703): n is a, c, g, or t
atatgcattcgcgctcctattacagcgtctctgcctacgactctccccggctgctcggttccccactctcgcgcggctggccgatcgtggctcgcatgcgctctcgtcttgtcttccgctcgctcttttgggcccctctttttgtcatctgactctggtggtcacgcctatgttttggccccccccggggggtatctttatgtcgtgggtctcatgtgtttgtgcgttagttcttttttgtctttattttgtgatcgaaatgtaaggtttttttagttgtagaatggtccatcggtagtccagtacctgccaggtgacatattaatcagtttgagattttagagatcctttagcacttgaaaaagagtattacaaatgcatctatatcacatagaaagtcagcgaatacctactagacaagcaggacatagttctgtttctggcattccaggataataagaatatttatcaattaaaaggtccatatctgtcttcctgaaataactgccaaacctgagtcaacacacattcttttcggattggttctgactggcgtaagaagagaaatacagcattttgttttttattttgtttatctaatcacagggaaggataaaccaagggcaaaagtgagagaaaaagttagatgtccttgaannnnnnnnnnnagtggttgctactgcatttcatgtttcatttttgttagatcatatacattagaaaagaatgatacattttagagaagaaatatgtacatacatagtatcagaaataattttcttgtattgattcatttaatatggttgtgcttatattcaatcagaaggtcaactcctttgctctaaggttcttacactgctaacaagaaatggcttttttcctgttgcaggtcatgagcagcacacagtgtcctttctaggcacataggatcatcgatcactgtgtggacgcaggctaatcagaattgcacctgaaatcacttgtgcaattagtgatgcaagagtgatcacaggaatcaagactgggagccaagagaaagaacaagaggtgcacaaagaagcagttcagatgggagaccaggaaagctgaggggaaaactgggaaacagattctggaaaactcacagtttgtttgatacccagggttaagagatgggactttgataggagtggtgcttatgaattaagggaggaagaaagaggtgagatcctaatgttggtaaaggtacagagacaaagggagccaaccaagtggtaagaaaatagaaatggaaagtaacaatgagacttaattctttagtcagggaagccaagccaccaggaaaacttggtaagagtaagagaaagagggagaaaatatgagataatattttggtattttgatatactagagaacaaaatattattctatagtataaaaaggaacaaagtaaagcaatatgatctattggattcctattcacaatgaaaattatcaaacaataatttgtctctcaggcaatgctactagaagttacttatatagttgccttattgttcatttaatttcagtttaactgaagcgattttgcccttttccttccttctacgtggtcactctgctgttcaaagggtaagcaccatttgttcaggtaaagcaattggtgtttgaaatccttccgatagatacgccatctcagagggctgctaaaattatgtgtgtcntgtacagttagttatattagcagccctctgagatggcgtatctatctcagaggg

SEQ ID NO: 442363 - DNA, 741 bp, Homo Sapiens
ttccccagaaagtcacctgccaattttaaaataatcagataagggcaaaaatgtgcacacatctaataaaaatatttcaataaaagtgttgagaaaatatagctgttatttgtagtctagtggaaaagacatttagccttaaatatttccacagcatttgatatttcagaaacctgtagagcctcttcttttctttcacttttatcaaataatgccaaacaagcagatccaggaatctttaattttttcttctgacactgaaagaagaaactttcttacagagaatccatatttttggaactctgtgagacagtggttttattaatgtcaattaatcttgacagcttagtagatggtttatacagctattagaagatatactattgtcatttatgcataatgtaaatgctattattcatgttataattaacagagacacatgagaattttagacaaaataattattttaaataattaaattatttgaagtccatgaacaaggcaagcatgaagttcttttagaattcagtgactgggtaataactttcttttttgaaaaacagtgtgctttctcttttctcattatgaaagttagaaaactcactgtgcttctcttctgacttggccaccaggaagttccatgttgaactaggtcttattcacagtttaagtattccttcccatttgaaggcatattctcttcatcttttcatagctttttaatgcacggttgcttacttc

SEQ ID NO: 442364 - DNA, 681 bp, Homo Sapiens
  misc_feature (126)..(137): n is a, c, g, or t
  misc_feature (321)..(374): n is a, c, g, or t
  misc_feature (397)..(415): n is a, c, g, or t
atctccaccattatctcttcatttatttttttctgcctcatcttctgtcttcttttttggggtctccatgtaaacataagttagaatttttgctgctgtttgacatgtctcatgctctattcttannnnnnnnnnnncattttgtgcttcagtttggaaaatttctgttgacctgactcttgaggcgctgatcataaacaagataactgggaaaacaatatgtttgtaaaacaatttcttgagatgtgaaatagtatctatattataccaagagtagtcccagctacttgagaggctgaggtaggaggattgctttagctnnnnnnnnnnnnnnnnnnnnnnnnnnnnnnnnnnnnnnnnnnnnnnnnnnnnnntgacagagggtgacctcatctcnnnnnnnnnnnnnnnnnnngcgtattcttcaaccctggcattctatcctgcagaaataaaatgtcatcacataagcttatctgtgcacagacttcttttattgcagcatcggttatggtggtagaaaactggataccaagacaaagtctatcaaagggggatggctgaagaatcaagtggaattcctgctatggaatatcgtatagccattgaaggtagtaaatcagggttctaacagttggagagtttttccagaaggtattgtgtaagaaaagcaaagtgcag

SEQ ID NO: 442365 - DNA, 676 bp, Homo Sapiens
  misc_feature (560)..(560): n is a, c, g, or t
  misc_feature (565)..(565): n is a, c, g, or t
aaactgtttattgctcacattattcatactttattaatttattttttaattgacaagtagtaattgtgaacatctatggggtacagtgtcatgttttgttctatgtatacatggtataaagattaaatcaagtaatgttttgatctatgcatacattgtagaaagattaaatcaagctaattaacatatctatcacctcaccaacttaccttttgtgtgtgtgtgatgagaacattaaaaatccttttttaaagcagttttgaaatatgtaacacattattattaactctggtcactgtgcagtgcgataggtcactaaaacgtattcctcccgcctgagactttgtggcctttgaccaacaccttgtccctgtccccacagcccctgctataaccacctttttactctgtttctatgagatccacttttttagattctatatataagtgagatgatgtatttttatattctgcctcattcagtagaccatttgaggcttgtgacagaaactgcaattaaaattaaaatcgatgaggagacctaggtgcttagaaatcangatangaaaagaaaagaaagcttgagtaaattcaggacccccatcattaaagttgcacatttggtgaaagtggacagaagtttgctctaagtaaagaacttaagagagttagttac

SEQ ID NO: 442366 - DNA, 1044 bp, Homo Sapiens
  misc_feature (76)..(76): n is a, c, g, or t
  misc_feature (85)..(85): n is a, c, g, or t
  misc_feature (211)..(211): n is a, c, g, or t
taagaagacatggcctcttttacatttgggctttctcaaaaataagacccaggtatgcatattagccaggatatancgtaaatcnaaatccaagctatccaggagttcgcaatcacgagagccatgacaacttgtctttagaatgctcattagatttatatttgcatgtccaaggtatggctgtactttcaatttcttcactaattaggtntgcgataacctcatcacactggaagagatgaagatctggcttgttctgggttggctctttgcacaccagtgcaagaactgaatcatagctgcatgaatgcatcacagcttgcaagtgctggattgtgtttaaaggaaaattctccagttcattctttgattctaaatcaatcaggctcacagctctgtcatccacttgaagaatcatatcttgagtccacactttgcccttggcatcaagcaatttcaatttccttattccatcatctacagtgatcagtagcatctttccgatccaggacaaaggtagtcaagtgttcaacacggtattgagatatatctgacagcactgctgacactgtcccgtgcataattcttcctttgttcataaagggcctttgcacttgtttttgaacctatgttctctgtccgtctgggaaaaggtaggtgatgatccgtagccattcatctgagatgggtacattccataactacttgggatgattagaaatatgaccattcattgtgtctttcacttgtgtgttctcggatccgccctcggggccacggctttccccggagacgccgcgagcccagacgaggtgggaggggaccgggagaaagccccccaatctgattcgcgcccagccagtcgtccgcgagccgacggagccgccttctgcacccagctaaagagcagcgatctccgaggcgagcacagcgccggcctcgcgccgggcgagaccgcctcgctagctgctgcctgtgaagtctggagccgcccgcccgctcgcagccagtgccaaccgcgcgccgcgcatgcccagcccgctc

SEQ ID NO: 442367 - DNA, 677 bp, Homo Sapiens
  misc_feature (288)..(578): n is a, c, g, or t
  misc_feature (585)..(585): n is a, c, g, or t
  misc_feature (603)..(603): n is a, c, g, or t
  misc_feature (614)..(614): n is a, c, g, or t
aggaagttacaagaaggcacatactgaatgctgaagtatacatatgctatttctcttaaacctcagagcaaccatatgagcattgtaattaatattcccattttacagatgaggaaactgaagctaagagaagctaagtaatatgcccaaggtccacatctagtaacagacaaagctgggatttcagtctatgtctgcctctctccacatctctttcatccataccacactgcctacatgccatatgacaggatgtgtaatgggctaacgtttatttaaaaagttcannnnnnnnnnnnnnnnnnnnnnnnnnnnnnnnnnnnnnnnnnnnnnnnnnnnnnnnnnnnnnnnnnnnnnnnnnnnnnnnnnnnnnnnnnnnnnnnnnnnnnnnnnnnnnnnnnnnnnnnnnnnnnnnnnnnnnnnnnnnnnnnnnnnnnnnnnnnnnnnnnnnnnnnnnnnnnnnnnnnnnnnnnnnnnnnnnnnnnnnnnnnnnnnnnnnnnnnnnnnnnnnnnnnnnnnnnnnnnnnnnnnnnnnnnnnnnnnnnnnnnnnnnnnnnnnnnnnnnnnnnnnnnnnnnnaacatancataccttaatgatttgngaagtaggcanatatgagatatgtagacatatctatgcttgatgtgcttgagaaatattacttatctagacaaa

SEQ ID NO: 442368 - DNA, 765 bp, Homo Sapiens
  misc_feature (88)..(88): n is a, c, g, or t
  misc_feature (151)..(151): n is a, c, g, or t
  misc_feature (176)..(176): n is a, c, g, or t
gttataagcataaagctgcccatataggccacggtttataaaagcccagtacgagaaaacatcctttactcagtgcaatgtcagagtngctctactgctattaaaggtattcttcagataggttgggctaccaataattgtccctaacganaccaatgggcgcttccttgtgcttntgctgtgccataggttactatgcagctagcacatgtacctctccagaaaaatgaggtcatcctggaagtgacccagagatgctctctagggatgtacctcttgatgttcttgttaactttccactcttcagctggattcctcttcctgtccccttttcaccagtctctactcttgagagaagctgagaagagaagggctcttctcatttgttattttctcctgcttttagtatcatctcacccgtggcagaagaaagaggttcttcccaatttaacacaaaataaactagttactgtttacagataatgcccgctaatgtttactgaaactgaaaccctatgatacattccattcccttaagtgtgccacgctgcaggactgacaaatgaaatccatcctacgaaaaacagcccaggaacaagcgaggccaaggcctgctttcctctccggcccttacagtagcgtgtggctcaggccgcatcttttccctctagttcttttggcacaagttgtaacctaatgcgacaaaggtccctcatgagatggcttaaaactagcagtgtcgctaggctctttaggtgttagaac

SEQ ID NO: 442369 - DNA, 1024 bp, Homo Sapiens
caaccttttaatatgcgtatcttaaaggaaaatattataaaacaagatattaatactaaagtgttaacattaatatgttgttctcatggaagaaaagtagaaaatgtgataggcttagaaattattttttatcagcattaagtgcttcaatttctccccataaagattctaaggaaatttcagttcctcatattatagttttccccataatttaatattactaagtatttctctgcccagtaatgttgatgcagtttgcataaatagccttggaagtaaggaggcaggacagaaagccaaatatcgaaatctctggccttgatttagtgacagtttattctaatggggaccataggtgttattagtaaaaagatagtgtacaaggcctaagttcagtttacattgttctttgaaatgagttcatcttttgtgttgaataattgtattctaagtaggagatgcctgtatttaacataatcatgctttctatataatcaaatatgtatttgttggaatactggtagaaataaccttcccttcctccactgtgcagtggaaaaaaaactcccgatttatactgtatataaattaggaaattatgttacatatttacatttttaaaaatataaaaatgacatattattttgaagtgattgtattatagtttctgaagcttatgactggctataaatataacaacatacccatgagaaaccagaccaaaattgaatatatatcatcactgtgaccttgaacttatagtcatttgggataaaacagagtgtgccttgaaatgataaagagtgccctgcaattttataactgtacattttattatgggtggtcctctcaaattggccccaaatccttgtcttcgaggttggtgaaataaaagtttaaaataaaagttgactggtattccctttagtatttccagaactattgctgtagaggcctcccttattttcagatttctcattttgattaaagttcacttccccacatagatgtaaaaaataaggtc

SEQ ID NO: 442370 - DNA, 793 bp, Homo Sapiens
tggtggtgtttcagggctgtccattccccaactttattcacaaatctggtgtctgtagaaagctgggggtcagcaggctgggggcggctgtccagactcccctggccccatgccctcagggagggagcggcagatcacggagatgcgccggccccggggaatccggcgttccccaaagaaggactcttcatcccgaaggatctcatgggagaagtcataacgggctgagcccctaaggatgtagagggagcccggctccagcaagagttccagccactcccccggctcctgggtgtgcaccagccgcataacgctgggagacaggagagacaggccggcgatggtggccccgcagaacttgatgctgtccacgtggggcttgatgtagccgcgggcttccaggtccagcacgtgcacggaggagagcagggtctggccggggccaaaggcggccgcctgcacgcgctgcaggatggcccggctggcttctgaccagcgcgacttctctgtctctcggaagccgtggatggccgcgtcccagtgatcgtattcgtagcggcggcggcgcagctcgggctccagttctcggctcagcgtctcctcctctgccgtgctcaggaagccaggccgcaccacggccgcgtcctgcaggcggctcagcacggaagggcccgagcctcgcacccagctgggccctggcagcgtccgcagcgccagcagcccagtcccggccataatcccggagcggggtcatgagagagggcagggttggggaacgcccccgccaaaagcc

SEQ ID NO: 442371 - DNA, 690 bp, Homo Sapiens
  misc_feature (67)..(67): n is a, c, g, or t
  misc_feature (667)..(667): n is a, c, g, or t
caccccatatggctgtcagaggactaagtaattatttctaagtctcctagcagcgcttagaggcatntgtgtggcttaattcatagtgcccttcttcaacttcacaccactttgcttcacgccacaaactataagcaacaaatgcaaataccaaaaaaaagtaaaataatattgttttgtgtttttaatgaatattaagaaaatccaattacagcgcagcttaggtgtgagctccaaactgaatgggttttattaagtatttgatacagtctatgccccataaatatgtgttgcattgaattaaagtaaatatccatcataaaaggtgcccaatttcagttctggaggcttcatgactattttcatctttccttttgcagtttgagaaggaactcctttccgtaatcacgaaactatcattctgaatcacctcttaaaaacatcatctgcagtgacataataacattccttagaagtggctattgttgcaacaatctgtctccttaaaccttatcacagtgcaaggcttttgagaagcaatgcatgacagccaccgggaaatcttcagagcaagatgaggtctcacaatcaatggccgcctgtgaggagccacacttacacgctgcactgacaatgtcacagctcgcttctgcctgtggaactacanccttgcctttttgcttccccaca

SEQ ID NO: 442372 - DNA, 463 bp, Homo Sapiens
atctttaattcttttatttctttcttcattatgccaggctagttctaaatgcctaaaatacattaaaatggaacagaaaatcttaaaaggatgttaattttaagtttcttactaatctttcctcatagaaataaagaagccataactgttaagcacattttctaagattgtatataatcatttataggttaagacttttttggcattgaagatagtaaactttttatgaatgtaattattaaagtataatcaactcacatctttgggtttatattggtcttaacatgtttcatagtttgcagtatttgaagaatctgaagatgacaggcacagccgtgcacttacccatgagccgtcaccttcctaaaggtgtgtcgatatctactgtggacactcaggttagcggagagaaaacaactgcattacactacatttttaagcaagccaagaactttatttggag

SEQ ID NO: 442373 - DNA, 1734 bp, Homo Sapiens
  misc_feature (117)..(130): n is a, c, g, or t
  misc_feature (1651)..(1687): n is a, c, g, or t
ctcttcttgctgtaatttttctttgatttgctctctggggatcaagacaaaacaaaatcattagtcttagatacctgaatttgacctcgcctcatagctaatgtgatcaagagtagnnnnnnnnnnnnnnaaatacaattaagacaaaaggactttatatcagcaggactttagggctgtggttccactgtttttatagtaaaatacactaatggtggggtagaggttggagaaggaggtggaaacatccgttacaaggcaacatgacagacagcaggaccctaactagactttaaggaattaattctattcagacggggggagccctacataattaagtttcacacttataaaattatcactctgaattcagggataagaggcatttggttgtagatacaattccatctgtagatactaactttaaatttaaagaagaaaaacattcattgcatttatattatgtgttgagtttcttacatattcctaaatccatctactaattttttgttttgatacaatttacagctatggtaagatgattaccacagccctgattcaggtgtggtctttagcttcagaaagtccatcggtcatgtagctgactgtcattgctaaatctgttgcttgcagaggcctcagtgctctggctttgccgagtagagtcctcaccatttaagctcttcctacatacaggacatgtgtcatgcagttctagccacggcacaatacaactgctgtgaaagaagtgattgcaaggtaactgccggacttcctcttcaactgtgtaatcttctttgcatactggacactctaaacccatatcaacttgttcctgagttactgtcactgttggaagagatgtgatcttttccttgtcagctgggggagggcctgtgttttccagttgtcctaaaagctgggttacaatggcatcaagccctgtctgaccccaggcatagtccccagggttggagtgcagcatcccgctccaggaaaaagggtgtggagatccaggaatggcagaatttgcaaagaatcctgcaaagatgtgttgtagtattccttcaatagctggagatctgtcaggacgagaacttcctcgagatctgtatctccgacccaatggcaaccgtggaggtcttgctccccagaagtcagtgtgagtctggtgacccctttcattggctctattatcttggtccagtggactgctacttagaaagggtctaaaatcttgaaaaaacatcgtgtgatccaaatggccccaaagctctgcaaaatgtgttgttgtggtattgtctatccgactgccgccaccacctaaaaaactggaatcatctgtcacttcttcaataaagcctgattcacatctgggacatatatattccggtagtttggggctgacctcgcccttgcaaaagtggcagaaaaaccggtgggcggctacagcggcgcccgagtccgccccggccgccgaagcctccgccatttttgccctccgccgcggccgtccgagagggcagccggcccgtccctcgccaggccgctacctcccgagctgcagtcgtcgccgccgccgccgcctcggtgcggcccaccgctacagaccgctctcgacgaattcgagctcggccgatttggcctgatnnnnnnnnnnnnnnnnnnnnnnnnnnnnnnnnnnnnncgccgccaccgcgtgagctccattcgccctatagtgagttatcactc

SEQ ID NO: 442374 - DNA, 1601 bp, Homo Sapiens
attgggggagggtggccgatgctcttgtgtgccctggacctgggatgctgctttgggaaaccaagctatggcgcggtgttcactttccctggatggggccccgggcgcccgaaagggaaaggttttggaaaagtttcttgaggggccggaggggcgggccaacaattagtgggggggagagtgtacgaaggtaaggggtcccaaatatgctgtatttggaagaatacagaagtatttttatttctttttatttaatgatgcaaaatacaaatgctggcttgatatatattcacatataactttttctctcacatttacaactcaacagatggtgaatccagaggaacagctacaatcactatacggagcatactacattagtgtttcaaaagtttattccagcccatttcttcttttgtactctaaaatatcttcattgtgttgtttgatgagatagatccacaagaagacagtggtgcccaaggtgaacccaactttcagccagtcaggtttggcattcggcggctctcgcacgtagaactttgatcgcactgaagggccgctcgggagcctggcgggggccagcagccgggaaaggggacgcagcaaggcggacggcgccatcttgcgtggcccagctcagtctctccgagttggcaacagaaccagcgccacctggcggccggaagtgcgggactcgagggctctgcagcagagctccgtgggggcgtcaacgtgaattccagcacggcaaggttctctagcaccccggcctcagccttctgtatttcttggaaggactcctattcggtatgtagtctgacctcgcctactcgagtagttccctctagtatccttgccagtctttggcttctaagatctgagaatttctggggatggggagttcgagtcacaatattaagaactagtttgaagccagctccagggtagtctgtctttaagtctccactactccgctccaaggtgactcataaggtcggtccgtcaactctgcattatatggcctcaacaacgaaattaaaacacatactttaacctccagagcctcctttggcagtgcaaatatgtcacttcggatctgactaactacctttccaggctgatcttaagcaacattcaccaaattaccgatacgacagccaggcccatttcatcggtcaagctctttcacgatttccagactctgttaagcccctttctccccagggctgttaacaagtctccactgcggtgaagcttttttcattttccactccgcctctgctccttaaattaggcatttcgtccataatcaactacagcgcttctcaaacacctacacctgtattttagcactttgggctcaaacgatgatcacacagtgtgcgagactctttccaaggaatgaaaggtcgatctagcaggaaggcgccagagaggctgtttttgatgaggaggcggtctgaaccgtacttgcctagcctcccgtagctccgcgggcgcttcgagggcaccacgcactgaaatgatgggcggggcctgccccgaccctcccggcctccacaggcgggccagcctccaggtttcccggcaagcccgct

SEQ ID NO: 442375 - DNA, 1247 bp, Homo Sapiens
agggaatcgcgaactgggaagagagggaagaggagcggagaagtgtgaagaagagagggttaagagaaaaaataagccgtcggatgtgagagaaggataagaagaagcaatacaattgaaggagagaaagtaggagagctcgtagaggaaagaagaggagagagagtggtaaggtaatgcggaacggcaggagtaggagaggacagaggtgtgacagaggggagcgattgggcgaagcgcgggagagtgatgaaagaagagatagggagagaggcgggaagaggaccccactggaattgaaggagaggagggctaagaagaagagatttttttcagataaagagacctttattttgtacagtacatggtactgtaaaagtaccatgtacttttaccatgtcacccagtgtcacatgggtgattttttgccataccagtaaaatgatggatccaggtagcaaccgtcacaatctggatggagaaagctgtcggcagcttgattccagtcagtcttatcagaaaatagtctcttattatgggcatctacttgagcaacccagatggttgtactaagcagctgtgacttttacccccactgtacaaagaaagggtgctttttaatctgtaatttccaattagaatatcaaatatctaggccacatccagagccaaggcttaacaaaaatgtaacatggtttatgaaatggagtattggccagagctgagaacatcctcgtgctctttccactgagaggagtgaccgcttcactttgggtttgttaatggcactgagtttgaacacacacaggatcctagtagtttcagttggcgaaagcatcagtgagccaggcccaattacagtaacctctatgaattgagggctctactaagccagcaactttgcttcgttctggaaagaggtgatacattatttcccttctaagagacagctactactattgcctatacagctgacatactgtggggccaggacaggtgctttcctgaatgccccattttcattccacaagtgaggcttgctgggtccttttcattttgttagttgttgagtccaagacgacaaactcctaaagtggaattttaggtcagaagtttcaacccacaaaatcaccagtcacagagagagacttgaagcccaaaatgatcagagctgttggacctcagaggtatctttacatacaattattcctgattagaatcctcgtgccgaattcgccacccaggcc

SEQ ID NO: 442376 - DNA, 1112 bp, Homo Sapiens
  misc_feature (258)..(258): n is a, c, g, or t
ctacacataatttagttatcttctgctaggaaggcagaaagcttctgtgtaagccaggcttaagtcaatcagagggcacaaaccttattaggaggctagagagtcaaggagaacctcaaatatgatcagagaattgtggaaaagacatcctttcaatgtaatgaaattgatagtaccacctgatacagggctttgcatgaacctaaaagtcttttggctgaatggtgagcagccactgtgcagttcaacgtaagtgtngccttaattgcacagaggtactgcccccacacctcctgacacctccatataccccagctatatctgctttaaggagttttccctgggcttccaaaggccattggcacccacccaagtattatgggaaacctccagagaggggagggactcagatttatatggctttattgaatccatgcccaaggcaacatcttactagttcctgtgggggtacaggacacctagatttagctaatggggtttggcaatgggaaggcaaacaaatttaataactttatgggtgaggtactttggggccagtagagtatactacagttatgtttacatctgaaagtgtagtagggattaattcccataagttatagagagaattctaattccctgtaattcgcataagtcatagaattctaatcaggaataattgtatgtaaaggtacctctgaggtccaacagctctgatcattttgggctttatgtctctctctgtgactggtgattttgtgggttgaaacttctggcaaaagggggcagcccttgggagctgggggccaggggattgacttggttccctgacaagggtcccaggtccaccccttctgaaaagcagctgttagtttactcttgggctcttttacacattggatatctcttccttgggtagagggttctgacctaaaattccactttaggagtttgtcgtcttggactcaacaactaacaaaatgaaaaggacccagcaagcctcacttgtggaatgaaaatggggcattcaggaaagcacctgtcctggccccacagtatgtcagctgtataggcaatagtagtagctgtctcttagaagggaaataatgtat

SEQ ID NO: 442377 - DNA, 763 bp, Homo Sapiens
gctgttacgattatttattgttactattcactgctttattcccatggacccatgggttagagctccatacataaagtaggtgctcattaaatgttggctggactgagtcagcccctccatcttggcccttgagtcctcagaaaagcagtgccatccatgagaagcaacttgaattgtattttttattgaaaagaattcaggctagagttgggaggaggatgcaagagctactgggaagggggagctcagtctgaacctgggggatcaggggagtaggggactctccccttgtccactgatggggggtctggctgttactcctctcccttcagcacagaaagaacttggtcagtaaaaatgcctgtgtaagtgctcatggctgctgtgcttttgctgtacaagtccctgagtttctcatctacagcgggcaggtatgtcttctcgtacaggttctgggcggctgtctttgctgactcccagtaactggagagagattccttcacctgggtgaggaaggtcgggctaggcatctcatcttgctggggctgttgggtcccctggacctcaaatcccaataccaggaggacaagaaacagagctgggaggagtcgtgtgcccatagtgtccagagaccagactctggcaggctgtcctcaccagctccggacgggcacagagaggatttatagtggttgagacccacttccgctccacagccacaacccccatcctttgtctaggccaaagtcctggccaacagccc

SEQ ID NO: 442378 - DNA, 438 bp, Homo Sapiens
  misc_feature (345)..(345): n is a, c, g, or t
  misc_feature (362)..(362): n is a, c, g, or t
  misc_feature (387)..(387): n is a, c, g, or t
  misc_feature (396)..(396): n is a, c, g, or t
  misc_feature (412)..(412): n is a, c, g, or t
ggcaagtggaggaacttaaaggaacaggcagaagccattctaaaaggaaagtgtgttggaggtgaagtgagaaagagtgaaaaatggttttcagttaatttatctaagtttatcttccagctgaggagtgaactcttgtcaccttgtgaaattaggcaaaacaaaagccttcccacacaagtcccaagtgactccaatatgcaaagtactctccttcacccttcatacttgtagcattaaactgggtcaggaggaagaagcttgtatccaagatttaaatgcaggatgctctgactgaagcctgcataaatgtaaaatgagaggaacttgggtaataaggcaagncaaggtattaattagtnacatatgtaggattcctaggagganaaccaaccnaattttaatcttaggnctatcttgcacttttccatagtttta

SEQ ID NO: 442379 - DNA, 506 bp, Homo Sapiens
  misc_feature (30)..(30): n is a, c, g, or t
gcctctgtgctcaaagaaggccctccatanacgtttgcagaatgaatgatgaaaacaagattggcaaaagcgtgtcaggcagcctcacagataattaacagtattttaagcacacccacaaatactccccacatccgttccccactggtccagcatattattacttactttcagttcagctgctttcaggacgaggaaatacaaaacggatgggaaatggtctaagatgactggagcctaacggtttgagtttccacattatctaagggattaccaaggcaagatgtagggctgtcttaaggaatgatacggcctcagtgcaatggatgtttacaagaaatcaagaataaaactttaaaaagcaaacaaacattacagatacaacattactgttggtgattattttgtgcctaccaggagatgactgctctaatcaggcccatctagatgtcaacgagaaacccaggcctatcatccctagcagataatttttaaccccaaagcac

SEQ ID NO: 442380 - DNA, 685 bp, Homo Sapiens
  misc_feature (419)..(419): n is a, c, g, or t
cgagtcccagaatctttcccaggttgccccagaaagaccagccacctgtcacaggtgcagttgtccggcaatagggaagcaacttcatttttgttttatatttattccctcaagtgccctgaggagcatttgcaaactgggtacaataaataagctggattatacaaagatatttaataaataagctttcagtatctattggaagacatgaagcatttgagtgggtttctttatttaaaaaattattctactggagctggtgagaaataatgaagctgtacagttctccagaaattaaaacaatgtcagagtcaatgggagaatttaatttacctttaagatttcattttaatggtggcaaaattatacattcttagaagatgtaaatttggaacttgtaggagattgctctgtggttntgatcttttcaaaccattttctttttgaaaaagggcattagttgtagtcatggacattaaatgggcatatatgcttatcaatcaaaaaagtgttccttttttgaacttgcccatttttggatacttccttctaatggataggggatgaaaaccttggttgctttaattggtttctcctctacatgaatccgaaacatgaagtccatgatgaaggaacttataggtcacccaagccaatgggccgttacttaattccttgagggaaa

SEQ ID NO: 442381 - DNA, 1294 bp, Homo Sapiens
  misc_feature (454)..(743): n is a, c, g, or t
  misc_feature (767)..(767): n is a, c, g, or t
  misc_feature (771)..(771): n is a, c, g, or t
  misc_feature (795)..(796): n is a, c, g, or t
  misc_feature (827)..(828): n is a, c, g, or t
  misc_feature (862)..(862): n is a, c, g, or t
  misc_feature (892)..(892): n is a, c, g, or t
  misc_feature (938)..(938): n is a, c, g, or t
  misc_feature (941)..(941): n is a, c, g, or t
  misc_feature (943)..(943): n is a, c, g, or t
  misc_feature (950)..(950): n is a, c, g, or t
  misc_feature (956)..(956): n is a, c, g, or t
  misc_feature (1032)..(1032): n is a, c, g, or t
  misc_feature (1156)..(1156): n is a, c, g, or t
  misc_feature (1248)..(1248): n is a, c, g, or t
ttaaattgctaggatagaatttctgtctccattgtagtgtagggtgtgcagatgggaaacctggaacagataccacgaaagaagcttgtctcaagaaggctgacacaatgggagacatagcagggagatggaaagaaactgctgttgtgatagccattagttcctgaattaaatcaactctaccctctgttcttcctctggattttcagttacacacatttttcttacataatcaagcttttctgttacctgcaaccatatttcagctaatactcagtatttttccggtttttaacaaatatacattacttttatgctaacaaaataattattatattcattgattctaagacaaacttttttttaccttttaaaatccttgaaattggcatgtattatacaatccatggcatgtcataatttaatagaactttctttcataggatacattaannnnnnnnnnnnnnnnnnnnnnnnnnnnnnnnnnnnnnnnnnnnnnnnnnnnnnnnnnnnnnnnnnnnnnnnnnnnnnnnnnnnnnnnnnnnnnnnnnnnnnnnnnnnnnnnnnnnnnnnnnnnnnnnnnnnnnnnnnnnnnnnnnnnnnnnnnnnnnnnnnnnnnnnnnnnnnnnnnnnnnnnnnnnnnnnnnnnnnnnnnnnnnnnnnnnnnnnnnnnnnnnnnnnnnnnnnnnnnnnnnnnnnnnnnnnnnnnnnnnnnnnnnnnnnnnnnnnnnnnnnnnnnnnnncatatttacgatgatggacatccncaantacactgattcgatctttacaaanntatatgaatgtcatatcacatactcctgaanntatatacgtctattattgataataataatacgtngattgcataatcaatgatgccttagacttngatgaaaacaatattgtttagaactgatcaaaggatctttaagaangangnatagcantgccangacacccttgaaggtaatggatatactacttcacccttatagccacctgatgacccacatttttggattggtcacngagaattcagagcttaaaacttggcttgttgaccggtagcgtaataagcttggtggcacaaccctttttatggtttaaatggcagcaatgttcctcaaacactgtaaccgttgaagggcttcgnccaaaatttaaactatttcttacggacactacgtctaaaactctgtataaagattataaaatctctgatatgcctctactccacctaacgtntatctgtgggcgtgcgcctttccatataaattctactgaggtgacg

SEQ ID NO: 442382 - DNA, 2046 bp, Homo Sapiens
  misc_feature (893)..(906): n is a, c, g, or t
  misc_feature (1877)..(1877): n is a, c, g, or t
tgagccaccacacccagcaggagaaaccattttctaggctctttaggaaggaccatgcaatgagtaggtgatgtatttgagccctcacagtctttacatccctagaggagctggaggacttaagagtttgctgcagaagcgtggccaagcacaaaacacatgatcaggaaagcagagtgttttcccattaccaatggatgaactatgcaaaccctaaacgccttggcagacacctcccaccccttacccctcccatgcagctgaaaaatctgagactagaaccaatcatgactctggatggcagagggaaacctctaaagggacttattacattggtacagacatatttatgctttcttccatcaccaaccactaaacccctttggaggaatgaaataactgcataaactagtcaactgaacactgggccacttacctcaatgttatacaaagtcctggatgatttgattctgaaccacagcctttgcaggagttgggggaatcagatttgctcatgaagacatccctttccacttttgtcatgggcagtaaatactatagtttacaatgcctaccaattagcaaaggatcattcattcagctactcagttcctctgtaaaacaggtctatgtatgtgcaattcagctaagatctagcagtaacttaagggcagaaagctggctctctacttacaacctgctttctctgctgaagcctttacctcctcttcagtttccctcctagacacaaatcgaaaataatatactgatagctggttagtaacctcagtaagaattaaaactgaggttgtttactcattttgcctttaaatcttttatccccttttggtgaaggtttccctttaggaaaaaaggtgtcaaacaaccctgannnnnnnnnnnnnngcatcatttttattacaccaaattaaagttgggagttccaagatcccattccagttaatatttaaccaaggtctaaaatttgattttttttaaatctttgaatcctcccttctgcccctcatggatccttggttttaatgatatggaaacatctaattcttagaattattccgtagcttttgctgattactctgagatttcagttaagacttgtttcaaaagacagatagctgactggttcataatacattggaatagttggatccaaactaataagaataagctgtacaggaactagtgctcaatatacattgtataaatttgtggaaatctcttggatgtgaattgttacttcaagtggcttttattaagattttctcagacttacttggaggttaaagcaaacccaaatgtgtattattttgttacagagctctgctttataattttgtaataaagtttcaatactgacccacagaactggtgaggagaaagttgtggtgtttcacaaagatcttagaaggcatggggatttgcgggaaccttcgaaaagacagcactcactgggctttcgcaacaatcaaatggaacccacccgaacgctgctgtgtgcgtggggtataactgggatccatgggcgaccgcgccaataggattcttcccaatgtatatgccttattgcgccggccggaagccacaaaaaagaaacaagggagtggtgtggggtattcgctgtgaacccctttctaggcccagaccctggtttattcccattttggtgcagggccgcacctcctcgcaccccctcaaaaaaacaccccgcgcgtgagaatcatcattcccctgttgggtcgccccctgggccgccactataaaatgtttagcccgacttggtgggatcaatctgggcgtggctcaccacacaagcggatcaccctgccgtctctcgacactccagaagacaattagantaaatgcccggcgtgatgtctatcaagatcccgtgcctgggtggtgcgctaccgtatataacgaagaaccggtgtgcctaaacgccgctatggaaagcgcgcatatttatggaagagaaataatcgtaccccgcggtacgtctctatccgcaacagcgggtagatcccc

SEQ ID NO: 442383 - DNA, 805 bp, Homo Sapiens
gaacaagtatacggttttttattggtggggttttttcctctgccacccaagaaagtacagtacaaaacaatagtctaaactaacacgaactgttacctggtctattaaaggatacacggtatccactaaacagacagatccttatttccctgcttgatgttgcaaagcccttggcaaccaggggcaaaggtcactggggtttgactaactggggctgagtggcagctatgactgtccttcagatttttgagttgtttttgaaattaaaagcttctaaaagttgcatcaacatcctcctaagcccccagaggattgtaacaccaccacaaaaggccaccaacactttttaaacaaagtgaaaactgtctgacaccaatcatcttgaaaactccatggcaagtgcattagctatgatttcatcacttacaggtagagaagcttactgtctactggtgtggacactcttgctattttctttatacttaatttgcagtggcagaatggtgaagtaaaggggtctaatttcactgtgaaaaaatgaaagacaatggcagagagggccatgagtaattatttcaccatttgttagagacaaatgctaggaaaaccacagaagtcaccatttctaaaatgcatttagcactgctaacatagttatgactaactggaatcatgacaggatcatttgatttccttgtggttatagaacatgctgtattattttggttctattgatccattttagaaggtatctttctccccctacccaaatcccactggaccaacaagcctgtaactattaatt

SEQ ID NO: 442384 - DNA, 1310 bp, Homo Sapiens
  misc_feature (1093)..(1108): n is a, c, g, or t
  misc_feature (1171)..(1171): n is a, c, g, or t
atatccacttttccccaaggcccgtttttttccaagaaatctcggtttaaaaacaaaatgggaaaactctcaaggcaatttattttttgaagtttagtggaaccttctttcaagggtgaccatttttaaactttaccctttaagggggcctgctggggactttagttctagtccagggtctagaaagcaaaacaggggttttgggaagtggttcccggagaaggatccaactttattcttgccttggcaaatgcctcaggggaggcccatcactgtttccttcaggcaggtgtaggggtttatctcctccagacaaatgtgaaaaaggctgatggcagcatgggtcagggagggggttgttgccactactgggaatggggaagctatttcttctggcaaaaaaagtttcatcacagttaacaaactcgatgtccccgtcttcatcagggtactcccacacgtccccattccaaggttcagggtcccactctttttccaatcaatgccgtcactttaacaatagacatcttgtgaggcaggcacctttccattgcacatccgccatttgcgtgataagagcttgtgtctgtttttccacaatttcagctctttctctacaggagataagactctcacttagggcaatcttaggagattttaggttcagtatctgcttctgaagcttggagctagactccctgagttcatcattttctttcatgactttgtccactgaacttaggagcaaccaactagcttcattatgttccttggttttctacgtatggtcaattgtattacgtgtatagttactgaactccttgtctctcatgagcgatgattcaggagtgtcaaatgcatttattttgcataactctctaaacagttcacaccaaggactatcagtgttctccatactattagaagtagagtccttagcattttggggtctaatcatattaagcagccaacttcagaaaccccaaaaccaatgaaagaactccatccttaatattctgttcctctagaaccactcctggtaccaaaatctgtattagtcaggattctctagagggacagaactaatggaaannnnnnnnnnnnnnnngagtttattaagtattaactcacatgatcacaagggtccacaataggccatttgcaggctgangagcaaggacagccagtctgagttctgaaagacgtaggcctggaggctagggctggctctcttttttacatttttctggttgcaccctggcaacttggtagattgtgccacccagattaagaccggcttgcttttcaac

SEQ ID NO: 442385 - DNA, 1131 bp, Homo Sapiens
cggagctgaacgcaattaatgaaatagagcgttaattgttatacgagagaggtccaaagttaagggtattagagaatatgtttaggctgagagaaaattttagagtgtaagaaaggactcgtaaaaagattagcatagataagcagttttaaaggctttttaaatgaaacatcactttccggtatttttattatagatttacaatagctattgtaaaagattattaaaattaacggatttacaatattaggttaatttcattgcatcagctgaaattgtggaagcgatggtagggctattgtattagacagttggaaaggggatgtctcaagggattaagtgggtacgcaggttttacatcacacgtttaaaggcggcaattaatttatcagactcctataggcgaattgggtacgggcccccctcgagtttatttcttgtttatttttagaaaagagtagcatgaatacctttatatgaagttcaatacgaagagaccctcatctatggtgaaataagtcacaccagtggctgcttgggcaagaggggtcaactgactgggaaggggtacgagggatctttcagaggtgaaatggtccgggccttgatgggagtgtgagttacaaaggctgatacaattgcccaaattcactgaattgtaaaaatatgatctgtataccttactgtctgtaaattatatctcaacaaaaatacttaaaattagaatattttatactataaaaagaaggcaacatcaaaaaacttgtcctcggctctctagttccaataatcattgataccaacctatttactttgtagagtacaatctttgaggtttcttctgagtacaatgggtgggtcaagtccatatttacaagagggtctcaagtgggaaagacggaaagacaccaacacaatgacctaaaacccttctatagatggcatcacccaccaccaaaacaaaagggcattttattcctaaaccaacaacccaaaccatccagcctgtccttccctactgctttctaattttcagcttaaagcacattcaatttcttagtaagaaacaagtataagtgaatgccggggcagaccccaagtcactcagcacatatcacccactcgcacgcc

SEQ ID NO: 442386 - DNA, 742 bp, Homo Sapiens
  misc_feature (76)..(128): n is a, c, g, or t
  misc_feature (232)..(232): n is a, c, g, or t
aatataaatttagcaggtgtgtgaaggtactgtatccagtactcagagggtgagcagaagattgcttgaacccagnnnnnnnnnnnnnnnnnnnnnnnnnnnnnnnnnnnnnnnnnnnnnnnnnnnnngagtgagactccatctcaaaaataattaattgattaaccaattaattaaaaaagagagaattaactgcaatctaatgaaccagtagatgttaggctgcccttcntgagaggctctgatttaagaagaaagcacacaatgaaaccactgagaaaagacagaaggatgctgatctaagccacagctacacttcttgcccctaattcaacatccccaaaaacgtggaggagcaggagaaacacatcaaaaaatgtaatttattcataataatttactgccatggtagagaacaagtagggacgctccaagttcctttggatagcaaagttaggaaaacctagaaagcatattttccttctaaatctttcaccttaggacacctagagatttatgatatttatcgtgtgctggagaaaataacacttaaataaaaggtgatccttgtagatagggtacctcagttcaagcagattctctgagcaactgtcaagattcactgctaggaactttactgatgtatccgttacacaccaatatcaatttatgaccacaaacaaggcagatttaacacagtgaatggaaagatgtgaatatttatttttgaaagctacagcat

SEQ ID NO: 442387 - DNA, 1488 bp, Homo Sapiens
  misc_feature (98)..(216): n is a, c, g, or t
  misc_feature (230)..(230): n is a, c, g, or t
  misc_feature (239)..(239): n is a, c, g, or t
  misc_feature (245)..(248): n is a, c, g, or t
  misc_feature (254)..(300): n is a, c, g, or t
  misc_feature (302)..(313): n is a, c, g, or t
  misc_feature (315)..(418): n is a, c, g, or t
  misc_feature (1244)..(1247): n is a, c, g, or t
  misc_feature (1394)..(1394): n is a, c, g, or t
tccgcgtgttagagaaccaagaatgcccgcggtgccacatgtttggggatgggtgtgaaaagtgttatggtagaatttgggggtatgtttttgttgtnnnnnnnnnnnnnnnnnnnnnnnnnnnnnnnnnnnnnnnnnnnnnnnnnnnnnnnnnnnnnnnnnnnnnnnnnnnnnnnnnnnnnnnnnnnnnnnnnnnnnnnnnnnnnnnnnnnnnnnttatgggttttttnggtggtttntttttnnnngggtgnnnnnnnnnnnnnnnnnnnnnnnnnnnnnnnnnnnnnnnnnnnnnnntnnnnnnnnnnnntnnnnnnnnnnnnnnnnnnnnnnnnnnnnnnnnnnnnnnnnnnnnnnnnnnnnnnnnnnnnnnnnnnnnnnnnnnnnnnnnnnnnnnnnnnnnnnnnnnnnnnnngctttctttctggtttaattccattcaacgcccccctcccccatagcacctggggggccgcagaacacccgcccgagtctgtaaaaagtcacagtttgaagagaatgagaggggcagtgtgggcctgcgtgggacgcctacgcagcggactgctcctcaggctcggcgttctcggccaggtgcagcttctggatagaattactgaggtcttccagattgctaagcagctggtccaggttacggtcagccattgtcttcttctgctcctctggcagcccctcagtgaccccatcctcttcctcttcatcgtcctcctcctccccacacacatccaggctgaagtgcagccgggctagcttctcctgcatctcccgaacgtgctccagctgctcaaaggagcattccttcccgaaggcctgcagccggccagagtggaaatcattgagcaggttcaggagtcccccctccatctcatagacatcagtcacctcggtcaggaaggagtgctgcaggggcgtgcctgcagagccgcttccacctccagccaggactgggcggcacttctctttgcctactctcttgaacttggcccgctgcttgggggatggcagatgaggaagtcctagggccaaggagccgctgtggctggtaggcacagggaccctccgtagtgtgcctggggcctgggctggctgggccaggcagggcttgggactccgtttcttctttttgtcatccattgggcgctggctgggcctcaggcctggaggtttggggtctcgagtgatgcttcggtgcaagttccctccgccctccgccctctccnnnngggaacaccaccgggtgaaagctaagctggagggagttcatttgcatttaaagagaaagtgaccttctccttagcgcggtggggtgagatgggaggagcatccccgcgtatgctaagcagttcctctcactcgacctcacctccccncctgaacctaggggaccctgttggttgtgtgatgtctattttaaaaagattttccctttcccggcagtttcagagagaagctacagttccttac

SEQ ID NO: 442388 - DNA, 508 bp, Homo Sapiens
gctttctttctggtttaattccattcaacgcccccctcccccatagcacctggggggccgcagaacacccgcccgagtctgtaaaaagtcacagtttgaagagaatgagaggggcagtgtgggcctgcgtgggacgcctacgcagcggactgctcctcaggctcggcgttctcggccaggtgcagcttctggctgtgcccgtcaaggatcgtggcgctttggaccagtccttcctcccaccccggtctcccatcttgcacaggtttagttccctcacctgtgcaaagggccggggacgagggtctcgggccgtctgtggactgaggttgcagtccccgcctgccctctctcaccccctctctcttcatccagatcgtgcaggtcagacacactggggtgtgttggcgcgcactcgcgctgtttctgactgaggaccaggtgaggtggtagtgtaaattagtaaaaataattgttcaatgctgaaaggataggaggacatcggacaagc

SEQ ID NO: 442389 - DNA, 529 bp, Homo Sapiens
gcacgagatttgtgtttaaacttgggtcccatctccaagatatcttattgtgtgtatgcaggtattccaaaatttggaaaaacatcccaaatccaagatgcttctactagtcccaagtatttcagataagggatacacaacctatatagcaaaatcactgaatctaagagatgggtatacaaagatcactactttcagttttcctttttgtttgaaaatgtacatgacaaacatatccatacagttcattgtaacattacaattcccaaatcctttgggaaaaatccacctacacacacagtctctctttatctaagtggattcaagatgctcctttttacaaaacttaaaaagattttgcagtggtggcactccagcctcaagtgagtagcatagtcctgcctatttaaaaacatcttagtattccatttcactcttaagttttgtgttccttccattccattagggaatagaactttgcatctgatgacaaattcagtttaccatgagactacaccacatttaaagt

SEQ ID NO: 442390 - DNA, 710 bp, Homo Sapiens
  misc_feature (498)..(623): n is a, c, g, or t
tacgatgaagaaaagatgaattttaattaaaaagaggtgagctattaatatgtattactgtcaactttgtgctcagtaacgtgggattcacagtaagaacaatgatatagaaagtcaaagataccaatacagaaatacttgttcagtaagcttttagcatatatgagctatctgaaatgtacaattgtgtgtcctatccatgtaaaagtttgcctttctgtaaaggaaataatgcattaggtaatgctgttaaacaacatagtggttaagactctagatgctagtgtaagactggccatattcaaaatctggctcaattgctcactgataatgtaaacttagacaaactacttaatatctttaaaccttagcttttttgtccatagaacaaggataatatcagtacctatctcattcagttgctgcaagatggtgtttagaagaataataaaattttaataaaagcttagttgtcttataactaaaatctattggaannnnnnnnnnnnnnnnnnnnnnnnnnnnnnnnnnnnnnnnnnnnnnnnnnnnnnnnnnnnnnnnnnnnnnnnnnnnnnnnnnnnnnnnnnnnnnnnnnnnnnnnnnnnnnnnnnnnnnnnnnnnnnctgagcatggtgacaagcgcctgtagtcccagccactcaggaggtcgaagcacaagtatcacctgaacctgggaggcagaggttgca

SEQ ID NO: 442391 - DNA, 680 bp, Homo Sapiens
  misc_feature (395)..(395): n is a, c, g, or t
tgccaaagtaattttgaattcataaaaattgtttataccacaataatgtgggatatgtttacaggctcttttattttgtggtagttactttatagttcagatgaatttgcatttcagtcacttatagtaaataaagtatattaaatatttgttggaataaaaatctcaatgtaataggacatagataaattatgcaacagcctgctttgatgaaagctggtgcattatgtgagctgccacagttaatactttgtattaacattgcttacttcccccatttgcttcacctatctgactacaattgctggaatcattctttttggtgggtgcttcctccaagtgaaataactatgttattaaaacctactggattaattttatcaaatatcagactntactgatctcttggcagagatttattggtgtctcagtgtgatcacaatacaagttgtagcaaccattttataaaactcttagagaattatggtagataaaatgggaattacataatcctaaaacatttttgagggctaattggatataatttcagcaattttattaagaccccagtaaattaatcccttatttgtacgttttttggttaaccttaccgtgtcttgcaccattatatagacttcatgatactcagcaattactacagtgtgtcttacaatgtataa

SEQ ID NO: 442392 - DNA, 1763 bp, Homo Sapiens
caaaattagtataaatagactttattgaagtcagtgcctctgtactgagacagaagattgtgtctacataagcacaagttgtaacatttcacaacttctaaaaggaatgtcaacaattacaacgatcatgcataccatggtcgataatcacattttagaagcattttcaaccatttctaaagaaatgcttataacattgttatatatagaactactttcaataaactgcaaaacattgatcgacttttccagtatgagctacagtgtcaacacaaaagggaggcataaatgtttaatttatgaaatcagaatggaatatttactgtaaagaaaaattaaaaagctttcaaataaaggccattatcgaaccaacgtgaagagcacaactcgaacttttgagttcattcatcttttaaagctgtcctctcaataacttcagttctaagcactgaattcagtactgtgaatattccttggattgaagtttggcaatgatgcggtccaactgtctctttgcttcacactgtgggaaattgctcatgtcataatattgaggggcaattttcaccaaccattctggcttgatatctgtacatgtccggatgtaattctttgttgttagaacaaactcattataaagcacccattcaggtttgtggtcaagaacagtagagggatgcaactgaaccaccctggttatctttcacagttaagtaatgccctgttcgttctaaatgtgccacctgcataaaatacccagtaaccaaagcttttcttatattaatataatagtccctgcttgtaaagtcagtacttcgacgaggcaaattaaatctgtccataattcgagatagctgctggcgtacattgtctgcggacatcagggacctgtagttaatgaagttgtcataacaccactgaaccgattcatgattttgtttaaaagcatggtagacgttcagcagtgtcagatgatctccatctatgtgggcaaatctcatcttggcctcatctgcggctttcttggcctccgtggggcgaacaaaacactgtgggactgacaacatagcagtaatagataggacctcattagaacagttgtagtcacaacttgcaataaccatttttgcgagctgtggatctagaggaaactctgccatcatggatcccaattcagtcagatctccatcatcatttaaagcagccaggtaattcaaaagttccagggctctcatcagagtttcaggagctggtggatccataaaatcaaaatgtaccaagtcatcaataccaagtttcttcaattgtaacacaactgatcctaaattagaacgcaaaatctcaggataggtgttatcctgcatttctgttttataagctttctctgtgtaaagtctgaagcattttccaggtctggtacgtccagctcgaccagccctttgctgagctgaagctttactaatagctgtcaccaaaagggactcaactctgattcgaggattgtagaccttctgtttcgcaaatccaggatcaatcacaaacaccacaccatctattgtcaaagacgtctctgctatgttagttgacacaactacctttcttccaattgcttccattctgttttttgggaggtggaggctcaaaaatgcgttgctgctgctgaggtggaagtgtagaatacaatggaatgattttaatgtcaccaacttcagggcccaaatcatcaacttcacgctttattctcttacaggcttcattccgca

SEQ ID NO: 442393 - DNA, 380 bp, Homo Sapiens
tttttaacagaaattgaaccgtttattagcctaggtctgggtttcaggcattgcggaggcacgtctggggagctctatgaggggaaacaagcccctgactggctccttgccccccaaagacccgctcccccaggctttgcattcacaagaaattactctgaggcatgaggtttccttccccaaggtgagctgcaccccagctctccagtgggaggatgggccagcaattccaaaggggtctgggcaggaccagagctccccgactttggcagcttcaacacaaacatgaggcagacagggacagcattcattctggggggaaatgtgacgagggagagggagggtcacagacattcacgcctatgtggcacacggcgcgc

SEQ ID NO: 442394 - DNA, 792 bp, Homo Sapiens
ctgactcagtcattgggttcaatagtgatgtgacgggcactccatatgtctctccagatggccactaccttgtcagcattaatgatgtgaaaggtcttgtaagggttcagtacattaccatcagaggagaaatacaggaggcttttgatatttacacaaatctgcacatatctgatctggcatttcaaccatcctttactgaagcccaccaatataacatctacggtagttcaagcacacaaactgatgtgctctttgtggagctctcttctgggaaggtcaagatgataaagagtctcaaggaaccactcaaggcagaagaatggccttggaaccggaaaaacaggcaaatccaggacagtggcttgtttggtcaatacctgatgacaccttccaaggactctctcttcatcctagatggacgactcaataaattaaactgtgagatcactgaagttgaaaaaggaaatacagtcatttgggttggagatgcctaaaaaccctagggtacaattattgaatgaagcgttttacaatacattgcacttaatccatcgtttaaatttacaacttaactttccaagcttatatcctagtcaaacaaaacttacttgggtggtccacataaaataaatcgtttttgactaagtgactaagacatacacaattacatatattgggtaactagaaatactcagcacaatatttaatgagaaatcacatcagtcacaagaatcaaatatgtaaaatatgctttaaacaataagtaggacttaaatcattaatcatttt

SEQ ID NO: 442395 - DNA, 796 bp, Homo Sapiens
  misc_feature (261)..(269): n is a, c, g, or t
  misc_feature (526)..(526): n is a, c, g, or t
aatatgctgtttctgtttcagtgttaataatttataactgagacctatttccactttgaactagggttcagtaggatgaaaactaactttgtcttttatttatcacacttgattgtctaataatttccataagcagcagttgctctccacatacagatagaaccctacacctaacgaatctctcccttggtccctcctaaaaaggcactccatttctcattttcattaactttgctacagcatggccaaactcagtaaaannnnnnnnnctgttttctttgtctttaatattgtctttaatatttcacctgtctgtttcaatttatcttggtaaaatatttagatatataatatctgttcacttttgaaactaaattttcagttttagtcaaatgtataatgatactgcaagttgagcaaactgtgatcaaagaccatgatagtacctgtattaatgttacatgccgtgttctttacatacctaagcagtatagtgacaactgagtgtgtttacctgggagaactntaggtattttccctaggcccatgtactttgaggttttaatgtgccggatgagaacaggattccagccaggaaccagcgtattgccccgatgtcatgggaattgacaagcttgctctgcacctaataaccataggtttctatatcacatcatctttgcctaagacataatagctactctactgattctaaatatccaacactatttttgtgtcctaaacttaaactttgcacacatagattgtccaatgcataacagtattttgagattga

SEQ ID NO: 442396 - DNA, 611 bp, Homo Sapiens
  misc_feature (526)..(526): n is a, c, g, or t
ccattccagaagaagatgattttggtgatgttctgtgggacatacatgatgaacaagagcaaatggaaacttttcagcaggcttctaattcagcccatgagttgggatttgagaaatattaccaacgccttaatgatctagtggcagcaccagccccgattccacctcttctcgtgtctggaggaccaggttctgggaagtctcttcttttatcaaagtggattcaattacaacagaagaattcccccaacacactgattctttcccattttgtgggaaggcccatgtcaaccagctcagagtcctccttgattattaaacgactaactctaaagttgatgcagcactcttggtcagtctctgctctgacactggatcctgctaagcttctggaagaatttccacgttggctggaaaaactctctgctcgtcatcaaggcagcatcatcatcgttattgattctatagatcaagttcaggttgtggcctacactttatcttgatccgttaggtgcaaaagatgcanaatctattataattgcagaatgccactctgtagacatttttatctttcctatgaaacactctattgtgagaccttaaattcaatt

SEQ ID NO: 442397 - DNA, 1167 bp, Homo Sapiens
  misc_feature (1104)..(1104): n is a, c, g, or t
ggaaagcgcatttgtaacgcgggcgacaacgtgcccgaaatccccggacggtgggtctgcatcgagaccccgagctctggagctggaaaaacccggctgaggctttacagttctctatactctcccaagagccacagaaaatgaacacatttcaggctactgctttacaaaaccagaactgatcttcacattggaacaaggagaagatccatggttattagagaaagagaaaggatttctaagcaggaactccccagaagactcccaacctgatgaaatctcagagaagagcccagaaaatcaaggcaaacatttgttgcaagttttattcaccaataaattattgactacagagcaagaaatttcaggaaaaccacataatcgagacataaacatttttcgtgcaagaatgatgccttgtaaatgtgacattgcggggtctgcttgccaggggctcagcctgatggccccacactgtcagtattcagaagaaaaggctcatgagcgtaatgtttgtgacaaatggctcatcagtattaaggatggcagaactaacactcaagagaaatctttcgcttatagtaaaattgtgaaaaccctccatcataaggaggaagttattcaacatcagacaattcagactctggggcaagattttgaatataatgaaagtagaaaagcttttcttgaaaaggcttgcccttgttacatctaacagtacccacccaaaaggaaaatcttacaatttcaataaatttggggaaaacaaatatgataaatcaacctttattattcctcagaacatgaatccagagaagagtcactatgagtttaatgatactggaaattgcttctgtagaatcactcacaaaactctcacaggagggaaatccttcagccaaaagtcacacattagagaacatcatagagttcatataggggtgaaaccctttgaatatggaaaaagtttcaaccgtaattcaacccttccagtgcatcagagaactcatgcaacagataaatactctgattatcacccatgtacagagacattcagctaccagtcaactttcagtgtacatcagaaggttcacataagggcanaaccctatgagtataatgaatggtggaaatcctgctctatgaattcacacttgacttggcctc

SEQ ID NO: 442398 - DNA, 671 bp, Homo Sapiens
  misc_feature (170)..(178): n is a, c, g, or t
tttggttttatgaaataaattttactaagcaataagcaataatgtagaaaaatacattttacctacaaactcaataaacaagaaacaaagggttcatatttagtgcataattacttactagtggctacagaggggtttctaaaatttacaataagtgcctgcatcaaacnnnnnnnnngtgagaagcattcacaagtttaagagaagtgaatgaaaaatggtaaacagtacttaaacagtgcaggagggtaggaaggagaggtctccataaaaccacaaaggaaaagggtagctcctacagagcaggtttcaaaggagaggatcctggccatttcacaagatgagaagcatggacagcactggagaaaaacacattgtactttgcatccatttccaatacccagcgcccaaagtcaggaccattgggactggatttgccctcagcttcccagacctggggcaatctcaaaccagtccatttccagggtcctcctcctaccacctcagctctgcctcttccaatatacctctatgtccttcactttgttccaattgccctaatttggggatattagattccctggccactcaggaagtacagaaaagagagcggtctaacgaagccgcccttttctgtacagttcctcaactcttctcctagggagaggcgt

SEQ ID NO: 442399 - DNA, 1467 bp, Homo Sapiens
aaaatgataaatgatcaatagatagtttatttatcacagcagtgattatattttacatcaaaaatgacaaattaaaaatgaaatatatcactatctatataagtataacctactgatctcccatattttaatccattttatgacccagagacattttaatagatactacaagatatatcataacattaattatttcttagaattttaaatatggcttatgtatcaggcttaacgagtcagctaaagtctttatcagctccctcaaaactgattccagggtaaattggaaagatttgaaatctgaatagcatataaaagcataatgtctatgttttccatagttaatttatttgctgttaggcagttcttcagccaacatcctctgtttctgaccaaagtagtgtatctcaagcaggaatagtaagacaagcagggtcatagatctttattgtttcatcccaagaacagtcagccacctgagtggggctctgaagactgaagtctaaaccacaagtaaactctgtatgatgctccactgtttcaagaagagagtcaggctttgaaaagttccagaatcttacagtaaaatcatacgagcaagaggccagcacagaagcatgaaatggtgaaaatttcaccctcctaatagcataggtatgaccaagaagttcaaaccactggtttgtcgtacattccttaagtcccagcctcgtcaaactacagtcaaccgccccggtcaccagcaaattctcattgtatttacaccagtcacaactcaagatttctgcctgatgtgcaggaatcacgattcttactcctgctgccttcacatcccatattctcagagtctgatcacctgaggctgaagcaaaccaccagggatgtggggagaccagattgtgctataaataatactttcatggcctctaaaggtgcacagagactttccaacagttggatcccacaatttgacagtttgatcccatgagccagacaccacgagctgttcacctctggtttggctccaatcaccactatacacctcctgagcgtgttctttatagacttgcagtggccctgcagctttggcagtgtcccagagctgcagcgagccatcgccactacaggtgatgaggacatgttcgttgttctcactccaagtcacatcaaacaaaccatcattccagtcaaagcttctaaaaagccttagcccagcttcatctggatccaatattagtagggttccacagcccgcgatgccgtagtgctgcgcggtggcgcaggccaggcggcccggcaggtacggggagaactcggcggcgtagccgtggcgtcccggcgtccgcagcatccgcgccgctccaccgcacaccgcactcatcccgcccgccgcccccggccctcgctgccccggccgcggaagccgttccgagtcggaggcacactggcgcggttagagagaccagg

SEQ ID NO: 442400 - DNA, 441 bp, Homo Sapiens
ttacaacatcaaggaaaatagttgcaggaggaatgaaaatgaagagaaacatagagattaagctactcacaattccattgtctatactttcctacaagggtataaatatcacaggtttctgtacatgcattgaaggtttgaatttcttgacagatgatggttgaatttggtgttttcaggtggactaggagggggttctcccactaggactgagacccagccttcttcttctggaattttctgaactgagactgaatggccaccgctgcacgttctgtctctggtgcatccatgtcaatgtcaaattcttcttgaactttcttctgtccatcattttcaccagatgtcttgtcttttccattggttgccccagcaccttgtcgctcactcatgttggctctaactcaacagctcagtcccgccgctcagcacagagaacac

SEQ ID NO: 442401 - DNA, 697 bp, Homo Sapiens
  misc_feature (586)..(622): n is a, c, g, or t
  misc_feature (652)..(652): n is a, c, g, or t
ttttttttgaattcactcatcgtaacttcattttattacaacatcaaggaaaatagttgcaggaggaatgaaaatggagagaaacatagagattaagctactcacaattccattgtctataccttcctacaagggtataaatatcacaggtttctgtacatgcattggaggtttgctatgcgtgtgtggattgtgtgtggatgacttctctctagggtgttgttcttttaatttcttgacagatgatggttgaatttggtgttttcaggtggactaggagggggttctcccactaggactgagacccagccttcttcttctggaattttctgaactgagactgaatggccaccgctgcacgttctgtctctggtgcatccatgtcaatgtcaaattcttcttgaactttcttctgtccatcattttcaccagatgtcttgtcttttccattggttgccccagcaccttgtcgctcactcatgttggctctaactcaacagctcagtcccgccgctcagcacagagaacactgctcaggggtcgctccgctctcgacgaattcgagctcggccgatttggcctgatnnnnnnnnnnnnnnnnnnnnnnnnnnnnnnnnnnnnncgccgccaccgcggtgagctccaattcccntatagtgagttatatttcagcctccttccctttttttcttctctc

SEQ ID NO: 442402 - DNA, 667 bp, Homo Sapiens
agcgggctgctccgtgcctccaccgacgacctcactcagctgcgttacgcgccgctccggctgccggccgcgcgccttgcccgccggctcccgcccgcaatcggcggctcagggcggacccgggtctctgcgttctcgcgagaagcgcggcgctgcggggccgtgggcgcctgagcccgcgcggccctcgagggccgaatatggggggatgcacggtgaagcctcagctgctgctcctggcgctcgtcctccacccctggaatccctgtctgggtgcggactcggagaagccctcgagcatccccacagataaattattagtcataactgtagcaacaaaagaaagtgatggattccatcgatttatgcagtcagccaaatatttcaattatactgtgaaggtccttggtcaaggagaagaatggagaggtggtgatggaattaatagtattggagggggccagaaagtgagattaatgaaagaagtcatggaacactatgctgatcaagatgatctggttgtcatgtttactgaatgctttgatgtcatatttgctggtggtccagaagaagttctaaaaaaattccaaaaggcaaaccacacagtggtctttgcagcagatggaattttgtggccagattcaagaggatttattggctatgctcc

SEQ ID NO: 442403 - DNA, 803 bp, Homo Sapiens
  misc_feature (42)..(42): n is a, c, g, or t
  misc_feature (53)..(53): n is a, c, g, or t
  misc_feature (105)..(105): n is a, c, g, or t
  misc_feature (248)..(248): n is a, c, g, or t
  misc_feature (667)..(667): n is a, c, g, or t
cggaacggtccaaggcgagttggctccgttcccagaagacgnccggggattgntttcggacagtgagttcgaaggcatccgtacagaaggcggatgagaccgganacggttctttgggtcggtagttgcttggtcccctgaggtggccccgctcagacgcgtgccgcgagcgtgagaaattcctcagctgctgttgagaagaggacgatgacgaggaagagccaccgcctccgccagatccaccgccnccgggccgagtgaggaggccttcgccgcggatagggtaacagcccgccgccgctgctgctgctgctgctccgactccgtatctggctgttattatcgtcgtcactgatttccccatcttcaagctccccttcttccttcggcgagaggccactggaggccggggccggagtatctgcggtcgccatccggggagcagcgccttccacacaaccttagccctccgtccggggatccgcccgacaattgcctcgtttcccttctttcctaacggactgggtcggtgcggtcttaccctactcggacaccaagcggcctctgctccccaacttccccgcaccccagcaccccagctctctctcgccggaccgtcgcaacccagttccctttcctagcgcccccttgctcctcagcgatcggngttcttccgcctcgcgagaaagggactctggtagcggctgtacccgaaacgtcacttcctgcgacacgcaggaaacaaaggctcccagttcacgcgataataagaccaactcgatactcactaggatttgtagtct

SEQ ID NO: 442404 - DNA, 288 bp, Homo Sapiens
ggcacgaggtttggtccacagccttgttttgatctttcctttatcctgttttattgccatttaccacgtactgtagaaacatccctttcaactgctgataacttggaaacaagcctacaaaaataagtaatttctaactactcctaatactacctataactacccctaagcccttaccactctaacgtgacattattaaattttttattttattaacactaatattttaactacaattacagcatatgggcaatacagaatttacctaaaaggatactaatttggaac

SEQ ID NO: 442405 - DNA, 728 bp, Homo Sapiens
  misc_feature (73)..(73): n is a, c, g, or t
  misc_feature (97)..(97): n is a, c, g, or t
  misc_feature (152)..(152): n is a, c, g, or t
  misc_feature (225)..(225): n is a, c, g, or t
  misc_feature (299)..(359): n is a, c, g, or t
tatttgcctcagcttaagacttgcaccaaagacaatgtgcaaagaaagccaagatttagtacactttaggaangaggagcgattccacattggtacnatagaagtcaaggttgcaaaaagaagcttttaaatcaagagcaaaaaatttagcnattgtttacagtagacataaatcttatacaattcaaaaagcttttgttcagatcatagagcataaaatggaanaatgtatatgcaggtgaaatctaactactgtacatttatcacctattaaagttgcttatatgtaccacagtgtnnnnnnnnnnnnnnnnnnnnnnnnnnnnnnnnnnnnnnnnnnnnnnnnnnnnnnnnnnnnnagtggcttttaatggcttctcctggttatcagtgctacaaaagacaaaaatcttctcatctgaacaggtgataaaaccaggcacaatcaaaccgttaccaaattagacccacccatagaaatatactatccacccacatattttccatcaaaagctttttgtttgtttcaatctgaatctttgaggcccatttggtcacaatatgttacaaatatttgtgtatgtgtgtgttttttacaccatgatatcatatgtttgtctggcactatcctaaagctagtttatagacgatgatgatatagaaacaacccagtgcctatatgacaaatgaactcactgggtagaaatgagacaggggaggaaggaatt

SEQ ID NO: 442406 - DNA, 1156 bp, Homo Sapiens
  misc_feature (117)..(126): n is a, c, g, or t
ctttgaggggctcgcgtgggggcccgcccggtgtataatatcgccctggtgggaccctgggacgcccccccctcggagttgtggttgaaaaggcgcggtgggtggcccccggggggnnnnnnnnnngtgggggagttcccaacgccttttttcttagccccgggtttttctgtggggaaagaacgttttaccccccggtccgctccctcacggggcgccccgcgcccaaaaaaaagggtttttgaaaagtttttctagggggggagggcgggcccccacgccgctctttcgtgcgttcagccgggacttggaagaagggggggtgttatcgggcctcgcagggtctcattttaggggcgcgcggagcgtgttcgccgggctcgtccgcgccgcctcgccgctcgggggtcaagctaaattatttctttattaggaaagcaccaacaccacattcttcgaaattactggaattttatttgcctcaggcttatgacttgcaaccaaagacattgtgcaaagaaagcaaagattaagtacactttagggagaaggagacgatacacattggtaacataggagatcagggtgacaaaagaagccatccaatacactatatagattgcaatattcaatagcgctttcaacaaaacttttttttaaatcaagagcaaaaaaattaagcaatgtttacagtagacataaatcttatacaattcaaaaagcttttgttcagatcatagagcataaaatggaaaaatgtatatgcaggtgaaatctaactactgtacatttatcacctattaaagttgcttatatgtaccacagtgtaaaaaaacaataccgaacaaataaaaacctcgaaaattgcctgatgaaaaataaaataaccagtggcttttaatgggcttctcctggttatcagtgctacaaaagacaaaaatcttctcatctgaacaggtgataaaaccaggcacaatcaaaccgttaccaaattagacccacccatagaaatatactatccacccacatattttccatcaaaagctttttgtttgtttcaatctgaatctttgaggcccatttggtcacaatatgttacaaatatttgtgtatgtgtgtgttttttacaccatgatatcatatgtttgtctggcac

SEQ ID NO: 442407 - DNA, 505 bp, Homo Sapiens
  misc_feature (129)..(129): n is a, c, g, or t
ccaggaagtgccagtagccattggtaaatgccataggaatacccaggaatggagatcccagcttcaacatggggcacagaacccttggccctgtttatccagctatctggggtggtaagcacagttgcnccaggcataggaagccccgcagaggggcagctgaagaggaaggcacatttgggggaaggatggcacatgaggtgagatcggagttaatcaggccagattatgagggcctcggatgccatacgagggacatgatgtttcagatcaattcctcaggcagctgtgtggattggcgatgggacctgcaataactctgggttacctaaaatagtggcagtgaggctggaaagaagtgggacaggaggaagtcatcagctacaggtggctgctgaaagcagagagggagaaatcacccaggaagaatggagacaccaggggaagcttctagataaaacagcatctcttggctgagctaaaagaggagcaaatttgtcttttc

SEQ ID NO: 442408 - DNA, 1189 bp, Homo Sapiens
  misc_feature (584)..(596): n is a, c, g, or t
ttcttatcccgcctttgcgctcgctcgttgacacctctcttttttctaccatgtggtgtagcggtgtgcgggtcctctgaggcggtgtcccctgcctcgagggcttgctccgttgggggcgccgctgcccggctcgcctgctcgtggacgtgcccactgggtgtgttgccaccggggcttctgcgtcggaagggtgccgactgaagggtgttttcgcgcgcgtttcttgtctccattgggggctgcgacattgttttggcccccccttatcgtgtccgtctgtcgagagttgccccgccgatctcagcctgctccatgggcctcaggcacggccgagagattctcttgacctcgcacttttccaacaaggtggtcacaagaccccatcacatcagtcacttgggtatattctgacgctggtttctggaaatgcaccatgaaggatttttggcataaaaacgtttttgaagatagcctattgtccccaaaatgcacctgggtttgggtctgcaaactcctcaacaccacgctctgtccaaccaaccaacggccaccggtcgaccgtcaatggaagtcaaatcccnnnnnnnnnnnnngtcccctttaaaacaacaaaggaaaaaacaaataaccagagatgacgatcgaggctctacacacgtgctgggtttccgtaggacatgctgctatggaaacgcggtgcagcagccccccagaggcgacgcggcgcgcatgcgaggtcgagcgatccaggcagctactcgggctccatggcctcctccggccgcagtggatgcatgcgtgcgggggagccgggggcgggggcccagcaactttccacgcagggactgcctctcacaagagcacttcctcctcccccacggggggcgggtcggtgccctggaggttgtcttcgctgccttgcttccttgagctcagacagggactcacattccctggttggttttttggtgagcaagtttccaggcgctgacagtgagcgttcctgccgccggctgccctcgaatgggttcccaaaggagcgtttacgtatcatggtcttcaccaggatcacggttgccaaggctgggaatgtgtttgactgagttctggacctcctcttcagtcacttcgaccagcgtgcagttctcatcctccgacggcaacggctccgccccatgcctccgct

SEQ ID NO: 442409 - DNA, 734 bp, Homo Sapiens
  misc_feature (18)..(18): n is a, c, g, or t
  misc_feature (24)..(24): n is a, c, g, or t
gcccccctcaaggccccnagcaanaggctacggcaacaggcaggcgggcgttaccttgaagctcaaaacagggactcacattcccctggttggttttttggtgaagcaagtttcccaggcgctgacagtgagcgttcctcccgccggctgccctcgaatgggttcccaaaggagcgtttacgtatcatggtcttcacccaggatcacggttgccaagctgggaatgtgtttgactgagttctcgacctcctcttcagtcacttcgaccagcgtgcagttctcatcctccgacggcaaacgtccgccccatgcctcgtgacccaggggtgcagcttgatttccggcaaccacgatcctcgactcggggttcttgtccagcatacgggtgatcaggtccttcaagtcctcagctatgtcgggctggtctggaaattcccagggcctgactcttgatcttactgtgtaaacacatgatccgctcgtccatgaatgggcactggccaaagacaaagcagtatagtgtcacacccatggcccaaacatccaaggccttcccagagaagatcttgcgggtctcagagagcgactcgggtgccatgaaggcgggcgtgcccacggtgttggagaggagcgcgtcactgcccttgaattcattgctcacaccaaagtcagcgatcttgatgtgcccatcttctccgaccaggaggttggaaggtttgatgtcaccggtggat

SEQ ID NO: 442410 - DNA, 732 bp, Homo Sapiens
ttgaaaagtagcaaagggcatctgaagcaatatcaaaatgttgacaactccacgtacttaaagaaatctctgaattgattagaaaagaggatgattttggcaagtggttcatgtcgaatacattctctcagcataatcccacgacgtaaggcaatctgtggggcttcatatcctttgaggagcatagacaggatatgaggatgagcactaatatactccacagtaggactccgagtgcctatctgtcttctcaagatgttgttaaatatctgggtcacatctttttttccctcaaagtctatcagctgcaggtcagctatcagtgtcaccagcaggccactgctgtagagttcttgtgctagctgagccactgcttctgtcgggggttctttctcgtttgtaccacacagaatttctttcattgcttgcagtgatttagacacttcttctgaagccttgtctgtctttttgtcttgcttttccaaaatggccaaattgtctttcaggattttcacaatttctgctggatttttgtgtgatttactaaacaaaggcatttttttcatgtgtagaaatctcttcttccaatatggaatgatagggcagctgtaaatttccactctctttgcttgctctcagattccaagccttgcttgtctcttaatctgtcacaggcagttctgtttctggtcaaaccagcttgcttatgcgttctccactccctctctcccc

SEQ ID NO: 442411 - DNA, 1230 bp, Homo Sapiens
ttttttttagtacaagtggtttatttctcttccaggtgaggccgcatgtatataagcaaaggtttgcccacctggttccttcaggaactccccgaggaatctgtttagtttccatgcattaaaaacaaccctctagttgccaataatgaaactttaagaagcaacactttgacgtcgcagagttcctctctgcatgtgacgcggatataccaaagtgagtttatggcatacagtatgcatgggttaatgtaggtgagacagggagtcccggctgccctgtggccccattctgttgtggaggcttcgctgggagctgagaacaccctgctgtccatgttttgatgacaggtggttcttccaaaacagaagcaccgagtcaccgcacgcccctgcttcagtgtgcgaggccgtggggctctggtgttgtgaactccaggttggcaggaggttggaagcaccaaagaccccaactctggtccctcaacaggcagtattgggggacattattccctcctggccaataagctcctgtggcctgggacactgggtggggacaggtggtgggggtggggcagggcagaggcctatcctcctataaagacacagttgtagcactttgctaaaaccttttctggcaaacttacttggagacaacagggaggggacagctgatgtaggcatttggctagtcccctagaacagggaactctggctttccctcttggcttttttctcctcttaaagatcctccctctgtgggtgagatgaacccagatccccaccaaacagtagcttgggacaggatgcctcactgatccttatttaagaatcgactccttcccgtctcctccagatctgcagatctccagatcagtgccagcaaaatctgcaaaagtagtgacctaaccagggtaaggaatgagctgcaaatctgttgtaaaaactggatgtgctaggagtttcaattctttggataatcaacatgtttaaaacactggagaaaagaaagacctaaagtcgtttcaaagtgtctgttcatacctgagaccatgcctatctgcagctaacacattctgcagcattgattctggaatagaggcgaggcaatggagggttagggagacaggcggaatgtggcaggctttcacctctgttcccaccggggttcaccagcctgtgatcccccagccccggagccaccagccccccactgcagagctttcctgatgc

SEQ ID NO: 442412 - DNA, 1346 bp, Homo Sapiens
attggtcatgtcagtgatgtcgccaagaccctgggcgtacagaaggtcccgcagccgggtcacctcatccttcagctcgcggatcagcttgttgttggggtcctcattgatgacagcattgcagcggatctgcttggcccggtcagcatacctcagcgtgctaagggtctcatcgtagttgatgtctgcaggactcaaggctgccaccatagctgtccttgagttaccgcccaggttttcccggaggagccaggtcaacacggaatctcggtacggaatgaaatctgtcttcttctttttcttgttcttgttgggtccggagtccatttcagccagggcggagatgaccttgcccagggtggtcagcgacttgttgatgttggccccctccttgaggcgcgtgcccttggctcccgtggagtcagcccgctcgctcccagccaggtccaccaggctgattttgctcaccttctccgtggtgatattggtctctgcgtcatggcgcttctgggtgaagatgatgttgaagacggcgtgggagcgactgctggtctcattcatgttggtggccgccacggtcctggccttgttccctgagtccatgaggtcctggatgtcattgtaggaggtgacagccagcttggagaggtcctccacgtagggccccagcagtgggtgctccctcacgcgaaggttgcccttgttcttggggttcaggaggtcacggacgcgctcacagtaaatctccatgtagctgacctccacggagtaggacatgttgtcgttggtcgtgtcgttgatccgagagaagaggtcctcgcagagctgtgggatgatgccctgctggtccttctcctgcttgcccatcatggtgtaggacttgccggcacccgtctgcccataggcgaagatgcacacgttgtatccctcaaaggcatgctgcagcatctcctcgccgatgtcccggtacacctgcttctgcgacgcgtagttgatgtcctcaggtgaggtgtgcgaccagtaggagtagtcaaagctgaagcttttgggcgtctccttgggctgtttggggttaacaatggtggtggtgcttccagacatctgaatgatgcacttggagtcacggctcatttcccgggaattgaaggggcggacccgcaccgccaccttcaccgaagccccggccatctctgtggccttcgtgggtcactcctcgcagtagtgggagccccagtgtggggggaacacctctccggcgtcactggcggcggccccgcatgggcactggcatgggcgcgggctctcgagcccggagctgctgccgctcgccggctgctctgcgctgt

SEQ ID NO: 442413 - DNA, 439 bp, Homo Sapiens
  misc_feature (415)..(415): n is a, c, g, or t
ggaggcaggaggatgggggagatggaggccaggcctatcctggcccttgccccttgctctggtctctgatctgggatgttctgtacgcccaggaccagaactgacagaagggctccttgtcccatcttatcacttggacatcctgagcctcctcagagagtgcagaccagctttagctgggcccccaaaaaaggtcaaaaggagagcagcagggtggacatcagtaggactgaagtggagccacacagaggggctagataggaggtcgtgtggcgtcagaaagggtcatctgtaggggtcaaggccaacatctgagcctgagtagtgcacctgccctacaaggctctgagaatcttccctgagtgatagagccaggaagagggccacaagccccttcgaaaccccttcccacagncctggaggccctagctcaatgcat

SEQ ID NO: 442414 - DNA, 744 bp, Homo Sapiens
actaatttattaaatttatttataagaaatacaattgtcaaagcagcagctctcacccaaaagaacagcccattatctccctggagcagacttagattgaaacttaaaaactgttttgatccaaacattgcttactaaaatgccaagaaatcaaaatagtaattaatggatagtaactaatgtagccattgattaccatgtaactctgggtcactattcattagtaaaacgagattgaggacttcaaaaatgagtgaagattgctaagggtaccttaagaatagggttgtcttccgtattctactgtcgaaatatggcgcgaaatgggcgattatacacaagaatacattgtcagctggaacgctataatgtatcatcacaataaggaaaagtaaacaataattacatagaaaaacatggccgtgtttcataacatactcaagacagaaaagagcaaaactcaccaagtgtttaaattatgagttatttcaactgttacaaaaatagaaaacagatatacaattctttaaactgggtcagaatacaggaagatgttaagaatgagatcagcccccaaactgagggcaaagtggtgggcgtggatcaaccaagcgaaaataaactcgacttaacgtaggagcagtttcactctactgtactttgagatatccagaatatttaaagagaggagaaccaggactcttcccctggcccccagtggtctttcatcatagaaaatctgtt

SEQ ID NO: 442415 - DNA, 877 bp, Homo Sapiens
tccctttttcttacatcagattttattatactgaaatacaagctacatttttacaaaatagaaattctttgtgagtggattgacttaattttatttctgtataagctaaatatgttgatctgttttatgaacatgtattttataaaaatggtcacaatatattttttaagttaactgatttattgagggaggaggagagagttgaccaaagtctacatgcatagacagtcctaaaagcgtatctcaaacatgaagatgtaaatttgagagttaatgatacaaatttcagcaaaaacattttacaggcagagagtgttttggtgtttataaaagctgaactccttttgaagggcttttgtacaaatacgcatgctcatatactatatgcatatataggtgtacttcattttgagaaagtccagtgtaatactagcatcaaatttacaaaacaggtttagtgttgactgactgaagaactcactacaggttttacttcaactgcttacattcaaaagtattcaatttacaaattttaggtacttactgtgtaaggtaagtacatctatacataaatacttttatgcaggtataatataaacatagcaaatagctgaggctattttctaaggtgtttggcttagtgaaccttttttacatctttatagttttaaagtcaaatacatagcagtctttatttgggtgtatgttatcacagaggaataaaaatcagtaatgggactgggaacagtatacccactaagttaaattaagtcattggttaaaacaccaaattattcaaaaccatttaagagatatgccccactaaattccctctgaatttagtcatttacagatgttgtgtttcgtattcctgttc

SEQ ID NO: 442416 - DNA, 569 bp, Homo Sapiens
  misc_feature (29)..(29): n is a, c, g, or t
  misc_feature (87)..(87): n is a, c, g, or t
aggaagctagggtgctataatctgaatgnaacgtggaaataaaactgtcttttgccttggaccttcttggttagatttaattaattnaccatttatcagtattaagaaaatggcaataatttgtcaaagtggaattgggaaggtgtttttaggatttggatatgaagcaggcttcccatgtgaccattctcacttcttattctgaagtctaacactctgcttttctttctctccctctcttcattgattcttctagtggctggtgtttggttattgtgggaactgagctttcatctcctatgttagccatagagatgagggctttgagggcaccatggaatccgattgctggaaataaatcaatcttaaaggaaaggaaaatttaaaaatcaggtgcaacaaaagcaaaatgagaaaactgctaaactctacaattctataaagaagaattgcataaaaaggaaataacaggaaaaggtaagaaaatttaaaaggatatcagaaaatatagcatacagggtcagaaagatttgagaatatgacgagatggttttagaaggcaggatggg

SEQ ID NO: 442417 - DNA, 647 bp, Homo Sapiens
  misc_feature (362)..(392): n is a, c, g, or t
cggtaccggcttgtactgtacatagtgctattgtgcataggtcttatgctgttttcactcaagtgtgtgctaagatctagccccattgactcttctagaaatgcagtattgctttgacctgccatgtggcactccacaatgtcaattgcagtttacacacattgcctaaagtgggggacacctgggtgcccctgaccccttggcaccggatacaggccacgataaacatcctttcgtgtgttcccttctgtgcttgtgtggcatgtgtacccaggatgggcctataggtcacagaggtcagtttctctttggttttccagattttctttagaacggtgactgaccctcctacttgaggccgnnnnnnnnnnnnnnnnnnnnnnnnnnnnnnnattgccagactacctaatttttgccagtctcatgggtagatagtggtgcagtgctttaacatacattcatctgatcagcattaatttggggaattttttcacttagcctttctggtttcccttcctgtgcattgcccattttctcatggagtttcttatcttttttggtttattctcaggagttgcttgtacattcttgggcaattgcagataattccaagaatgcatatttgggctgggtatggaggttcactg

SEQ ID NO: 442418 - DNA, 268 bp, Homo Sapiens
gagaaagaaaaagggaaaggtaagtttcacggagagaacaaaaggtttggggctgggagggaaacaagtgaaacaaacaaaacacgaacacaaaccaaagcttttacctaaagacaaaatatgatttaaatgccaggtttcttaagttacagaagtatctttttaaaaagatctgcttttatacagaaattgaaggatgccatattatgagtgctttaagattttattctactgacttctaaaactgttaatatatctttttttaaat

SEQ ID NO: 442419 - DNA, 719 bp, Homo Sapiens
  misc_feature (654)..(654): n is a, c, g, or t
aaagtagttcgagctcgaaaccgccttggtaaacaattcgtaggagcgatgacaacggttttggcacgctgcaatgcttgtaagaaccaggaagtgactgggtaatcagaagcacaatgcatccagtaccctgtctcttgtaactgtggtgtaaactgtctctagcctctatgacctggtggttactagatcagagatccatcaacacccttgttctatctcagacgtgtgtggagcatctgtgtgtcagtctagctctctggatggcattgtccgtcagtaaggccttagggacatgagtgagcccttggataagctccatggaccaccattggagggcccctgggagaaacatgcactctgtggactcgagtgggattcactaggcccatgcagagatccatctcacggtgatggtcacactgtatgaggtcaatgctgcaggagtcaccgagtaccctgagttatattcaagacgtggagctctctttttcccgtcctgctttctttccagaagtgcctcagatgcatcctccccttctcttttctccacatgaagacgtcactgaccatcttctctggtttgctttccaacaccgagcaccaagtgcttcaaaggtcatggtgccctggggccgagaggcctacttttanggtgggcggcaatttctagtaaacccccaagagttaacaattaattgggaaaaagggcccccaac

SEQ ID NO: 442420 - DNA, 1079 bp, Homo Sapiens
ttaaaaataaaggcataaattaaatttaagtagtgagatttatcatccatttcccataaaatgagagctggttaatcaggaccaaattaaattttaccaaatggatgtaaccagggcccaatgaaaccagtgacatacatgtatggtaagcaacctcagaaacaggaaaggctgtacttccttttcaccaaagagacaattctgctcccagaaaacttagctatgaatacacttgaaatgagagctttaccaaagcatgaacctaggacacatgcttttaaattggcagttaacattcttgaaagcaatggcttaacaatggttattaagtgatgtactgcttaaagtaaaacatggactatacctgattacaaattacatccagtctgtacaagttgaatacataccatactttaataaccaagacaattcagctgtttttccagagtatatttcaaacagagttggcatataacccgtatgtaacaatattgctgtgattttagtcatatttaagggtccaaaatatgttcacaaaagaacagtttgtgaatgtcaaccagtttttgctttatattccttcaaaaacattccaccctggtcattcacactaatctacatcactgaaaataaccaaaataattcacagtctcacctctatgtaaaaattctaattgactcaacagggaaaggactgccctgctccttttgaggaaggaaacctgcaaggcaagttctcaatccctaaaaccaagcaaaaatgttccagtgcagttgctgtagccatgtatttaggatttgtatttatagaattaaatttgagaatgaaacatggccatacacatcgcaataagctgcctctcatatcaaaaatacaatgcaaaatgacttgaagacatttccaataacacagatttgaaaaactgaacgcttagacataactcctgcatctttctttaattaagaagtcattgccacacttacaaagttagaggcagtaatctatattagcgtgtgattaatcaaagagtacacttactaccatgaacttgggccctatgtcatagaattattttgcc

SEQ ID NO: 442421 - DNA, 695 bp, Homo Sapiens
agttctatatacggaaataaatataaatgggtgttctataaaataagtatgaaaacccctagtacttctaaaactaagcggggacagctcttagaaaggggtgtttggcataagacagaaggcaaatctcagaacttgccaaatacaacactcaaaattctgtgagataagttagggaaacgacacccatcttcaaaaggctgatcaaaatcaaccttctagagagggcagtgttcaaggtgtggatcattttaatgtactgaggaacaaatcaaagcaaacacaggaaataatcttttgaatatgatcaaataaggtgggagaacccagaagccgtgcagctcaaatactgtgtctgactccaacttggatcaaatgactctaattttgaaagtgatggatgagttccccacgctgtgcagctccgtggtgaagttcactgtgttttgcttttgttttgaaaggcaaagaagttctgtaatgccagtagtaccctgttgtttttctaggttgttaggcttatgtctttgtggacaggatattttttcaacatagtacaaatacagtcaagaagtgaggagctgaaacaagctccatgagtttagggtgagactgagcgatgggctgtcatgattcaagttgaggtggcatctctttctcagggttttcaaacggcgcagactgcagagtcctcc

SEQ ID NO: 442422 - DNA, 721 bp, Homo Sapiens
gcactttattgctagtacaggcaaaggcaaatatggtggatacatgcgattgagcattatgctccttttaaaagagagaagaattagtgaaccatatacttctataaatggatctcatagagcagttatgattggaggtaaaaaccagaatgagatctagaatacaacctcaatatgtaagctgaaaatacacatgaacgacaaaagattttgtaagaaatgtatgatgaaaagctacacattaaacatatcagaatggttgctatggaaagggtgagagtgggaaatggggagagaaaggactaaaaagacccaatcaattataggaaagagaggctttgtgaagtaaatagtgataacgtattatgaacggagggatttgattccctcaatcctctgaaattatgttcttaataaaacaaaacatacacagccattgtattcttaggtgactacatacagtctccaagagggaaatgattttcccaaaatacacagtgaacgttaaagaagtccaggatcaatttagaagcacaatgacgtcatgatttttcattggcaactcttgcttcccctggccttatggctgcaaagtggcttgcacatcatgtcactttaaaatggccttactttaaattacactaactgtattttaaaaggaaggatttgaatggatcatatgtgggcaaccaatactttctctttgaggaagggtgtaact

SEQ ID NO: 442423 - DNA, 492 bp, Homo Sapiens
atctgggaggggcgggagcgtcctggggcggagccgcccccgcacccgccagggagagggagctctgcctgaccaccggctacgcaggacgccgaggcatgtggaaaacgtttttttaaacttcatttttggctattccaaaaaagcatatcgtggggtatatcagaattcttcggactttcttgcacgtattaaatgatttggtattgtttgtatcttgcctgtcattttctcattgcctgggcctctgagagtcagacaggtcctgcaccctcagaaagtccttgcacctttgagggtccgctgggcctgtaagcagggcttgctgccgtcccagccagcccacccgccctgctccctgcagacgaggccaaaggcagccagcagtccgattgtgagggaagacccccttcatgggaggctgagcaccgcccctcgggctgccacaaagcagaacctactccagatgggctgtagatagggagagcacag

SEQ ID NO: 442424 - DNA, 1135 bp, Homo Sapiens
  misc_feature (55)..(129): n is a, c, g, or t
  misc_feature (760)..(779): n is a, c, g, or t
gccaaccacgcgaacaaaaaaggttcacagcttaggggtcttagcaacaatccannnnnnnnnnnnnnnnnnnnnnnnnnnnnnnnnnnnnnnnnnnnnnnnnnnnnnnnnnnnnnnnnnnnnnnnnnnaaatagcaagccgtcacatattgggcccccggtcccaaatgatttcaaagggaaagattttactttccatttggaagacagcttggaaaactcggccataatacatagaccactacatcatttcacaagttgggagaaaaataaggcccctccgaggcaatctcttctgcctcccaggggggaagggacacgggacagtgcaaagaccgtggaagatggcagtaagtagatgaaactccaggaccaaagggattgcagccttggccatggctgaaggtttttgctccattcagtagaaactggtgctctaattcattatcaaaaatgcttacttggtgtccacatggcacttgttttctcaggttaacatctgcctacagaaaactcaggcagaggggtgagggcagatgcctactagcataacacctggtttgcagcacgatacaggtggaatgacaagcccagagaatttcagacgaaaacatctggcttgagttgctacgaatgaagtgtgagagaaacgcggatccccaaagaaacccaaactgcccgcccaccatgtttccccctccaacatacagctctttatggctaccccctattcttaattagaaaaatagtctcaatatgnnnnnnnnnnnnnnnnnnnncagctgctggcactaaagtttgcaaactatggctcaaaaagtcttcctgcaggtaagtaaggaatgtcggcattcattttctcttctatgaagtttgcttggaagttagtcaccactaatctaaaccttgagaaagtgagctttcaaccatttctctcagctgcgacttgggtctgacttcccagttgcagtcacagaacctctcagcctgtttcagagaagcacttggaggagttatgtcagtggctctgggccccgtcccacacctcttggccgctcctccaccttagtgcaaattctgctccagaacctttgttctggtcacatggtggcactgttgcccctaaagcacggcc

SEQ ID NO: 442425 - DNA, 492 bp, Homo Sapiens
ctagtgcagaaagtatctgtattagaattctagagtaagtcaagagctcacattcattaaaataatgacacaactccacgggggtggggagaacagcagtaaagcaaccacatactatactattagactggcaacattgagactgaaaatatccatgaggagaatactgacatcttagtggtaagcatttccttttaacccggtaattccagtagtaaggatcatacaaatgtaccgctaggaagaggtaacgtatatgatcatcaatgggagaacagtaaaggtgttactgtggaattcccgacaggctttcacttggagggggaatatttgaacacaagtttaaacaacccagggtaagcacacaatgcactatgcactgaaaggtatacgtttccgctgggtgtttatacatttcaaagttaaaagcatacaccttacccaaagtttcagaaacctggtttgcaaatctgagttcatgtgtgtgtgttt

SEQ ID NO: 442426 - DNA, 438 bp, Homo Sapiens
cctcccctcgtctccactttcagcagcttcagggacacacagatgtccagcaggagctctgtcccatgggcgctggccctcacacctgcagccactgccgccacgtccaggggccctggggcctcggcgagaaggtcaaacacgcccagcttgcaggcggcgaagagaacctgggacaccatgaagccgttggcgtagtcattaaggaggcgataggcctggtcctctgaggatcccatcttgtctccaatccagccgtggcttccggagcctctggagcgcttgcttcaaggagcacagagcctgctggcaaggtggggaagagccacccgctcacggctgctgcctgactctccctgctgcctgcccagtactcaaacaaagacggatcactctagaaatttgcattaaccgtattaggggatcacaaagcgtgtg

SEQ ID NO: 442427 - DNA, 697 bp, Homo Sapiens
  misc_feature (365)..(374): n is a, c, g, or t
ttttttttgccacctagagatgataatttattgttttaccatgactcagaagagaaacaacataaagagaatatttcaaatccccacaatttccttcctcaacctcactactcttaacatttctttatcagacgccactggcttcctaaaatggaccactgactatgtatgtgtacacatttcattatgctgccttttctcttatgattaaaactttagccctcattcgaggtttccaatggttacttttagtggaggagttccctagcttttaaaaaaccacttttcctctaagattccattatttattgaaagaagtctttctagaaatgttaaggaggattttaaatgaacacattcaattnnnnnnnnnntcacgtattgaacatctaccaagcatctggactcttcggaacctagtaaaatgaaaaaatccagttttaacaacagtaacttcattctgcgggtatacagagacaagcacgtttcttcttttggtctaatttattctaaacgaagaagctgggaactgacaaaacaggacaggttgtttttaatccagtctacaaataaacaagacaatgcctgagttagccctctatatagatttaggcttatgctgacctcgttgtaaaatctgtatttaactaaaagttaataaaaatacatatgttcattttaaaataatcggcacgag

SEQ ID NO: 442428 - DNA, 892 bp, Homo Sapiens
gagttcacgtagcttggattatcctgttcttagctgagcgacgaagaagcactggatgagttgttccagggatgagctggttgcttctcggggtggtcaacattatacgttcctgttgtaccctgacaaattgttaaatctccttgatattggagcactcatagaagacacaggtgtggatgaacccagggatgttgactttgagtgctgtgaagaccatctcgacaatgaaaacttattcagcaaggcttcctgtaccttcagatcccagaggcatccaaagagtaaaatgaataatccctggaagacattgaggatggcaaatatgatatggaacacaaggttggtccctgggaacacagtggtgagaccgaaaccccaagtgaggcccaagagtggtgtgaggaccccaatgctcttgctgatctgaaacaggctgctcttctcctgcttgcatggcttgtctccaatggaaggcctcaggatcttggtgatgaccacaatagtgatggttatgttcaccaccacaatgatcagtgctgggatggcgaaagccagcagggccttggtgtcctcccagttgagccaacagacattcttcctcgtatagacttcccggggctgggtggctcccagcgtgatgaccgagatggcaagtgggcagccatagccaagacagaaggcaatggctttctgagtggacctgcttgtttcatgcagaatgaaaaccaggcgatagaacagcatgaggcccagtgtcagcatccagaagaagacgctgaggtagaagaagtggatgaagaaggtggcagccacacaggctgtcttgcagagtatgtagcgattgtcctggatggcagcgaccacaatgaaccaggctcgtgccgcctgc

SEQ ID NO: 442429 - DNA, 1007 bp, Homo Sapiens
ttggtaaaagtggtgaagtcatttttatttcagtacttgacaaaataccccataaaattcaaaacttctaccattatacaaaaataggtctctacaagtgatattatctgtcttcatcaccagtagaatatattaggcaaaacatgtaacttcagtagccttataagaaaagtgcaggacacctcgagctacacattcagcagtattgtaatgcgtaaaagtttaatcttttcacccatttgataaatacacaaggtttataatttaatgttttaaattagcattccacaaatatacaggtaattcaataattattgtgcatgaatacatacacaatgcttatatatacaaattccagtttgttttcatgtgctggcaagggatttgtatacaatcataagctgtgttcatattggtcccattgaatattcacaatacaaaagcacaaaagaaccattgatttacaaaaggaaatctatttaaaatcacttcaattaatgatgtttcaaaggattatcttctcatgccagcatgaaattgagtagttgaacctgactgtatagttccaagtcgtctttgcagtgcctctagccgagtgatataatctgttagggctctgtcaggatcgtaattctgaagctgagaacatgctaaagaaccaggattgaaatcagctggagtgcctgggtacctattctgaaatggtaaaggggacctaatatagtccagatctgatcttgagcgatacgtagtatgtcttggttctccatataactccagcccaccagaagaatgataaaatgagtcagtcttttctgcaccttgattcagtccaaagccatctctgttaatattgatggaaacagaacctgtgactcgatgccaccgtcgaaccaaaaatttcattctggaaattgcaatggatactctgacggccgaccgaaacctggtgaagccctttgggcgattggtgatcacctctagatccgtgaaagctggctgccccc

SEQ ID NO: 442430 - DNA, 986 bp, Homo Sapiens
  misc_feature (18)..(18): n is a, c, g, or t
  misc_feature (42)..(42): n is a, c, g, or t
  misc_feature (95)..(95): n is a, c, g, or t
aaattcaaggatcacccnatgacccctctgccccctctgaanaagctgcctgaaaaagccccccttttgggtgtttcccaaacccccgggcaggnagagcaaagtgggcctgccttaagaattccttccccaagtagggagaatggtaccctcaaaatgccatcccttagcctcagggatgcccattaaacaggtaaaatgccaagttttcacttttacccccaatacagtacagtgtgcatgcaaagccaaaagatctgggttcagcagaattagaaccttcacaaccacagaatcacaaggcaggccaggcggctctaggaatgccagagcaaagtgccagagagtagggaagagcccacctttcttaagagcgagtgtctggagtagaaggcgccaagttcttgccactgtggctcccctgtctatctcccctgtctccgaggtggagatcagagatctcctggaagcagggagtcatcagtcctctaggcctttattccctccaaagctacgtaagctgtgcatgtgcaggctggatgggatggggcttgaagcttaaggagggcacagaaggaaatagttgtgggtgaactgaaatgataaagattcacgcaggggcagaacatgtctattctcagcaggaggcaaattgtgctgtgacattatccctctctgaacaaagcatgaccgtcctgacagctgagggaagaggcatccacggcaagggagaagcccacaagcagtacacactggcagctctccattcccttgttgggagccaggcctggggactctggcgggggtggaatcgggaggaatgttatttagccttactactgccaccttaagaaagataaagaaatacttgatctcaatctacatgaaaagcccaaactttcaaagaatagggacccaccatattactgatattaattatacattgatttctgttctctgtctctctaaaaggttataagaaaaag

SEQ ID NO: 442431 - DNA, 1061 bp, Homo Sapiens
  misc_feature (38)..(38): n is a, c, g, or t
  misc_feature (44)..(45): n is a, c, g, or t
  misc_feature (47)..(47): n is a, c, g, or t
  misc_feature (59)..(59): n is a, c, g, or t
  misc_feature (64)..(64): n is a, c, g, or t
  misc_feature (66)..(66): n is a, c, g, or t
  misc_feature (86)..(86): n is a, c, g, or t
  misc_feature (93)..(93): n is a, c, g, or t
  misc_feature (95)..(95): n is a, c, g, or t
  misc_feature (103)..(103): n is a, c, g, or t
agtaacctggacggaagggagtcctcgctgcgcagagncacacnncncgtaccaatgcngccancncgttcaggccccacgtcgcnccgtgcncnaggattancaccagatagcatgaatagcagtctcaatacaactggatgaggccctggacttcccgaggaaatggagtcacaaacaccaagccacgtcgactcttgccgaccactggcccagcatccactgaaagtcgggaacacaaaaatgtcacttttcctctttaagctgcctaacggtcactacaagcttacattgagatgctctaagtctgtataccttgtgataattagtaccacactgtagaattaggaaatcaataaccaagtgtttttattgcatatactgtagtcctgtctaaatgccttctagcaggaatatagtaatgtagtgcttattctgtgaatattaccatgtattttttacactgtacagtatagaaaacacaggttaactccgaagtggcaggcatgctccactacaacagacagacaacttttgctgtaagcaatacctagtggtatgagaattctatttcaagtcctaaaatatttcaacttacagcttgtttggaaaaaaatttccatttttgtaaaaatatatgtttcctgattacctcttgctaataaatctattctatctcagggtgaacagcgagttttgatgggtttcattcgttcagtcaaggaatatttgatgagcacttgctccttacccagcccagcctgggaccggagatccagagtgtcaaggacaccatacctgctttttaggcaccaacagtttggtggggaagactgtttcagttgcctattgcaccaagaacaagccactccaaaacataatgggcttaaaaccatttttgttacctttcacagttctatggggttgactggggtccagctgtcagttcttatttgggagtctctcatggaagtttcagtcactcagcaactgggactggagtcatctgaaggctcaactggaccgggtggtgctctagttggtgcaccaagatggcgctg

SEQ ID NO: 442432 - DNA, 431 bp, Homo Sapiens
ttttttttgctttattaggtcacacaaaacagaatgaattagcagaaaaatgtatgttataaaacagcatttactacttcaatttaattttttttactaacaattgtggacctttttgatgacacttatgtatgtttttaataaattatgtacttattagtacttaatgagcccttcctgcctcaatataaaattactaaacttggagaattacagattttattgtaggccctgatgttagtcactttggagaagctaaaaatttggccaaaatgaatgatccaatgatcctttaagttatctttatatttaatatagtgtgatccggggctacactggatttaaaaacatgctttttggaaaaatggtcttaggtaattggggcaggtaatcttcaggtggtgttttccaaacactacttggcacccaaa

SEQ ID NO: 442433 - DNA, 2354 bp, Homo Sapiens
gccgccaccaccggctgatgcaagttttattgagacaatatacaaacaggccatggaaacaagggttttgatgctgggaccagtaacgtaaaacggaatacaaaaataaaaaggcactaatctgttaagaaaagacactcgatgtattctaagaatataagtcatttaatactgttaattttatagcacaaaataaaacaagctatgatccccaaaaataattttaaaagcttacacagaaaatattattgcctgaagtttatgatctttaagttacaggtcaaaagagttttatgttgttgtcgttgtcgtcgtcgttttaaaacacacagtgaagaccgtctaagaagcaaggccactgttcctcctgtagggacaacgatcctgtctcagagacctgtccttctgctcctttagaaaacagaaccagcacagcgtccacaccgacagcagttactaggggcatagtcctccggtcgcagagggtggagttgaggcagagctcagtggtgtccacagaaagcattagtcttaggtactgtgttaaaacaatcaagaattcattcatgtttaagaggttaataaccataatattaaaggattaattataaacacctggcaaaaaaccacatcatcccttttcaaaaataaaatgttcatattcctctgagcaaacatcacaagagcagtggccatctgcctcaggcctgccttgtctgtaaacagctgtaaaggaaagctagcacagcgccagggacacatgagctcccaggagggcacagctgtccttccctttcagctttccaaacatgagcacagaaggtgtctagtctgggtgaccaaagtcctcaaacggcagccggtcaacacatcgtcttcctcgttaaccatgtcatcaggtggttccacacagcacagacatggctgactcctgtaccgcaggtccttcccgggatacacaagtttttaaccaatcaatgccctctagtacgtaatttgtttccttcccaggtgaaaaaccatagtgagttaatttaacatccaaatatttctttaaacatggtagagcagagcaagtagcagttatgaacacccaccctctgggtcagatgtgcactgctctatggagcacaacagtcttcccagaccagtggggaacccaggcacgaagctgagctgaggcagcagtgctgcattcatatgtttagtgtgaaaaacagagtatccctgcctcattaaaaaaactgacaaggttgtaagtccgttaagttttactagttttggcacacatctggagtgcagaactcaagctcgccttgttttgagctctgaatctcctggcagccctggatgccattttcatgggctgaagtaacgagctgattaattataaaaccaaaccacaggtatactctaggtatatctgattctgaagtgcgccacacaaggtgagtcggggtattggtcagtagacagggctgaaaggaaaccttgctttccaaaatggccagacttcttgcactctgagtcaactgctgtaattcaaaggtgtcaagcccttcagctaaatctggttgaaaaaggcctaagggtcgtgccctccttgaacaaggcacacattcctccctctgctggaaactccactcatggctcaacatgggccgggatgaaccacgtcactggccaaagggcaaacactgtttctaggcagagtctggggactcttgtgatatgtctgccacttgtgggtctacgccaggcctgaacccaaaataagccaacctgacacacctaaccagaaacggcaactgccgcagaccgtgcagagcaggaggcggtcaccgttctcactggcaaggaagggctaatctccaaggcttttagaggaaaaccacagatgggaagccatggcgatagttttcccaaatgaccattaattctgtctcaggaacactctcaagattcatgaatacagcagttatctgcctgatggaatactgatttaaagaaaaattgaaaaatggctgttctgctggttctgtctccagaatgcattgctctaaatctcaaaacctaggaacctccagacagggccacagtcacagcagatgatcagtaaatgaaagctactcagtaggctgctgctacatttctaggtctgctgtgttcactatgagctgaggcttttctttaccagggtccacaagggagagcagactgaattgcacagggttcccagaattctagtctgctatgtgcagcagatgatggatgaaccacacgtatataccagttggcttgtatgaacaggcctcttttagctaacagggaaatgctttaacatcaatacaccc

SEQ ID NO: 442434 - DNA, 406 bp, Homo Sapiens
  misc_feature (77)..(97): n is a, c, g, or t
gtacccgactgcatccaacgccgcacaggaggaacagtggccttgcttcttagacggtcttcactgtgtgttttaannnnnnnnnnnnnnnnnnnnngacataaaactcttttgacctgtaacttaaagatcataaacttcaggcaataatattttctgtgtaagtttttaaaattatttttggggatcatagcttgttttattttgtgctataaaattaacagtattaaatgacttatattcttagaatacatcgagtgtcttttcttaacagattagtgcctttttatttttgtattccgttttacgttactggtcccagcatcaaacccttgtttccatggcctgtttgtatattgtctcaataaaacttgcatcagcgtggtggccggcgttggatgcagtc

SEQ ID NO: 442435 - DNA, 458 bp, Homo Sapiens
  misc_feature (15)..(15): n is a, c, g, or t
  misc_feature (176)..(176): n is a, c, g, or t
  misc_feature (271)..(301): n is a, c, g, or t
gaaatccttgaatgnttttaaacacagtaccctaagaactaatgcctttcctgtggaacacccactgaagctctgccctcaactcccacccctctgccgaaccggaggactatgcccccctagtaactgcctgtccggtgtggaacgctgtgcctggttctgttttctaaaggagncagaaggacaggtcctctgagacaggatcgttgtcccctacaggaggaacagtggccttgccttccttagacggtccttcactgtgtgttttaannnnnnnnnnnnnnnnnnnnnnnnnnnnnnntaaaactcttttgacctgtaacttaaagatcataaacttcaggcaataatattttctgtgtaagcttttaaaattatttttggggatcatagcttgttttattttgtgctataaaattaacagtattaaatgacttatattcttagaataaaaaaaa

SEQ ID NO: 442436 - DNA, 749 bp, Homo Sapiens
tgttcgcacactggatggcttcttccaccagtgtgtcacaggacaaatctgctgacaagacctgcgttgcttggcgtcctgggctgagatccggtcaccggtgaggaccatgtgccatcgccaagcgacttccccgacagcacgggtgagtcttctggggtgccgccgcgcacctgggatggttcctattaagatctccggctgtgcaaactgggccttctcaaccggcatagatgatatgcacacatcatggcaagctcacagcccccgccgaaggcatagccattgacagcagcgatgactggcttcttgacctgggtgaggtggtcccagtgcttcaagaacttgctggagtaacagtcctggaaactcaggttctgcatttccttgatatcagctccagctgcaaaggccttatccccgccggtgaggacaatggcccccacaggccgggtcctcctcgaagatcttcagggcctggttgagctcgtcaatcaggccatcgcaaagtgcattgagggccttgggcaggttcagttggatcaaccccacggtgttagtttcttccctcttttttctgcgatgatgtactcaaagttagcacccgaggcgaagggacgccaggcgggacagcgaaccgggggcctcagcggtccgcgggcgcaggacagcagacacgcagggcggccatggctctctggaccgacgcgtgggtcgacgatatcccgtaatccgggcgtaccagcctg

SEQ ID NO: 442437 - DNA, 1098 bp, Homo Sapiens
  misc_feature (1064)..(1064): n is a, c, g, or t
agttgacattggtttcttaaaaaactgaacaggggtggccactttgtccttcttcccaagccagaaggtgtgaacgccagggcccagcttggtttctcccctggttctttgaaagttggcctttcctttttttccgacaaacgggggtcattccctctttcccggtcattcagtggcaaaaggttgaataaaaagagtttttttctcccaacttagttccttctgttaatgtcattttcaaaaagctgccattcactgtttctttggcccatcggctacttccatttttggaattgctggcaattttttctgccacactggatggtttcttccaccagtttctcaccaggacaaatcttgctggacaagacctgcttgcttgggccgtccatgggttgagatccgggtcacccggtgaggaccatctccatcgccaggcgacgttcccaacagcacgggtgagtcttcttgggtgcccgcccgcacctgggatggttcctattaagatctccggctgtgcaaactgggccttctcacccggcatagatgatatcacacatcatggcaagctcacagcccccgccaaaggcatagccattgacagcagcgatgactggcttcttgacctgggtgaggtggtcccagtgcttcaagaacttgctggagtaacagtcctggaaactcaggttctgcatttccttgatatcagctccagctgcaaaggccttatccccgccggtgaggacaatggcccccacggccgggtcctcctcgaagatcttcagggcctggttgagctcgtcaatcaggccatcgcaaagtgcattgagggccttggggcggttcagttggatcaaccccacggtgttattcttccctcttttttctgcgatgatgtactcaaagttagcacccgaggcgaagggacgccaggcgggacagcgaaccgggggcctcagcgggccgcgggcgcaggacagcaggacacgcagggcgcgccatggctctctggactccttcgcccggccccgcggagccgccccctcgcctatagcctatcccgntacccggggggggcgggtaaacccaggcccttta

SEQ ID NO: 442438 - DNA, 1305 bp, Homo Sapiens
ttggtgtaatctgaatcgctatcactttaatcagcatctgtatgaaggcagcagacagcgtttccctcagagcagccccattcttcagcggcagggacacaaggacccacaggccccgctttccgtccgagcacagcatgcccagagggaccagcgggggctcctcagcagaatcttagatttagaaggtgctccagtcaggaccctcacaggctgggtgacgaaggctgtcatgccgtgagaggtcgggccacgaccacgcagcaattggagaggaactgcacaccacggacactgctcttgaaaagaggatgatttacttgcttctaaaactgacaggctgcacttgtcctctccaagcagaggtgtgaagcaggggcagctggttctcactggtctttgaagttggcctttctcttttccacaaacgcggtcatcccttctttccggtcatcagtggcaaaggttgaataaaagagtttcttctccaacttacttccttctgttaatgtcatttcaaaagctgcattcactgattctttggccatcgctactacaattttagaattgctggcaattttttctgcacactggatggcttcttccaccagtgtctcaacaggacaaatcttgctgacaagacctgcttgcttggcgtcctgggctgagatccggtcaccggtgaggaccatctccatcgccagcgacttcccaacagcacgggtgagtctctgggtgccgcccgcacctgggatggttcctattaagatctccggctgtgcaaactgggccttctcaccggcatagatgatatcacacatcatggcaagctcacagcccccgccaaaggcatagccattgacagcagcgatgactggcttcttgacctgggtgaggtggtcccagtgcttcaagaacttgctggagtaacagtcctggaaactcaggttctgcatttccttgatatcagctccagctgcaaaggccttatccccgccggtgaggacaatggcccccacggccgggtcctcctcgaagatcttcagggcctggttgagctcgtcaatcaggccatcgcaaagtgcattgagggccttggggcggttcagttggatcaaccccacggtgttattcttccctcttttttctgcgatgatgtactcaaagttagcacccgaggcgaagggacgccaggcgggacagcgaaccgggggcctcagcgggccgcgggcgcaggacagcaggacacgcagggcggccatggctctccctcgtgccgaattcgccacccaggcctcgctactt

SEQ ID NO: 442439 - DNA, 1016 bp, Homo Sapiens
gtttaaaaaaaccttaaccaaggggttgccacattttttcctttctcccaagccaagagggtggtaaaagccagggggcccagcctggtttcttccctgggtcctttgaaagtttggcctttcttctttttccacaaaacgcgggttcatccccttcttttccgggtcatccagtggcaaaaggttgaataaaaagagtttcttctcccaacttacttcctttctgttaatgtcatttcaaaagctgcattcactgattctttggccatcgctactacaattttagaattgctggcaattttttctgcacactggatggcttcttccaccagtgtctcaacaggacaaatcttgctgacaagacctgcttgcttggcgtcctgggctgagatccggtcaccggtgaggaccatctccatcgccagcgacttcccaacagcacgggtgagtctctgggtgccgcccgcacctgggatggttcctattaagatctccggctgtgcaaactgggccttctcaccggcatagatgatatcacacatcatggcaagctcacagcccccgccaaaggcatagccattgacagcagcgatgactggcttcttgacctgggtgaggtggtcccagtgcttcaagaacttgctggagtaacagtcctggaaactcaggttctgcatttccttgatatcagctccagctgcaaaggccttatccccgccggtgaggacaatggcccccacggccgggtcctcctcgaagatcttcagggcctggttgagctcgtcaatcaggccatcgcaaagtgcattgagggccttggggcggttcagttggatcaaccccacggtgttattcttccctcttttttctgcgatgatgtactcaaagttagcacccgaggcgaagggacgccaggcgggacagcgaaccgggggcctcagcgggccgcgggcgcaggacagcaggacacgcagggcggccatgctctccctcgtgccgaattcgccacccaggcc

SEQ ID NO: 442440 - DNA, 414 bp, Homo Sapiens
ctgatcctgcgcccgggcccgctgaggcccccggttcgctgtcccgcctggcgtcccttcgcctcgggtgctaactttgagtacatcatcgcagaaaaaagagggaagaataacaccgtggggttgatccaactgaaccgccccaaggccctcaatgcactttgcgatggcctgattgacgagctcaaccaggccctgaagatcttcgaggaggacccggccgtgggggccattttcctcaccggcggggataaggcctttgcagctgggagctgatatcaagggaaattgcagaaccttgagttttccagggactgtttcttccagcaagttttttggaaggcactggggaccaccttcacccagggtcaaaggaagccagttcattcgctggttgttcaatgggcttattgc

SEQ ID NO: 442441 - DNA, 1167 bp, Homo Sapiens
gaccgcagcggcagggtattatttctttattaggtgccacttcaaagaacagggaatccaggtgggtgggggccacagggcaccaggtacagccctcacagcccaaccttctgagcccaggcgaagaagacgcccttgacatcatctacgcctgtctgaaggtgggcaggcatgatataggtgcggaggtcccggaccttgtagccactacgcaccagggcctccctcacctcctcctcagacactggcaccaccgtcagcctggcctccccagccaggtaccacgactcctccagggccccgatgaggaggaggtgccccccaggcctcagcagcgtggtgatgtggtccagggcccgctgaaagctggcaagatctgggctcacagcctccaagcagaaggcagagaccagggcgtcagcaggcaggggagctgggctcccagcacccaggggctggggctggtgcacgtcgatgggcaggacccgtttcaccctggctcgcagctggcgctccttatcctgccagcattcccccttgccctcaatgaggcaggcatgttggctgtacatgctccagttgaaggcccccggctcctcctgcagccagcgccccagctcctggcggttgacctccaggaaatctgtcatggtgatgtcctcaaagtggctgcaggcactgagcagctggtacacggtggggcctgaaccaatgtcgatgagggtgcgtctggacacttcaccggtggcgaaggtctgcgccaagcagcgcagcttccacggcccgacgccgttcgggttgcacaggtccccgcgagggggcgcgtagttgttgcggaggtaggcgcgcggctcgaagcgctggtaggccgaagccaccgccgcctggcccggggccgagtcaggggctgcgcccgcattggggctacggtctgcgccgctcatgctgccgccgcggtccgcccacgtgccccgctcgcctcgcggcccttttttctaccgcccgacccccgccccgaccggtccgctgtgggggcggcagctgaccgccgagccgcccggggccatgtgcgccgcatcctccccacccattcatccatctcccttagtgtccgggctgcagacacacccggaggtgagtgggcggcggctgcagcggcaatcgtcc

SEQ ID NO: 442442 - DNA, 498 bp, Homo Sapiens
  misc_feature (470)..(470): n is a, c, g, or t
gtgacaaattaggcagtattttctttctaactttgagctcagttaaaggaaatgagatggaatcatacatattatactaaaaaccccagattctttcagagacctgattcaatgtcccctcaccccaaaatcatttaccacaagataataatccatctgggaatttactgaattttagacaaaattacctatttggctaaagagtcaaacattctacatgaagactataaggatttccacttagtttgaattctgcagtgaaaacgggtatggctcagcttagctgccctcagccgcctaatggaaacatgttctttgtacaattataaaaagctgacatatgaatggcactttaaggggataggcatctgtttgccaggtcgtgactggaggtccaaaggcaggcagtgggttttcgctagggagccttttctggttcaaggaccccggttttcagccagctctgtggnggactggtgggaaagcaccgggggccta

SEQ ID NO: 442443 - DNA, 1985 bp, Homo Sapiens
cctaaagtggcttgggaggcctaaattttttaaataaattggtcccattttttggattaacaaccaagttgtttcccttaaggagggtctttttcatttataaatatttggataaaaagagaaaggtgaaccctgtggtttccaagtaacgggcttttgcggaaggtcttcatgggaggaagaggcatcatttgatattcagttagatctgcccacccccaacgggttccatcttctgggaaaacagcactcacttcaagccaactgtaatagcaccccagcaatgaccacgctgctcctgctggctcttccgtacaccagtaaatgaactcaccaatgtattgcacacatacacttcacagtagtacaataaagccctgtatcaggagtggtaattcaatgacttgactctatagtgcactgcagctttatgtcataccaacattcaaatattcaaatatccttccaatccatttggacaaaaatacaccatggctgccaagacacatgtatttttctttcttccatggactcctaaactgctcccacaatcagcagtgttcttctctcagaaattatcttaagcttctctactcaatgggaggtacacacagagacctgagaatatgcagaggccagaatctctgtctgtgctagagatcaactgtactctgcccacctggggaatacatcctctgggtaaagtactcggaagtaaattacattcacctggagacagatacgggctttcactgacagcctgtttagaaaacacaatgtctgtaagttacctcataggtcaaagagttttgtattatatttttcataatgggctatggcctttttaccctgttttaatacagagcaattgcagaaggacatgaattaaagcagattgcaaaaaagaataatcagttttggtatcgcctataacaaagattttcaatacaacctaatggttcctgaaaaaaaattctaccacacagaacaacatttggaattacagagttctgctgactaaaaaataaatacatttacttttggtaaggtcatttcagaactgggttttgaggtggttccaataagtaggttgggaaacgaatagcagacaagaagggttcaccataatgaataatttttataagactatactattaaagtggtgtattcccaaaataactttaatttttagacatcactattctacaacccgaaggttctgccatctaagtaagatgttttacatcactcatcactatcatcctgttatttcattttcattttttcattcattaaaaaaaatttcccatataaaaataaggtggcaaaacactcttgttcccatctttctaacagcacctaaactctgtgtgagccactatgttccctacttcaaatcaaagacttgagttctaaaattctcaatagctgaccagtagtttgacaatctggggactcaagttcagattctcgaggggttgaacattagacatccattagagtgtaccaaatcccccaagagtgtatcccaatgacacgtgcatatgaggcatggggcctctgagaaggatgaaggacacataattattatgggacaggtcatctgattttggactattgctttggaacaaaaatcttcccaaaaatacacacgaaaatatatttattatttaaccctctcttttaacatagtttctgatggaaacaatttaaaaatggccctactttatttttaattgtaaaagtgttccaaaaattcaaagcacattccccattgggtaaaatcaagcaatgccaacattttgtgggaataaataggaattaattttcctaagcaaatcttccaatggaaaaagtgacagaagtatgaagaaactgcattttgctagggttatgtggaatgtgcaaagagtataggttttctgtaagcttaagaatttctcaatgaagtgtctttcttatgttagtattgagcccagtattct

SEQ ID NO: 442444 - DNA, 458 bp, Homo Sapiens
aaaaatatataatgttttattgtcaaaaatagacaaactttaatttcctttaacaggaatattaatttaacagccttccataagccatcaccattttgtaagcataacaggcaagagagtcaaagataactgttagtggaaaaaggacaacagttctacatcgatgcccaagaagccttgcccagtcagtggtgacaactccaggacagcggcagaaacacagtgaacctttggagcttaacaatagacatgcaaaacaacattgatttatcttggcccaattctataaagattggctttgtagtatctttccaagcatttgaagagtttagtttgttagaacactggctaatttgaacagtgacattttaggtcacttatagtatcagtaacaggatcacacctgtttttcagtaacaccaggatgaatacatctgtccctacgccggtctccagca

SEQ ID NO: 442445 - DNA, 721 bp, Homo Sapiens
atttttttcaactggaaagtatgcctcgctagccttggctatgctgttcctctgaattagtaaatggctggcttttccaatttgcttttgtccgtacactaaggattttgccagttatggtcctttaaggattaaggtggagattcccagccaaagaaggggatttcttacccatcccacagtttaaatcttaattttgtttgtggtttgaaatgatggaaaatactcctctgctgtccttcagggctgatggaatcttgtgtgctcaggacacagttgtgttgtgaccaagctgtctgtcacctgacaaatggcaatggtcatcctgataaatgggttggtaaattttagctcgtggtgctcttatttgtaataggggcttctaattcagcctgtctgtggggaagtagggcgctgtgctctatgctgttaaatcagcttctgtctctgcccagacaagcccagggtctggtttaacaagagacaaaatactcaccactcgagatcaactgaattgaactggggctgagactttgacaaactaatctgcccaccttaaaaaagagcacatttttactgtaatttgtgatcttgtctgctttttaccgagagatgctaggtgaagggtactaaggcacccatctcttagtattacagaagaaaaattgtgataaaatctcgtgccgaattcagcacgagctgcagcccgccccccccggta

SEQ ID NO: 442446 - DNA, 563 bp, Homo Sapiens
  misc_feature (36)..(36): n is a, c, g, or t
  misc_feature (57)..(79): n is a, c, g, or t
  misc_feature (149)..(149): n is a, c, g, or t
  misc_feature (155)..(155): n is a, c, g, or t
  misc_feature (200)..(200): n is a, c, g, or t
aaaaacccctttgggaaccaacggccaatccacttncctaaaaggaacaataccccnnnnnnnnnnnnnnnnnnnnnnntttgaattttttccaaacgggaaaataagccctcgccaaccctggcctaagctgtcccctctgaaattantaaaanggctggcttttccccaattgccttttgtcccgtaacactaagganttttgcccagttatggtcccttttaaggatttaaggtggagattccccagcccaaagaaggggatttccttacccatccccacagtttaaatcttaattttgtttgtggtttgaaatgatggaaaatactcctctgctgtccttcagggctgatggaatcttgtgtgctcaggacacagttgtgttgtgaccaagctgtctgtcacctgacaaatggcaatggtcatcctgataaatgggttggtaaattttagctcgtggtgctcttatttgtaataggggcttctaattcagcctgtctgtggggaagtagggcgctgtgctctatgctgttaaatcagcttctgtctctgcccagacaag

SEQ ID NO: 442447 - DNA, 1213 bp, Homo Sapiens
  misc_feature (100)..(100): n is a, c, g, or t
  misc_feature (227)..(240): n is a, c, g, or t
  misc_feature (448)..(507): n is a, c, g, or t
  misc_feature (1178)..(1178): n is a, c, g, or t
  misc_feature (1184)..(1184): n is a, c, g, or t
tggggggtttaattatctcttgaaaagggtaggtttattgcctaatattccttcaaagacatatggatcaatcaccaagttttgaaattttgtatatatntgtgagttttaggaacttctcctgatattacattttctacagtgcacaaagtaatttgcgtacacagtacttttgcttcagttgtgtttgcagcaataatttttacctaagcaatattcaagagccnnnnnnnnnnnnnnctccaaaaaggtctttgtattatttcttcttttaaaccacattccaaagggatgcttttcaaactgaagtctgccatctattaggaggccacaaagtaacttagtgtctgtgtctagtatttttaaaaataataaaacagaagatgccagcatgcacacttaggaaaaacaagtactgtcttgtcgaatttttgcttatacgtatctnnnnnnnnnnnnnnnnnnnnnnnnnnnnnnnnnnnnnnnnnnnnnnnnnnnnnnnnnnnnaatgggttatttcttactgtggtcaaaaagttgaaagccactgtaagtaggcttctgtctgccagtaaattaaccagatgctaacagcatttattcttccaggaactctgggttaagctgtccagaccacaagtaggtgctgttcagtccttttatggaaaaaattagagaaatcaagtctaaataattcaagtaattaaataaaatacatgctatcaattattgatgctacattgtgggttataagaaattgatctaccaataactgcacaacagagaaagaaaatatccatttcttaattcaacattcatcagaataattactgccctctataaaactgaaatggaattaaactataaatacccttaagttttagccatgatgatatttaagatggaaaaaacaaaagaacaaataaaccccacatataaatgcttataaaccaaatatgaaatcactttttgtacaacttttaatttctaagacatttaaaaagtcacactaaaagtatctcatagaaacaaagactaacaatttgtaaacaaaacaatctgtaaacaaaaatcaattactagtgtgtccaaatgttatttttaaaagttaacattataccagttttttcaagtttaaaaagtcggtgctgcatctatgttcacattaaaaataaaancttgtnaagattttctgcctttatggcattaaatt

SEQ ID NO: 442448 - DNA, 698 bp, Homo Sapiens
  misc_feature (78)..(87): n is a, c, g, or t
  misc_feature (169)..(169): n is a, c, g, or t
catcagttaattttcaccattaagtaggtcacatgcagaaagctgttatccaaatatttaaaaattagagctgtgctnnnnnnnnnntgacgtccagtaagaacttgagagagatatagactgacttcctgcttgagacatgttacaagcctaaaagttctgaaagcancagaaaagcagaattgcttattttgcctaattactttcaccatttaaatattaatcaacatagcatcaagtctaaaattcagctactagtaacattatttcatcagtagtcatcacttaagaaaggattctgaacttacataaagtaaaaaccaaaaataaatctaataggaaaaagataagggcctgttctaatacctttgagtcaataatgaatgaaaacagacagaactaaaactaatgaaggcactatcgtaaacagcaatccacaccttgcccacccccacacctcagaaaagatttccaccaggaatcaagaattatgctatggccctttaggaaaagtaaactaagaaattgtaacattaagaagggaactaaattatgatctcctacacatgtatgtatactgacataataaactactgtcagcagtaccttgaaatcttctaaactgtgtaagtactagtctttgaagacgcccacttcaccgccataaactttaaacagtcaaaacgtttacccaaagt

SEQ ID NO: 442449 - DNA, 739 bp, Homo Sapiens
  misc_feature (512)..(512): n is a, c, g, or t
  misc_feature (634)..(634): n is a, c, g, or t
  misc_feature (688)..(688): n is a, c, g, or t
  misc_feature (706)..(706): n is a, c, g, or t
  misc_feature (720)..(720): n is a, c, g, or t
ataaggcctaggaatggccatttttaaacagtacactaggtggttttgatacagatccaaggactctaatttagaggaacactaggttagaggtttctcagacctgcaaacacctaagcacctgggctaaagctacaacgaagatctgtatgaagatatatagttctgcagaatttaaaaagagcacaatttaagtcttcggccctcagaagttaaattcatattccatctaagccaactttgattttcattaagttagaatgaactcctagtattccagtattacacagaacgaagtactactactaacacatagaagtcattactgtgatataaaaagcaaaatagatccttaattaaaaattagtcactcatattcagtgttgaataagaagttaaagtttctagcataactatcttgagtgcattaaaaatgcttttagagcaataagataagcttctagctgactgcctagaaaaacagaagatacaaattcagtgtcagaaatganagagggaatacactacagacactatagttattaaaaggctaactaggaaaacaccatggaccaactccaagggttgtattatttaacaacttaggtggaaacagattccgtataggatacanactagaaagctcactgtagaaacagataacctaaacagaaccatatgtgataanggaacatgagtttgtggnttaagttataccanacactgaaagggagaaata

SEQ ID NO: 442450 - DNA, 463 bp, Homo Sapiens
  misc_feature (26)..(26): n is a, c, g, or t
ctcttagtgaatgatcagagggtacngtgtgcccagaactcagtggtcaagtgtgggtgcaacatgactactccttgctttcctttgctaagggctacaacattagatttatccagactacagaacttaaactattttggtggtagagttttctctaggctccggaggaccatattgactagttcctttatctttgccctataacagaaaggacttttctttactgtctgcttattacccactagctggaagatctcgaagtgactgtgtctgaccatattcagaaagtactgaagcttaactttgctgctgcttgggaagaggtgggagatacctttgagaaagaggaaacctttgccctcagttgtaccaaaacccttgaaggtgagacccattttgctatcagtatattgcctgataacagtataacacctaacaggcatatttgttactccagctcgtg

SEQ ID NO: 442451 - DNA, 445 bp, Homo Sapiens
agtatgtgctggaagatctcgaagtgactgtgtctgaccatattcagaaagtactgaagcctaactttgctgctgcttgggaagaggtgggagatacctttgagaaagaggaaacctttgccctcagttctacccaaacccttgaagaggctgtcaacaatatcatcacatttctgggcatgcagccatgtgagaggtccgataaagtacctgagaaccagaattcccattcgctctatctggcaggtatattcagaggtggctatgatttattggtgaggtcccggctggccttagccgatggagtgaccatgcaggtgactgtcagaagtaaagagagcacacctgtagatgttatcttagcttctgttggataaatgcttactggacaagaggaaactgatgcacactacatggtcagtggcatcgataaacaccgggtacc

SEQ ID NO: 442452 - DNA, 779 bp, Homo Sapiens
  misc_feature (82)..(142): n is a, c, g, or t
  misc_feature (715)..(724): n is a, c, g, or t
aacaaagctcaagtgtttattaagaattaaaaatactgtaaataagccatacagttcatttcacagtaaactaaacaaaacnnnnnnnnnnnnnnnnnnnnnnnnnnnnnnnnnnnnnnnnnnnnnnnnnnnnnnnnnnnnnggaagggcaagacagccattaaagaacaatacagctcagagggaagggagatacagcaaacaattacacaaacgcagtatgcacgctccttgccgacagggctgcccagacggcaaacctcttcatggacatcatgttaaaataaaaggacttggcctgcattccccagggagaccccctattccactgtagacagctctcctcacgaattttttgaaagaacccaaggactcccctttctggtagtcgaaacctgtgcattccttggtgacctccggagagagaacatgggccggcagtggggacagagggcaccgggactctgctgggtgtagtgcttcacattcagaaccgcctggatgctttgcatagttacctctgatatcacaagatgcgtcaggaagagaaacgacacgcacaccatgagggaggcagccctcaagcagcggattcctttcaaagaaagacccaggggcttctcccctcctcattcagagctgacagctatgagctttaaccggttcaaagtggaagacaagtgagagatatctcataaaaatttcggccagaacnnnnnnnnnngtaaaattaattttccttaaagacaactagaaagaaaaggtccccccaacccacc

SEQ ID NO: 442453 - DNA, 789 bp, Homo Sapiens
tgggacctgactgagggtgaggagcttgggctggtcactggagaggtttgtcgcttagctggggtcttggtcctgccactgctggtggcctgtccagtggcctctggctggaaaccaaggattgggatttggtccctgacccagcgaggtctctgaccttatctaaaggctggggcctggagtcagttctctcaagaggtctttcaggtagcaatggcctctgacaagtccctgccagagcttttttggagagcgacagcatctggttggtgtcagcaggaggtttatctgacattttgggtgcctgagcagccattcctgttgattgctctgccaggtgagtgcttggccctggaggcagcggtactgggggaggcacatactcacggatctccccaggttccagaggattgggcccacaggggtcatgctcagtacaagacagacgcccatccagtttggaaatgaaaagcatcccttctcgatgctgcttacaaaaggagctggggcacatctcacagaaggaggctgcttccttcccgcagatgtcacactgatgccacggacattcccatttccctgctggtcgcttggtcagattgagacagtctgcgtggtaaacttttgggcagcctggtttcttgcaggagacgagctggccagcatccccacaactaaaacactcatcttctcgctcctttgtgatttcaccgtgggtcctgcgctttccctgttgcttcttcttgaatttctttgacttttcttccgtggcaatgggttgattctttg

SEQ ID NO: 442454 - DNA, 367 bp, Homo Sapiens
caactacagtctttcaaatggcagagaagcatgaatccagaaaaacatgtatgtgtaaaacttctacagaacactgtttttcaaaatgtagccatagacaacttgcttcagactacttaggttgcctaaaaagatatatttattagtggtatagaaggcctaatgagggtaggccccaggatgctggcttttttaaacaaaaaaattcatgttataaggtttgaaaatgcatggactttctgatttggaacccagtgatgctaggccttctattagggcttgctatgtcaaataaggcaacagattagaagaaaacgatatgacagtcacattgataccagtaacaacagcagtggtaacagcagaa

SEQ ID NO: 442455 - DNA, 1365 bp, Homo Sapiens
  misc_feature (266)..(266): n is a, c, g, or t
gcccaagagccccactttagggttccatttgaccccggggggttgtcctcccttggggaacacaccaggttaatggacccccattgttccccctttgccctgacggggggcccccgccgcgcccaaacggaaatgggtctttgaaaaagtttcttcggagggcccggaggcgggcccgccaagggaagtgtatttatcgttggggtgtttcgcggcaggggcatggctgggagtcacttcccacttgagggggtttcatttacgtnaaggaggagagggtggaggaggagggagggtattggtaggcagtctgccccatgtaacctatcatattggtagctcccggaggctgtgcaaactgttgtgacatcagtggctgtggctgctgcccagaccggcctatcccactaaactgctggctagagctctgtgaacttctcccagttgaggtggtgctactagctccataagtgccagcaccatattcttgagctgtatagctactggtgccataagcagctgccccataggtgccttgaccataggtgtattggcctgcttgtgctccaaaggcagaatttggacttccatagccactgccattagcataaccagctctatcggtttcactacgatcccgatagcttgcagagtctctccggccaccatccttgactcctcgaagccttcggtcacactcatcctgatacatcagattgggattgttggctgaagaagtggtccggtaacgagaacgaccacccccgcctccgccgcctcctctgtggtccacaagctgcatcagttttggattgatagcctgattggcctcttccagcactttgataagctctctggcctgttttaggttccctggggtgaagaaggtataggcggtacccttgttggtgctacgggctgttcggccaatacggtgcacataatcctctgagctgtttggatagtcatagttgatcacaaacttgacatcttccacatgcttccacgtcaatgatgagtcagtgtgtaggttgatgtggcagggaaagagaaggtaaaggacatgccaacaacaggtgggaagcacgaatgcagatgacagcaagaggaaagaaggtgaagttagtaaccactctgaacagaaacaaaaaaagactcatcccaacagagtaaaagaggattactgattcctgggacatgcataggaaataggatctttattggctgtagaatcctaagggaatcccatccaaacatccaaactcctgcctctgctacattttaccaatatactgacaggagttacaccaatattggtcttcagacgcaaattccagtactatcctttacaaaaccagaaccgct

SEQ ID NO: 442456 - DNA, 858 bp, Homo Sapiens
  misc_feature (774)..(810): n is a, c, g, or t
gtgatcgctgtctattttttctgggagagacagttttgatttattgatgttgctttgtgagaacaaatttatagcctggggaagcatcttccaaggggaatatcgcatggctggaaaggtcacacgccagctttgatgtcgggtggcaggaatgtgggcaggaggcagcgctgccagctgctgtttgtcaaacacacaggctacctgctggccaggcctttcccagcacctgcctgtaggaccccgggtggcatgcacactattgtcccagggaggagaggcagggactccccaggtgctgccccttcccacaccagtgtccccactggacactccaaggcccgcagtgcactgcagtcctgccccttctgcacaggctggagactcccagagatcttgtttgaatcaactccaaatccttcaggtccttccctgcctcttatcagaggccgctggaaacacaaggcctgcttctgtggaccaggggctcctctgggggtggcctcagccacggctgagatccctagaagtccaggagcagctgcggaagcaccttctccagctggtccacgtccacacggagcgcgtcttctgcctgggcctgccgcacgccgcggactgctgcttctttggtcttgtcatccttgaagtgcaggtgcagcagcctgctcaccagctccttccggaagccggatccagctcctgctccctccatgaccgcagcctcaacgccccgctctcgacgaattcgagctcggccgatttggcctgatnnnnnnnnnnnnnnnnnnnnnnnnnnnnnnnnnnnnncgccgccaccgcggtgagctccagtcgccctatagtgagttcatcatc

SEQ ID NO: 442457 - DNA, 720 bp, Homo Sapiens
gggaagcatcttccaaggggaatatcgcatggctggaaaggtcacacgccagctttgatgtcgggtggcaggcatgtgggcagtaggcagcgctgccagttgctgtttgtcaaacacacaggctacctgctggccaggcctttcccagcacctgcctgtaggaccccgggtggcatgcacactattgtcccagggaggagaggcagggactccccaggtgctgccccttcccacaccagtgtccccactggacactccaaggcccgcagtgcactgcagtcctgccccttctgcacaggctggagactcccagagatcttgtttgaatcaactccaaatccttcaggtccttccctgcctcttatcagaggccgctggaaacacaaggcctgcttctgtggaccaggggctcctctgggggtggcctcagccacggctgagatccctagaagtccaggagcagctgcggaagcaccttctccagctggtccacgtccacacggagcgcgtcttctgcctgggcctgccgcacgccgcggactgctgcttccacaacgaagaccttcagcaactccaccatgagctgcagcgcgtccccgctcactttggtcttgtcatccttgaagtgcaggtgcagcagcctgctcaccagctccttccggaagccggatccagctcctgctccctccatgaccgcagcctcaacgcgagcccaccccc

SEQ ID NO: 442458 - DNA, 969 bp, Homo Sapiens
tggaaaaggcttttgccaatgttaatattttgatatctatgtacaatcccttaaaactttaaatctcaaaacaaaaaagtactgtggatctccatagtttatacagaaattatgtgaattctaataactttttctgaacaaagcaattacatgtcaagaatccatgaagcctggaagatacgctcacgtttttgaggtttgtattaatgccagtttttattgtattagacaaatgctctctgagaatcgaagacttctaaaggtagacaggcccagtttcccattagagttctgaagcagaagcctggggaaggtctgtcacttgcccatcactggaccagccagaagccagcgggggccaggcggggtctgcaggctgcaggtcccttccagtcctgtccctgctgccctctgtgaccatctctgctaagaaacatcgacagttcgtcctgcagcctccaagcacactaacctcagccatcagatgttcctgaagcccagggtaagtcctgttctcagaagccaacccagctgcttgtctgggccatgctctctcacaccgcagctaggtcatctgcggcgactctcctctgtgctgggcagcagctccagctggtccacgtcctgcacagtgctgcaggggggcagcaaggcacgcctgtgacatgagagtctcggcacgtgaggtagggtcaacagtgatgtccacaactcaataccagccctccacacctcggcagcactcgtgggtcctcctcaaccaggcggacacgagaaacagatgataacatggtgcaaggacagacttcagctcaccaatcagatgaaggttttggggttgggttttttcagacaacgatgtacattttagcttccaaatgtgcacaggggcacaaaggtctggatgctgggcactacgggtaccacaagaggatggaaagaaccagctcattcggttttattgtatgt

SEQ ID NO: 442459 - DNA, 1086 bp, Homo Sapiens
  misc_feature (909)..(925): n is a, c, g, or t
taataaacaagaaattttccattatgtgaatgaaattttaaaagacaatagcctatatttgtgtctcactaatatataaagtataggtcaaatttaaattatttaattagttttaaatatacacaatttgtctcctctttcaaacctgacatcttcggctgttttattagtcttaaatgatgcatttactttggtcattttatgctaatttcttccatagtaaattaatcaggctatataaggtaatatttccccagagggtaattttagtgggacgagggtggtgggatgatgtcatatcatacatgggattgcatcagaagggttctgtaaagcctgaactcccttttaaaagtgcctagtgatagaggcgttgtttgtcatctattataattggaatgtcattgtagttcagtgaattttgatgtaaataaaatatcttttaaaaatgttaaagtaccaggataaacaaacaaaaagaaacaacccttaagatgacagattttcctcaacatgcaggtttcccttcttatatacctcaagtattcaacatctagccatgcaaattgattacctgaagcatagtactggaaagtagaatagcatgaaaaacttaattttgtggacattacctttttttgtaatcagctactgtatgttttattttagatcttttgttttgggtgggttttctgctctggaggtatatgcactaacaaaacattttcctcctttcatatacgcatgttaattagcaatgtgagcaatatttcctaccatacttcactcccaatattttttgagatgtttgtataaaatggaatttaaagttcacttatgattgtatatgacccccagaggagcccttttattaataaaaaacttttttaatagttaaatgtagagggnnnnnnnnnnnnnnnnntgggaaacattgtaaacagcttaagtttattttgtgtatgatcgaggcactctgttgcaggaaggtgtgtaattgggttctctctgcttcaaatgcgctctttcaaaccattcattatcctgtgtatttttaatgtggttttagtaaatgttggtagtagc

SEQ ID NO: 442460 - DNA, 674 bp, Homo Sapiens
  misc_feature (63)..(260): n is a, c, g, or t
  misc_feature (579)..(579): n is a, c, g, or t
  misc_feature (581)..(581): n is a, c, g, or t
  misc_feature (617)..(617): n is a, c, g, or t
gagcaagtctcgtctgtgctagtgcagtcagtgtctattggctcctgtacctcgctcccaggnnnnnnnnnnnnnnnnnnnnnnnnnnnnnnnnnnnnnnnnnnnnnnnnnnnnnnnnnnnnnnnnnnnnnnnnnnnnnnnnnnnnnnnnnnnnnnnnnnnnnnnnnnnnnnnnnnnnnnnnnnnnnnnnnnnnnnnnnnnnnnnnnnnnnnnnnnnnnnnnnnnnnnnnnnnnnnnnnnnnnnnnnnnnnnnnnnnnnnaagagtcaatctgtgatccctaagattcttattgcctagtagagatgaaagatgacagagagataccaatgaaaacatgagggcatggcagagtaaaataggaagaaaagtacagaatatggtattacagaggcagggattagaaatattttccctgatagtggttttcaaccagaggtagtattagcagtctaaggggcatctgaaaatatgctgtgcattttttggctgttacgaggatttgcaggctcaaatggcattttgtgggtgaaggacctataaatgtcctgtagtatgtgggaaagtactgaacaatgananagtggcatacccaaaatgtcaagagcactccggggngagctactgtacgaagctcctcagattcaatcaatctgaggtttacttccaccacct

SEQ ID NO: 442461 - DNA, 698 bp, Homo Sapiens
ggacccacatttactaggaattctggtcacatggttgcaaatttcaattatcatgctggattttctctccagtttcatatttataaaatacatcatgcaccgggtacccaagagtcctcatggagatgaatgttggtttcatgccacagcatccattctgcagcctatgaatcaaggagtaaatttgactttcacgtcttactatttaagaaatgcattttgtaagtctatagctgccacggatgatgactcctctgatggtcttgaaaaagtcaatcaaaaaccttctgaaaagcattcatcattctagatgccatcaagaccattcgggattcatgagaggaggtcaaaatatcaacattaacaggagtttgggagaagctgactccacgcctcatgggtgagtttgaggggttcagcattgcagtggaagaagtaagtgcagatgtggtagaaacggcaagagaactagaattagcagtggagtctgaagacatgactgaattgctacaatctcataataaactgtaaccaatgatgaggtatttcttatggataagcaaagaaaatgatgtgttaagatggaacctactcctggtggaggcactctgaactttgttcacatgacaacaaaggatttagaacattacatactcttagttgataaagcagcagcaggatttgagaggagtgactcc

SEQ ID NO: 442462 - DNA, 516 bp, Homo Sapiens
  misc_feature (479)..(479): n is a, c, g, or t
taaagagcttgtgatggtcccaaggaaacataatagttgtttacacaaagtagtgtgttgactaacaaacattttgcaggacaaaagtttttaaagagctaactagacagcttttataaatgctactgaatattatgacagcaaagaaagattaagggtgggggggtgtagcgtagaaaaaaatgcaccaagttcctactgccagataaacttgtaggagtggtctagatatcaagatgccaagacaataataaaatacagaatttgcaaccagtcaggaaggctgggggcaggggcatcccaagagaggctaagaaaatgataataaagggatgtcatctctcagtgaacagcataatgcaatgatgcagagcgactcaggccaaacaaacaacatcataatgctggttagaataatcatcttccttgtcagaactacttgaaaggcgtaacatagcctgggcaaaagaccagctganatttttaaatgagatccaggtcagagtccattgggtc

SEQ ID NO: 442463 - DNA, 1286 bp, Homo Sapiens
  misc_feature (1163)..(1163): n is a, c, g, or t
  misc_feature (1227)..(1227): n is a, c, g, or t
tgtaaagttctcctgtgtctccttctattgttcagcatttctgaatctacacagagctcctgccttgatctaaaatctatgccacttgagtcactttttagcactggatatctataatgacatagccataactgatgtattatctaggacttgggacagtccgaaggaattggaaagcctaaataccttgacgtgtctaaaccaaatttctacctatttttcactgaatagttgtggcctggggctagatagtggctttaaaacaggacaggtctttgcctgaagtccattcatctttttattcctgtttttatttgtccttaattattgatctaagaaaacaaataataagcacaacttttcctaaatatcctccagacattgtgcatcctccttgttgcagcttttaatctatgcctgttactgctacttctctaacctaaatgtgcacagagatcactggaaggatcttgttacaggtctaaaaagcgcccaggtgatcagcatgctgctggccctacgatgataagtagtgggctcttccttagccttctctctggttcctcctcgtatcaaaggaaggtggttcccagagtagctgaatgagaagtgaggcgtgactctcgctgtgcctgcagccgtctcataaatggccaatggtgtagttttaggtgcttagatccaatccctggtgacaagccattttgtggctcttctgtcacacgtctgtgattctgttttccagagagcaagccagagtgacccacccagaaggtaactgttttgtagcctctccaagttttctctctgaggttatgaaatagatgcagagatagctcctcacagaagtgcaggattccccagtgtgttaaatcttaattttaactttgtatatgagacgtcctgtcaccttattactttcagcatatattaatgcaattgtttcttttaaagtaaatgagtgccttactcactggagaaccatcctagccctagcagtttgtcacatgcaagttcatcttccttctcgaccttggattcacagtgctacaagctgagtgtatactgcaaatcaagaaacaactgtttttctgttgagaaatgctaaagacattgttctctctcttctctcacagagaataagactgcactgattgatactntaacacattaaagtctttgagactagcactcactcatttgaccattagtggatacttacagganacttgcatatgacgcataaggatccttacatttaaaccaatctagtaatgaaatgtcgt

SEQ ID NO: 442464 - DNA, 1279 bp, Homo Sapiens
  misc_feature (189)..(189): n is a, c, g, or t
  misc_feature (234)..(234): n is a, c, g, or t
  misc_feature (240)..(240): n is a, c, g, or t
  misc_feature (1248)..(1248): n is a, c, g, or t
ggtgttttatatttgtgcccggaggcagtattttgcaacaaaaacagtttcaattaagtttaaccagcccaattgacatttagactttataaatggaattccaggcagagaaaaaagccttccaaaaggatgcattaatcccgcctggtaggtggccagtagtcggtgtaactccacttcaagcagtgntaggtataaggagctcaagtgcagttgagactcagcaagcagccncggccncacaccgttcatagcagtcgaatgcagatctcggtgcaaggtggctctgcacagtccagagtgatagacattcacagatgactaatgcccagggactgtgtgaagtcagttactgcctgcagtctgggtcactctgcccttcatcagacactggtggcaccatgccagtgaggagaacgagagcacagttccttccgtgcctcctgccggcgctgctcaaaggtgtgcatggctgagtcctggacaagcattttgtatttttgtagttctcactccttaggcccaatttcaagttaagtcgttaactcatttagaatgaatattaaggatactgcctctaacatatcaatagctgtgctgagctgtctaggaagagaaattagtccagagaggtcctaagtatcaaagcagattttgtaaagaaaaaaggcaacacgtcagtgagaaaagcagcacaagatccgggctcggggactcttttccctctttccgaaacataactggttttgtatgtgctctgagtcctagtttttatgtcttggctgagaaccacagaaaggactagatattcatacatgcgagagcacactgagactgcatgtttatttggcataatgctagaaaaaagtccgcaaagaactgccagaaccaggcctgtgaccaagtttacagtcatctagtttctctcacaatttcaaaatgtcagatcagaagaatctttggcgattaatccactctccattttatgcgtgagaaaaccaaggccctgatggtgtccctggtccaagtccagtgcctttcacaatgaggcttttggctcttaccctctgaagtggggcagtggctcactgtgaggggagagggtcagatcttgttagtttgatcttaaggcactcacaaaatgccctgatttttcttgtctttgtgagaagacaaaaaacagtctggtagtttttcacatcatcgtggggaacccagaaatattatgttacagtacttcagaatttnaaggggattgggaggaaaggaggaaatgagg

SEQ ID NO: 442465 - DNA, 699 bp, Homo Sapiens
  misc_feature (181)..(181): n is a, c, g, or t
tccaaaacctcctgtgctttcttggaatttttgtaacgaatgttagaatgaaagcctagggacattgaccaatttacctgaggtcgaagagcagcagccaaggccagaagtgggcctgtaggcaataggagtggctctgaggggcttaggaaagggagggcaagcaggtagagcaacagcnctgcttgtcaagctgcaagcattggctcttggccaggcctcatacccactcctccagggccagctctgctgccaggccccaggctgccagccctacctccacactcccaccccagtcccctgagagcccatcaccttggcaacagccagagaaaggcccagctaaaatatttatggctcaaaacagcctagaggcttgggaggggggaagagggaaaggctgatgtcatcccttctcagcttacaggggaggtgactgacatacagggcagctgggtgggtgggccaagcccaacaagtcagggctctcaaaggaagatcccaagggccataagtggtaacaggaggaggacgaagactgttgacaggtgacaggactggataagacccacaagcctgggaaaaaaggaggaaggaaacttaaaggttgagcagtattgtgtctagaccccatgccaggcatttcaaacacatcatttgcttctcagctcgtgccaattcctgcagcccgggggatcc

SEQ ID NO: 442466 - DNA, 1313 bp, Homo Sapiens
aaatttaagagtgagtctttgcggcaactgaaaacaaaagaacaagaagatgatctaacaagtcagaccttatttgttctcaaagacatgaagatccggtttccaggaaagtcagatgcagaatcagaacttctgatagaagatatcattgataactggaagtatcataaaaccaaagtggcttcatattggctcataaaattggactctgtaatacatccgaaaagttttggacatagtgaaaacaagtattcgtacagttcttccacgcatctggaaggtgcctgatgttgaagaagtaaatttatatcggattttcaaccgggtttttaatcgcttactctggagtcgtggccaagggctgtggaactgtttctgtgattcaggatcctcttgggagagtatattcaataaaagcccggaggtggtgactcctttgcagctccagtgttgccagcgcctagtggagctttgtaaacagtgcctgctagtggtttacaaatatgcaactgacaaaagaggatcactttcaggcattggtcctgactggggtaattccaggtatttactaccagggagcacccaattcttcttgagaacaccaacctacaacttgaagtacaattcacctggaatgactcgctccaatgttttgtttacatccagatatggccatctgtgaaacagaagggaagatcgccattggttatacataacagcaattcatttttttcctctgaagttgaacatgcaaagaacatgaccattaagtgctgttttatgtatataagacatatatatgtgtgaaaatatatgcacatatgcaccctaataacatatatttattatattaaatgatatatgaaagaagaattagcagaaaatggaatataagacttaacctttctggaaacgtaataaaccatgttaaaattgtttacacaaatatgtgaatgtctagaatctgctaggtttataattaattccttcctactagaaatgttatttttgctgcagagtatataaaacaaattgatcttgaagatccaattacagtgttaaattattttctagataacatgccttttgacctgaaaaagggtttagtataataccttaaaaattctcatatatagtagccattttaaatgaaacaaaaagatttagaagcctggtgttgcttgatgataagattaagaagtttaaaacgggtttatcattactatagcacactgtaaagtgctagtactcgtaataggtacattttcagtaaggatctggtgagatcatattatgatctaacatgaaggaca

SEQ ID NO: 442467 - DNA, 543 bp, Homo Sapiens
agttcgacggagactctctccccaatctccagaagccctccccaccagaagaaaactttcccatcttcccaccacattcccatgcacctgccttcccccctgttagaataaatgctcttgattaggaaaaccctccccctctcacagcttacttactcaagaactttttaacacctctctttcctgggccattcctctcttctaaatcattctcatcatcatacaaactgaaaacatcttcatttttcgttgttttacagagtccaattttatgagccaatatgaagccactttggttttatgatacttccagttatcaatgatatcttctatcagaagttctgattctgcatctgactttcctggaaaccggatcttcatgtctttgagaacaaataaggtctgacttgttagatcatcttcttgttcttttgttttcagttgccgcaaagactcactcacttgagagttggtagagcaggcatcattactgtgaggcagatgcctcatgtaggaggaagcacggtttaaggaatgtggaga

SEQ ID NO: 442468 - DNA, 940 bp, Homo Sapiens
  misc_feature (23)..(23): n is a, c, g, or t
  misc_feature (559)..(559): n is a, c, g, or t
  misc_feature (571)..(571): n is a, c, g, or t
  misc_feature (597)..(598): n is a, c, g, or t
  misc_feature (615)..(615): n is a, c, g, or t
  misc_feature (647)..(647): n is a, c, g, or t
  misc_feature (688)..(689): n is a, c, g, or t
  misc_feature (694)..(694): n is a, c, g, or t
  misc_feature (745)..(745): n is a, c, g, or t
  misc_feature (874)..(874): n is a, c, g, or t
cctccatggacactagatctttntcttcagactacacccacctcccagaatgccaaaacccctgggactcagagcctccgatgtaccacaccattgagcgttccaaaagtagccgctacctagccaccacaccctttcttctagaagaggctcccattgtgaaatctcatagctttatgttttccccctcaaggagctattatgccaactttggggtgcctgtaaaaacagcagaatacacaagtattacagactgtattgacacaaggtgtgtcaatgcccctcaagcaattgcggacagagctgccttccctggaggtcttggagacaaagtggaggacttaacttgctgccatccagagcgagaagcagaactgagtcaccccagctctgacagtgaggagaatgaggccaaaggccgcagagccaccattgcaatatccttccaggagggtgataactcagagagaaccctgttcaacaacatcactggttccaagatagagcgcgccaacagctactcggcagaggagccaagtgcgccatatgcacacaccangaagagcttctncatcagtgacacacttccccgcagcnngacacagcaagcctganaatcccttcagagagcaagtcctcaagccganggccgagggacaggctgtcatgaggagactgccagaacatnngcttncaaaggaatccagccctttctagcttgaccaaacaaaggcatgcctttggnagtgctgaactcaaagtgaacttctggcccaccatccagaaagcttttcgacttgacacatgccgatccaagggatttataggatgttacacctgccttgcacggaggcggatcagaaggggaaagaanagctatagatggatatgtctccgacgtctccccgctaagccctcagacgcgggcaaccaaggcgct

SEQ ID NO: 442469 - DNA, 1004 bp, Homo Sapiens
  misc_feature (694)..(694): n is a, c, g, or t
  misc_feature (792)..(800): n is a, c, g, or t
tgcagtttcaaaagatttagctaactttatttatagcacggtattaatgagaccaaaatcatgggatcagaacttagtgtgagccagcagattggttttatcccatgggcacttcctgtaggcttaaaatatcaatgattgctaaggtgttcagtccaaaaggtgtaaatagatcaacacaaatttattgtcactactgagaaacaaagcccaaaaaacttaactggtagttgaacaactttgacactgaagaacagtacaaggaactaagaccatcacattgtgcattaaactctactaagtcggtggttcaaggggaataacctcagactggtatcatgctagaacatgtaatgggaatcagtcagccatgattccaaatacaccattacttccaattcagtttaacctagttttaacatgtcagtagctcctaccaataagtgggcctagctatatttcccacggaaggtgatcaaggcaatgcaaatctgttcacatctcagttccagctttgtatgcacaatgggccagttgcagtagggtttccacgaatgcaccctgagcttagcagaggaatacggcaatagttctccaactcaacaagtaagccagtatacacaggacccttcacttcctgctcttgcctttctctctgtgttcctctgtaagctttacatgtgggccatactanaacacttgcagtgctctgaataagccatgcttttacccttgaagggcttcatccactcttcttaactcctgcttatccttcaggatttctttcaatgnnnnnnnnnacttcttccactgcccagtttgagttaaagtgccctcctccttgctgccaaaataccctgtcattcttatttcattctacattgtaatactttttttctggtctcttccgcagaagaccatgaacatcatgagagcaggaatgcctttcttctctgtatacgcagctcctagcagagtgcttggcataagatgtgctcgtgccg

SEQ ID NO: 442470 - DNA, 908 bp, Homo Sapiens
  misc_feature (36)..(36): n is a, c, g, or t
  misc_feature (333)..(334): n is a, c, g, or t
  misc_feature (346)..(346): n is a, c, g, or t
  misc_feature (370)..(370): n is a, c, g, or t
  misc_feature (402)..(402): n is a, c, g, or t
  misc_feature (533)..(533): n is a, c, g, or t
  misc_feature (538)..(538): n is a, c, g, or t
  misc_feature (619)..(619): n is a, c, g, or t
  misc_feature (686)..(686): n is a, c, g, or t
  misc_feature (835)..(835): n is a, c, g, or t
aaaaggactttcccacttgatttaaaacgccccaanaggctctaacaaggtttaaagttggaaccatcttaggtgccggccaattattctatatccagcggacttctcgtatgtgttaaggaccttcgacatttccacagccgccctaacgatcccatctttctaagagtcagagcatcttaacaatgcaaggacatactatcacttaatggcacggcataaattcatatcaatgtgaaatactaataggctggatccctgtcagatttcagatctggttgttgtagactcgtgaaaagtcaaaaagcagccaactaacgggtcatgtatatnnttgacaatcagnatatgacggacgtgtcgtgcactncagcaggggagatagcatccgttcatgatcangtctaatcaaagactcaatcaaatccttattttcccagatattgccttgagatgtggcaagtgtctctagaagagattcttcgagcttggctagctgtattttcttatcattcttcctgttgtaatagttntgtantctgttcttctaaatcaggtttctcatgctgaatggttaaagctaagagctgccctcgtaatccacttcttgttgtagtanagttaacctcagtaacaatggaagctgcatccggtggaataaaaggatttgggtttcttgttgacanaaagaggcggaattcttcattgtagtcaataattttgtcacctatttgtaccacataacgtggtccttgagcaaccagatctcgtctcaataatggataaagaacaggttctacaccatccatctcttgtataataagggttttcccanaacgtactgctaattcaagagctgtgataaagttactatcctgctgattgataacttctaaacgtgagtctgt

SEQ ID NO: 442471 - DNA, 618 bp, Homo Sapiens
  misc_feature (170)..(270): n is a, c, g, or t
atttttgtcactttaatggaattagtttcaagtttttgcaaatatgcgcccccagccccctacaccccagccaaagaaatatgaataaagttgaaataattctttcttctttttttaactacctagaaccctggatttttgttttgagacagagtctcgttctgtctcgnnnnnnnnnnnnnnnnnnnnnnnnnnnnnnnnnnnnnnnnnnnnnnnnnnnnnnnnnnnnnnnnnnnnnnnnnnnnnnnnnnnnnnnnnnnnnnnnnnnnngtatgagccactgtgcctagccaagtaattttttaaagtaaaacaaacaaacaaaagccaggggttcttaatctggggtctatggaacaggcctctaggaatccaggctttctctgaaattatttgcaaaagagtaaaatgtagatttttctaggaagaggattcacacatttcatatttattctcaaagaggtctgcaactccatttagaaacactgtctacaggtacattaggtgctatgaggacatggataaataagaaattctgcataaaggaatgaggaaaagctataacaacgtataaaagctgaattgtcaaagaatggggctcagccagtgtggagagag

SEQ ID NO: 442472 - DNA, 1583 bp, Homo Sapiens
  misc_feature (596)..(636): n is a, c, g, or t
  misc_feature (1495)..(1495): n is a, c, g, or t
cttaaaagggttttctaactaatatatggcattggaaactgtctttaaaattttaaatgaaccttacatattaaggattgttcaaaaagaatttagatgctatccaaatatgaaaaccaagggaatacattcaaaaaaacccataacccatagtcaaggattacatatgtccttcaaatgatgtgtttgatatattttcatgctaaaatgtcatactcagtaactgttgaaagcaaatactgtaaatgccttccaatgcattcagatagaatatttcactcataattgataagaaatctcatactcatatactattgaaatatgttttgtcagtgagttataaaactttattaaaagtatatccatttaaaaaatttcactatatgcatctttttttaagattttagaataatctgggcacatattaaatatgtgttgagtgggcagtaattaaagaatgtcctttcataatttcatacttagattttacatttcaatgacacctattagaagtcaagaagggaagaaagacacattcttcccgtttttgtagagttcttttctactttcaaataaaactacgagttaaatctaannnnnnnnnnnnnnnnnnnnnnnnnnnnnnnnnnnnnnnnnaatttgaatactgagttcattaaacatagtcgttggtttggtttgaatgtgagcaacgcagcataattcgtgtgctgaattcataaaactagcaagcagtctgtctgaaagtagaaaaagttctgtcctcacccatgaactattcataaaagctccaaaagagtctcctttttttgcatcactgcccatttccctgcctgccagaggtcttggatggttcagtggaagtaaattagatttaggtcataattaaacaagaaagctggattagaagtcgatgttcccttctggtcccgtcaatctgacctgggtatgtagggtcatcctgatatgaactgtaactcccactgtcctgtgggcagcacaaacacaacttcgggcttccttttaactgaaacggaagttatcacttaagccattttcaaggatattgaaaactgaaattcccagattgaacaaagttagatacaaaaatgccaggagatattcaaaagaacacccgaataggctgatttttaggctgacgtgtctataaaggaatctaaaatggaaaagtttggacataaaaatacaaactaaatattttcactgattccatacttataatcattgtatttttaaagctatttgtcagatgttgcagttttagagttcacctaattacagcattgtctactacatatttgatgacatttaatagatatgtaatgacagcaacagccataattttcttaatgttttatgaccaggaatatgacaaatcaaaagccagaaatcatgaatactacttttaaactttagatgatttgaaaattaatcacacatccaaactggactcaaatctacattttgaacccanaatttacacatctattttgagttctaaatcaacataatccaccatatgttaactctcagaagttcaactgaattttttttagatttgc

SEQ ID NO: 442473 - DNA, 812 bp, Homo Sapiens
  misc_feature (788)..(788): n is a, c, g, or t
gcagcataggaaagggacaggaaggttattttccagctaatcatgtggctagtgaaacactgtatcaagaactgcctcctgagataaaggagcgatcccctcctttaagccctgaggaaaaaactaaaatagaaaaatctccagctcctcaaaagcaatcaatcaataagaacaagtcccaggacttcagactaggctcagaatctatgacacattctgaaatgagaaaagaacagagccatgaggaccaaggacacataatggatacacggatgaggaagaacaagcaagcaggcagaaaagtcactctaatagagtaaagaattgaagaaaagttaagagctgccgaaatgcacagaggtgaaaatgacaaaccaaatggaatttctcttcagagttcagaattttcagatactaaggaggaagaaaggatccactacttcttgttcttatgaatgactctagaaaaatcagaatcaagttgtgggtggaaaaatcaacgtggcctttgagttcagttgttataaaccattgtgactattgttggtcaaagtattggtacttatattgttagtaattgcatcataattacattaccagtgttggaaaactaatgaagaaaacactgtaattgctactcagcaaatgtgaataaaaggtgtttgcgttattaggatgtctgttaagtaatcatttaatattattatattggtaatggttgtatgtgtgatgctatgcccagaatatgaagtatctgtttttggaaattccactttatttaaaaggtnaagccagcctgactggggcacggt

SEQ ID NO: 442474 - DNA, 981 bp, Homo Sapiens
  misc_feature (819)..(819): n is a, c, g, or t
  misc_feature (880)..(880): n is a, c, g, or t
  misc_feature (885)..(885): n is a, c, g, or t
  misc_feature (916)..(916): n is a, c, g, or t
  misc_feature (935)..(935): n is a, c, g, or t
  misc_feature (969)..(969): n is a, c, g, or t
gcattacaatggctgcactctcctgtaaggttcaggtagaggaaggtgtaggatgaagtccggacaccatcatttgggtttttaaaagcttcagcttctccagcatctttgcattgtgaatatcttcctgcttctagtcaaagctttctctctagtgattggaatgctgctgtaagcctgattagaggtgcctgaggatatcaccttttacaaggaagccgtgtgtgcttgagaggatctttttaaatgcattatggctcatgcagcctcacaattaaagaaaaacagggatttagaaatcaatgctgaagaagagcctgagaaaaaaaggaaacaccgcaaacggtcccgggatcggaagaaaaagtctgatgctaatgcaagttacttaagagcagctcgagctggacaccttgaaaaggccctcgactacataaaaaaatggagttgacatcaacatttgcaatcagaatgggttgaacgctctccaccttgcttccaaagaaggccatgtagaaggttgtttctgagctgctgcagagagaagccaatgtggatgcagctacaaagaaaggaaacacagcattgcacatcgcatctttggctgggcaagcagaggtggtaaaagtcttggttacaaatggagccaatgtcaatgcacaatctcagaatggtttcacgccattgtatatggcagcccaggaaaatcacctggaagttgtcaagtttcttcttgacaatggtgcaagccagagcctagccacagagacacttcataaggtactggatatccttgagcaaccaggggatggacctttnttccagtagcctctatcacatttcctttctgctcattcttctctgaagaataactgcacanagcanaccacaccatttaaacttggctttgaaacgnctttaattggcttatgcangaaacatattcttgtcactggctaatcgctcaantgcacgttattt

SEQ ID NO: 442475 - DNA, 935 bp, Homo Sapiens
  misc_feature (37)..(37): n is a, c, g, or t
aggctggtacggtccggaattccgggatatcgtcganccacgctgtcgatctcccaccatcctaggctggggaccttctttgcttctcacaccactgtggttggctcagctcaagtaagcacgttctctctgtatgctagagctactgacatcatctctactagaattgttttaaatatcttttgatgggaaataccaggttgaacttcaagcatcatggaaacaaaggttctagctgcaagagagtaaagttctaggtgtttgtatgccaaggtttatatgtacacagatccaacacatactgtaagaaagacttgagtacacaaggttttcaggttttaatgcccattgggaccgtgaacacactgagaagaatgggagcattgtcttgcctcgcttggaaggacgccttccggcatctgatccacatggattcacttttaggatgcagttctttgggggccagatttggctgcagattcaccctgaagagaactatccaatgggcctggtggggcttgggtgcctgccttttttgttggaggctcagacttctagagcagagcaaagttgggcacagactgaggtcttacggattctcattccccaggagagccccagcctcgcttctgatcattactccccaagtctgaatctactgtgaaggtgaagttatcaatctttttcttgtttgagtcctttaaagccacaaatgtatatgctttattttatattatttattatgtaccatatgcctgttagtacttcgtctgtgactaggacaaggtctgtcttgaagcttcctcatccatggatcctagggttctgctgtcctttaaggcgggtgagagggtagtgttgctttttataaacaggttgctgcttttatgttggccctagcatccccagcccctttagttgggcccacctgtatt

SEQ ID NO: 442476 - DNA, 510 bp, Homo Sapiens
agaataacaaggtaatatttattgcatgtttgtgtatcatgcactgtgctaagcccacagcatgtattatctcatataccattatcatccctagtttataaatgagacgagaaaaatattgctcagagaagttaaataactcattcaaggctggtcacagaaccaagatatgaatccaagcctgtctgactctagagctgtgtgcttcaactactaccccacactactgcctctgagtattcgaggaattcccctggagggccttctcactgttctaggagctttccctctggcagagcactcacactaaagcaggccagcagctccatcttgcttataccagagctggggttgacagtgggttcaaagcctgatggggttggctgctcctcatcttgttccaggtattccccaatcgtccgtagcacactgcgccggccctctgggcgaaaggcatcccagaaggagcagttgtctgggagactggagagcagtaggggcccgacccag

SEQ ID NO: 442477 - DNA, 587 bp, Homo Sapiens
cccttttcttaccagcagacccataaaaagtgaaaaaccacaaaaacatcaccttgggagacacaaaagactaagacagatctgaccacatgacaagtgtctcagccttgacctacacaggagcaggtaagactctggagtgacggacggctgccgctgctgccgccactgcgactgcacaacactgtttagacggttgaacaagtgcaaagagaacattgctgagtcccatttgtgttatttggctgcacatctcatggtgttggaggtggtttcggagatgggcacgagctctcactgtcgaagctagcagctcggccctgccatcctaactccaggtggcagtctctctgcttgcagcatccacgtgaatgaaatcacaaccgagggtttccctctttgaaggatttctttacctccaccaaggagtgccagtgtgcgatgggcttccgggggtatgccagcatctcgttccagtggtccctgcccaggccttcagcagtgatccccacacgacagactcctatgatctcattgtggcccgggggaatgtcaaagatgatggcctcattgtagacaggattgag

SEQ ID NO: 442478 - DNA, 902 bp, Homo Sapiens
cgctgatccggagcaaaagtatataaatatataagtgtatacataattaattaaataagggtcaaaggaaaaggaggggaaatgcaaaaactaaggatattcaagaacctttgacttgagcagcagtgattcattccagccctgacaacaagaaaataccccttcctgcactgtcgtttctaactataaatccctcccacccctcattctttagaatgacatttgaaattcatgtacaagctatcacaacctcagaggctccacattccaattatgcatcataaaaaatcagctgtaactactaacttagacatttggagagttgggtcactagccattcctctcatgagatttcctataacagtgatatatggccaaaccaaaggtcaacactgaaaataaaagtcctgagacaggggatgaaaaagaaaatggggaagcaagagaattgagggtatgtgtgtatatgcagtcatttatttagttagatacaacaatgttattggtattacaggcagtccaatttgtgaaaagaaagattcaaagaaagtccatacttgaccaggtaatcctgctgttaggacgctttgaaaaggacagcattctatactgttagttggtgcattcactctaggatgtgggaattcctaagagttgctcatctcgctgtggggtcttggactgctcatcattggccttcaagccactgggctgccaacattccaatttatatttggaatgcttgaactctgaactcaagtgtaaaggggtcacagtgagacagagacaaggtgagcataatacaaatgtgctgaaagacaaaaagaaagcaatgttcctttcctggaccattacaaaaagtatctttctttgcaaggagccagagaaagcactcaatgtag

SEQ ID NO: 442479 - DNA, 349 bp, Homo Sapiens
ggtcaaaggaaaaggaggggaaatgcaaaaactaaggatattcaagaacctttgacttgagcagcagtgattcattccagccctgacaacaagaaaataccccttcctgcactgtcgtttctaactataaatccctcccacccctcattctttagaatgacatttgaaattcatgtacaagctatcacaacctcagagggctccacattccaattatggcatcataaaaaatcaggctgtaactactaacttaggacatttgggaggagttggggtcactaggccattcctcttcatggggatttcctattaacagtggatatatgggcccaaaccaaagggtccaaca

SEQ ID NO: 442480 - DNA, 567 bp, Homo Sapiens
  misc_feature (83)..(83): n is a, c, g, or t
aaaagaatcccttatgggggcactattaggtatcaatcactgaaagttgttgatagatttatcctcatgaatgcctctccttntcatgacataattcctcagtctgccatgtgaattccatgaacactgtaggttacatagctttactcaagctgcttcctattctggtatatgcacttcaaagtacgcatgccatgatcaatgtgacactacgcaagtcccagctaacgcattattggaaatttcattatcctcatatattccctgtgcatgatctgttatatatagtccaacattttcacagtcactgatgttacagtgcttgatggtgggacatgctccttgaccactaacacatactgcagaaccaactgtacatgtacttcggatgatacagtgatcaataatagggctacaatttactgtaatctctaagcagtggtgtgcattgtggtgttgtgcagatttgtcatcagggttaaaccttattgtcatatatccaacataagcatcttcagagccttccgataaaaacgaacggttgaaggatacacgtcgcgaggtccg

SEQ ID NO: 442481 - DNA, 1045 bp, Homo Sapiens
  misc_feature (108)..(109): n is a, c, g, or t
  misc_feature (152)..(152): n is a, c, g, or t
  misc_feature (186)..(186): n is a, c, g, or t
  misc_feature (194)..(194): n is a, c, g, or t
  misc_feature (292)..(292): n is a, c, g, or t
  misc_feature (384)..(384): n is a, c, g, or t
  misc_feature (428)..(428): n is a, c, g, or t
tgacattgccattaaatgcccgtatctttcaaggcagttctaaacctgggtcagaatcaccacattcaggtcaatcatgcatgctacatgacatgtacaagtactatnntagccattcaacatcatcagattaagagtagaggataatgccnatatcatatcataaatctggcccagatgcctaanactccatnagtatatggacattgcttataagtcagtgagatgtctctcagagtcatgtcatagttcagctgcttatacaaatcacacatcagagtctacagatgcnaagggtatagacagaatgatgcccacttgatagaaaacggtctttgacatggtatgtctataaaggaatgcaactaatattgttgagttgcntatgttgcagtttcaaaggcaatactaagagatccaaactgttnttagtcatagtggtgtaactgaattgaatgttcagctcctaaggtaacaccattgaaggggacaacattcattaggatgcattaattccggaatttttccttacaatccaactgcactgctttgtcacccctggtaggcgtctgtccatggtacttcctgaggagtgaagctgttttctgctaccctttcctgtctggtggctcaggaagttcagtgtctcggtgtctgatgcagtgaatacctgggattacagtctggcatgctcattccttagaacacaggtttattctcaggatgatttatagcaagtgattctggtttccagtctggttgaaaaaagtgaatattgaatgtccgtgcccagttcttaaagactcgtttctctgtgataaagcggtgatgactgcccttgcgtcctcgctcatgggagaggtacattgtacattcatcaggtccaaaaggttcataataatgataaggtactgaagggtgattgggatccctgcagaagtctgggggcaccatgccataaacattgatcctgtcacagagctccagtgcaattgtcattgtaaaccagccagtgctgagccaagtgttggatatcttcctgtct

SEQ ID NO: 442482 - DNA, 669 bp, Homo Sapiens
tcctaccaacctattatatctgaagcccagcacagtgctttgcctgaattgggaaataaagatgcatgagtgagtggtagtcagttatttgttaaactcccaactgggggttcgtgttgtacttgaagaaaaaaccaatattccaagagtacaaatatgctgacctcagagaggcccagtgcactaatgtgtttctatgttatattagcacgagaaaccttcctgactttgccaggagagcccccgccgggcagccctggtcactgctagatcttgagagcacagatttcagtatagtattcatgtgaaaccagcccttcatgtaaaaagttttggtgtgtaaaaaaggcaacttaagcgaggctaattgcccttaccagcattgttgccatgaaattcctttatacagcaagttcttctattcatactgattccagttatgtgcagcacatgagagctgccactagtctacccagcacctttgtgcaaattagaatacacctgcccttcctcgggctgataaagccacacgacacagcacaggcagacaggttcaattttcgttccctccaccgccacccccgcacttagctgtactcttaatttgcagcccggggcaactcatcccaggaccccaacaagtctggtcagtcacccaatctgcaaccc

SEQ ID NO: 442483 - DNA, 321 bp, Homo Sapiens
  misc_feature (94)..(103): n is a, c, g, or t
aggattaagttgtaaatttattttttaattgtaacaaatatatgccattagtatgttcttaagttttgggtcacattggcaacagtgtctttannnnnnnnnngaaattcttttcaggaatcctaaggttatagttcccttaaaaaaatatttgctgttttacctcttttaagactgtaaacaggacaaaaaggcatggatatgagaattagctagtgatcactggctattctaaatagtcactaaggcttgaattgtctcttcaccagatgcctgtcagaagtcccaaaggtttccctgatcatattaataactttataa

SEQ ID NO: 442484 - DNA, 1214 bp, Homo Sapiens
  misc_feature (713)..(747): n is a, c, g, or t
  misc_feature (968)..(1000): n is a, c, g, or t
aaaataagcctccctttattaaacaaatcagacacaagcacaaatttgtgtgctggatagcagcaatgaggaggggcccccaaaatataagcagatgacggttaaaatcaatcagaaatttatttttcttatgtaagtacaaaacaccttttttcatcagtggaccccactcctaggcaacctggccatggtgcccggatgcaggcagtattcaagagtttcttccaaagtcaccagggtgaaaagccattctactacaacctctacatgaccttttaaagtgtacaacttataggacagtcctttctggagtactgtggagggtgaatcaaagcttccagtgtaagtttattgtctggcgaaaacaccagagccaaaaattccaccaaggccctggaaagactgaagtcccctctgtctcatacagtaatcatccatgagatctcccggagcctgggtgatcattacgcccatgatacctgaggcagcgtggactctgccaggggctcctcagacccaaagtggagctcactttggagagtcggagctcatggccgttagcacctaaggatgtggctgaaaggcacagagcaagaaagggcttcagagaccaggcacaggttaattttagaactggagcacacgtgagagttgtagtttcaccaccaagaagcttattctctctaagcttttgaatttgcagcaacttaatnnnnnnnnnnnnnnnnnnnnnnnnnnnnnnnnnnnttgggggaggaggtgaactgggctttgatagatacatgaaatgatgaaaaaccaagaaagagagctgggtgtggtggcacgtgcctgtggtcccagctccccgggaggcttgaaggatcgcctgagcctaagagtttgaggctccagtgtgctatcatcacatctgtgaatagccactgccctatatcctagacaacatggttagaccatgtctctaagannnnnnnnnnnnnnnnnnnnnnnnnnnnnnnnnaaactaccctaaacaagaaagatagattgatagattgaggcaacacaagcatccttaggaagagaaggaagatctgatgactgacattaaccctgtaattgataccatggctctgtacaaaataaaaggttctcataagataacaatttaataattattgtagagatacagaaacatgctttaagtaagttttctcaatttgttcagtctctcg

SEQ ID NO: 442485 - DNA, 1360 bp, Homo Sapiens
  misc_feature (55)..(55): n is a, c, g, or t
gaaaacaacaacagtgttatttttaacagggatgttaaaggtaagaagtcagganagataaaccccaaatgattgagtatgataaaagaattttgccatggcgattaaaatagaaaccctataaatgtaagaaaaagcaggtctggacttagcaaagaaacaatatagtttggagaaggcatgaaataagttcttttcatgttcactgctggtcacagccataacagagagtgatgtggagagctttgggaaggtttcacgttgagttacatcagtggtcaacaatggagcaacaagactccgtagaggatgccaccctgggagaattgcaagggaaaggaggctgaagcacaactggtaatagccttcagatatttaatggatatgcaaataaagctctgattaattgtattttcacttattatatatcatctttggacctttctaaaagtgggacactagaaaagatatactgaaactcaaaaagaatacttcagctcgagttgaatggaattcaagatgttgtggagggttcagtgggttggttataccaaagaatgctatagaatttccatgcccgaagaactgtgagaggagtatagattttttcaccaaggaagttactggcatggtttgagagatagaaggaattgattaagaaacctctcaaagtttcttccacttaacctggctctgagactctgggtctttggaaatgagaaaatacccagggaagagaaaacgaacaatttaagaagcaggaaatgactctagatcagtatttctcaattacagccgtttaagacattttcttcctaatcatctctcccttgcaccatcaccatgaaattttaataccacataaatattttgtatctgtttatgtacttgtgatcctttggagggtcacaactcactgtactatctaagagttttcccaaaaaaaccatctgacaattagggagtgtgtgctctctataaataaactatgggtccaaatgggaggtcattgaagacgggagaaaaaataaaagcgttgaatatttcacctctggctacagggagcatacaaatcctcacttgcccatgctctcacgtattgcctgcacatggaaacttccttcttcccctccctcctgttatatggaaagggatgaatgctttgctagtgctatatcatctgactgcaatgcttataatattttggggatcctgggcctccttgagaacattaagggatgaatgtacgtatgcacagcctcacactctataaatgtatgtgtcctgaatttcagagcttaataatgaattatggaacttgataatgattggatcaggcagacaacacctgatcagtcct

SEQ ID NO: 442486 - DNA, 315 bp, Homo Sapiens
ggaccagtctgttctaccatatatagttcaataaatgatggctattatttttacaataatttttgccatcttgaaaaggtgaaaagaaacattttgttgctttaatttgaatttctttgatgcttagcgaggctgagcttctataaaagtttggtgttgctttttgtatctacatcctttatctggtttttgtagcttgttgattcttctgaattatctggccacgtgggtaatcaaacacttcccagtttctcagggacagtcctgattcctgtctgctgtaccaactgatgattaacatgaacgctttgtatt

SEQ ID NO: 442487 - DNA, 500 bp, Homo Sapiens
  misc_feature (159)..(159): n is a, c, g, or t
  misc_feature (232)..(232): n is a, c, g, or t
aaaggtctaacaagggagtaaggatgttcccctctcatcctggaaaacttatggcagcttaaagagccagccttatcttctctgatgatctcggaagccagatgacctggtctgtcagaaggaaagaagactgtccacagtgagcttcctcctttctcnctgggcagtgtttccacaccagatggaaaggagcaggaaacacgcaacaaagcctggggccggggctccctgnacgttcatccgtgcccctaggcatattgtgttttgtttggagtagtggtcacggttagttttaatcctgggatccagaaagcaaagcctgccacatttgcttatttatagagtatagagagcatcactgaaagcatcttcaacctgacaagcatcaatgaaaacaactgctggattcagagggagacttccaggtttatgcctgaaagctatatttctttgatcaaagggagctgtaacaatcacaaggtcactacccagcattatta

SEQ ID NO: 442488 - DNA, 244 bp, Homo Sapiens
tgacttctagagtgatccccgtctctccacactggcaagagcatctgatgtcactggaggctttctttttcccctctcatcctggaaaacttactggcagctgaaagagacagacttatcttctctgatgatctcggaagccagatgacctggtctgtcagaaggaaaggagactgtccacagtgagcttcctcctttctccctgggcagtgtttccacaccagtgtggagagagggaccgagc

SEQ ID NO: 442489 - DNA, 415 bp, Homo Sapiens
  misc_feature (286)..(286): n is a, c, g, or t
gaatagtcacttttaaagttatgtaaattccctgtaatcagaaatgggaatgggaaggaaagagaaggaaaagagaacacagaacaaacgtttctagtacttgttatgtataaggcattttacatacattgaatcatttagttacagtgggggggtagtacttttaggagctgagtatggctatctctgttttcagattaggaaatggaaacttaggatcgtccaggtctgaatcctggctgtgccactattagctgtatcacccttgagtgagatacttaacttncctatatctctggtttctcatctgtaaaccagggattatcatagtacccaccttacctgagtgtgaggattaatacaacaagcaccttaagcactaatgagggcccctcattcacatggttcagggggg

SEQ ID NO: 442490 - DNA, 605 bp, Homo Sapiens
  misc_feature (270)..(278): n is a, c, g, or t
cttagaagtaggaactgagctgtggcctagggtttttgtgtggtggatcaatgtgtgctgcttgtgggcaggaccccaccatgtgtcaccactgagttgtttccaccctgttacatgtctcagtttctctctccagaggtctattacctttgagagggctcaaaatgatgggtgatcagtccttatatgcattcctggacaagccatttttaaaattaatttttgttggggatttccccatagggctgctgcatgtcacaggatgtcaannnnnnnnnagacactcccacaaggcccccagtcacccaggagcacgttttggctgggaggagcaaatgcctttctctttggagttgagaaaactcagtctctcatttacctatgaaaacaacagttcaattcctcacacaaatgcgcagacaagccgaatcaagattaattttgggagaaaaagcaataaagaaaaccctttagaatgtgtctctgaactagaattagaatccttaaacaacaacttcctaggagaaaaaccagctcacactaaacgaaggactgtcaaccaaagggcgatctggggctcaggagaacttaaccagttccatcgg

SEQ ID NO: 442491 - DNA, 834 bp, Homo Sapiens
tggtccaaattttcccaaaatggttcctgcaatgtgattttgccagtttgctaattctgcggaccaccattggtcttcaggggagttgttccaaagattcagactttctcattcagaaagcttcatgatctctgcttccccttcagtcccagctgctggggattttttgatattacagtgactcatcatcctcatttgaatgaaaataatctgatttttgacctattacattaaaatcttataccctttacatgtaagaggtgaaattcataaacctagaacaattagccaggctttagagtgccaaagaagaaattaaacacaataaaaattaagagaaaaggttagtgaatcacatcacagccaagagcaagctaataaaactggaaggaagagacatcatcaggaaagaaccaaaggaaaaggaaacttactacatacaattagaagatatagcaattgcataaagttaatgaaaacggagaatagggatggcttttaataatcttcttattaccactgcatgaaatcacactctcagataagtcctagaaactaagctagggatttgcctttcgtttctcaagggtcccagcatgtcgtttcccctcgttaatttaagttacaatcctaggtacaatcactttgggaactagctatatcacatctaaagataatcaaacatttattgcttagccttttctttgacttcaatagtaagaacctcttctccgccctcagcagaaggagccatgctgataatgagtgattgacgagaagtccctctgggtaaaactgtccttctaacttgagtggggttcttcctccactgca

SEQ ID NO: 442492 - DNA, 713 bp, Homo Sapiens
aggacaggaacaggccatctttgcgcggatgatctatagcgcttagagcaatgcattgccataaaaggagtcgagtcctctttgaggatgacaggatagatgaccagatgacacattattcccccgaccctggcgcccaagccaagcgttcccagtctcaccagtgggagttgaccaccttgcacagggccaactcacagcacattcgcaggttggcctggtgctctgccaaactggatggtgtgcacttgatagggtctacctcgcagttttcctcagattcatacagagcacggatgaattctccaatggcatccttgaggtatttctgaccaatcagtctcatatactcttctatggctttagtggcaagcgtgttctcgcggaatatgaggtgctcccgttccatgaaccggtctacctcagacatggccatgtctgaaaggaagtccttggccttgcctgtactctgcaggatgtgaactagtgcactggcaacctcctccttgcctttgacattcagggcgggctccaagactgcacacagcatccgataatggttggtgacatactctgcaaactctttatatagctccatgggcaagatgctcattgtctggtaacgtgctttcagccgcacagccgggcaacctcctttgcccttgccccgtgagccaccccccctcgtgccgattcggcacgagctcgtgccg

SEQ ID NO: 442493 - DNA, 654 bp, Homo Sapiens
atgaatctgaggaaaactgcgaggtagaccctatcaagtgcacagcatccagtttggcagagcaccaggccaacctgcgaatgtgctgtgagttggccctgtgcaaggtggtcaactcccactgcgtgttcccgagggagctgaaggaggtgtttgcttcgtggcggctgcgctgcgcagagcgaggccgggaggacatcgcagacaggcttatcagcgcctcactcttcctgcgcttcctctgcccagcgattatgtcgcccagtctctttgggcttatgcaggagtacccagatgagcagacctcacgaaccctcaccctcattgccaaggtcatccagaacctggccaacttttccaagtttacctcaaaggaggactttctgggcttcatgaatgagtttctggagctggaatggggttccatgcagcagtttttgtatgagatctccaatctggacacgctaaccaacagcagtagctttgagggttacatcgacttgggccgagagctctccacactgcatgccctactctgggaggtgctgccccagctcagcaaggaagccctcctgaagctgggtccactgccccggctcctcaacgacatcagcacagctctgaggaaccccaacatccaaaggcagccaagcc

SEQ ID NO: 442494 - DNA, 791 bp, Homo Sapiens
atctcaaagctatggcttatttctgttatagaaaattttatttgcttaatgtttgttacagaaacttaagctaactcagcatttttccatttaagttactgtgaaaaagagaacagagcaggccagagactgctattctttgatcttgcaaggttcatccttggctggagtctgtactttaggttttgggaagtttcccattgttcccagtaatgagaagtagctccgtgtgcctaaattgtcttacgctgaacacctcctgttcttctggaggtctacaattgtggtatgtgctagaaagcaagtccaatataaactctgagcaatgggtgctcaagacgacttcctggaacacatctcacgtgtgttgttttaagtcccagatggagcttcaatgaagcacatcctgtgtgatttcattaagattctcaaagattgtgcctggtttcctctggacttgggtttgagccttttgctgagtttgctctggattctttcggtgtggtaaatcatagccattgagtatgacaaaatgctgagtcctgtgagtcttcctagcaaatcaaatctggaaggggtcttgaggactccagcattcatttattatgatttctaaaattgtgtacgtaggtccataaaagtccatgtagattctcttcgaggtcaaggtacgccatatatggtgccacctatatgcacagctttgtggtaaacgcgctgagggccctgaaaataataataaaaaataccctgctgtgtatggccatttaccctcgtgccgaatcctgcag

SEQ ID NO: 442495 - DNA, 995 bp, Homo Sapiens
cgtgggtactctcagacagggcctgggctagacataccggtggttgggcaccccaaagcacggggacgccccccccttgggggggaatatttggggtaatgaacactctgtgtgaaaagcatgtccccaaataaattcgcgcagccctgattagccccatgtttagctaatggatggccatcgttcacgtttgattctgcttgggggctctgttaaaaaataccttcttgagcctgtgccagcatgataagactgaggttccctacagtatactggagatatgtccacggtcggctctcgacttaaggcagataaaaccgtctctttaatatgtaagaaggcaccactagcaaactggtaatgtttagcagcgattttcaatccttcatcattatccaggttctgttctgctgcaatttggctagctaaggctgcacaattgaacaacacacagctcttttcatatcctaagcttgcaagagccagttttacagagcctccaaaaagtgaacctttatcgaaagcatccttccaggtaaatgtcaagcagatctgattttcagaaaatgggaatttgggttcaatagaacaaatctgatcataatatctcaggagcgtctcgagcgcgccctcgtgcttgtccagcggacgaccgactgcggcgcggcgcagcttgctgagctcctccgccgcgcggcagtactgggcctgctcttccccgccgcttgggtaagtctgctggatgaacttcaccagcggcttggccaggtccacctctgaggtctttttcagctgcaccgagatgaatgtcgccatgatcagcgcctccgccgccgttcgggccaaacagaccgcggacagcttacgagggccgaggagagagaggtactgggctggcggactggcggactgactggctgacagacttgcgctccgcctgcgttccgggtcccgcccgctctcgacgaattcgagctcggccgatttggcctgat

SEQ ID NO: 442496 - DNA, 499 bp, Homo Sapiens
  misc_feature (290)..(290): n is a, c, g, or t
aaacttttagaaatacatttaattcaattctataaatattagtcattcaaaatctggccacaatcttaggaatacaaaagtaaaatcccagttctttttttcctaaaatgtcacaatgtaatagatctaacattgcatatatttctgatgtgatgaaatgttgatatatattttctatcgtgcaaactacagctctaaaatttttcaaagatagtacatgtattatgttttctataatacttacaccatcattattgttttaccttttatatctcatattctattttaanttatggaatggtattattacatatccctgataaaaatattaaaatgtgctatgggaaaattaagaaaagacatattaaataaaccttgttatgtagtagcagggacgtgggaaagctccttggaagaagtaaggttcatcactcagaagtcaacctatttaatacagagataatgattcaactttacttcagagaatttaaatctgcca

SEQ ID NO: 442497 - DNA, 840 bp, Homo Sapiens
  misc_feature (238)..(238): n is a, c, g, or t
  misc_feature (280)..(280): n is a, c, g, or t
gcatttccagtcatctacttaagtttttggagaaaggtagcacaactttttaaataaaccatgcaatagtatatgaatagatataaatgcatacttatagcaaagaaagctcaaagcatttagcgactctcatacttctaacgcagggaggagagacctgcatctcgtctgctatatacagtgggctgtttgcagagagttcagagcagcgaattagtgttactcatttgcaatgtcncagtgagtcactataaatacgtgaaccacaggctttctcatnttagagcattttaacctgctttttagaaggcctgagtaccagacgctctatgcttgagttgagattttattttctcccaaattgattttttgcttcctataaatgttaacatgcttaactgagggtatggcatgtgaggtggtcagtgtcctaagacccatgtcgacttgggttggcattaccagacatggagttacaaatatactttccaaggctgtcatcagaaatgcaaaactactcaccttcggcaacaataacaaaaaggaaacaaaacaaaaaactgaagaacaaaagattatatataattagaacggtatggtgtaatttaagcactggcaaatacttggctcttaaagaagggggttactcctgcaggatctgcttttcatattttatgtgaaaacaagaacttcctttgaggaaaaaagtgccattatacttcctttccaaatcttgcttattttctgtaattgtctttttctttgttgttgctgaccctttatcttatttattctttttcaggtagcctcttgaactagagtaggctcagaggctccctc

SEQ ID NO: 442498 - DNA, 694 bp, Homo Sapiens
  misc_feature (512)..(512): n is a, c, g, or t
  misc_feature (532)..(532): n is a, c, g, or t
  misc_feature (601)..(645): n is a, c, g, or t
acattttcccagatcatctttacttaaagatttttttgggagaaaaaggtaggcagcaaacatttttatattaaaacaaatgcagatagtaatattgaaatagtatataaaattgacattactttttgagacaaaggaagagacatcaaagacattttaagccgagctcctcatgagcttcctaaaccccaggggagggaagagacccctgcattctcgttctgtctaatattatcagtggggctgttttgacagagaagtctcagaagcagcgaattaagtgcttactcatttggcaatgtcccagtgagttatataaataagtgaaaccacaggctttctcattttagagcattttaacctgctttttagaaggcctgagtaaacagaagctttatgcttgagttgaattttattttctcccaaagtgatttttttcctcctataaatgttaacatgccttaactgagggtatggcatgtgaggtggttcagtgtcctaagacccatgtncgaccttgggttggcattanccagacatggagttagcaaatatactttccaaggctgtcatcagaaatgcaaaactactcaccttcggnnnnnnnnnnnnnnnnnnnnnnnnnnnnnnnnnnnnnnnnnnnnngattatatataattagaacggtatggtgtaatttaagcactggcaaatc

SEQ ID NO: 442499 - DNA, 972 bp, Homo Sapiens
  misc_feature (74)..(83): n is a, c, g, or t
  misc_feature (431)..(431): n is a, c, g, or t
  misc_feature (449)..(449): n is a, c, g, or t
  misc_feature (605)..(724): n is a, c, g, or t
  misc_feature (748)..(861): n is a, c, g, or t
  misc_feature (874)..(891): n is a, c, g, or t
gccagttatacatttatagaaagataatcccctggctttaaatagtcatgtacatacaaatatgaacaaacttnnnnnnnnnntacaaacccttggatcacatgggggcttctgggaacccccgtattcttccccctcacccaagggcagtgggcatgaatctactttttaaaaatgattaattttggccatccttgcagaaaagagcctaaaattgggtgatttacccacaaagtgaaagtcgagggaaaattcagtttccagtctctgacctctatgcgataatctcctatcattagggttacatgctttcttgttctgtcttttaaatattatatcaggataaaggagagggctccctcctgaaatgggtcaagaaagaagatagacttgtagctttaaaaggggtgggaaaaagtggcatctggccntaaaagccaatgaccagncaaagggctacagaccccagggaaatacccagttcccacacctaaagggatacactgtccagcccaggtccaggccctaggttctttactctagctaccccctatttctttggtattgtcaaaagacaagattcaggccgggcacagtggcttatnnnnnnnnnnnnnnnnnnnnnnnnnnnnnnnnnnnnnnnnnnnnnnnnnnnnnnnnnnnnnnnnnnnnnnnnnnnnnnnnnnnnnnnnnnnnnnnnnnnnnnnnnnnnnnnnnnnnnnnnctgggccaggtgtggtggtgtgtnnnnnnnnnnnnnnnnnnnnnnnnnnnnnnnnnnnnnnnnnnnnnnnnnnnnnnnnnnnnnnnnnnnnnnnnnnnnnnnnnnnnnnnnnnnnnnnnnnnnnnnnnnnnnnnnnnagactccatctcnnnnnnnnnnnnnnnnnngattcagttcctaggtgttgggggaggagggataaatcaaactccatcctgtgctacagcccttttgactccctgacattg

SEQ ID NO: 442500 - DNA, 1165 bp, Homo Sapiens
  misc_feature (636)..(644): n is a, c, g, or t
  misc_feature (1016)..(1055): n is a, c, g, or t
  misc_feature (1112)..(1112): n is a, c, g, or t
aaccaacaagttatattattttttattcatgttagaatttctatcagtgtttgaacattaattatttagagagtttgtacattttcaccttccaaggtttgaaatgagaagcatgctaggtcgccaatggtaactaataaacacttcataatcgcatgaatatccactctgctctgactctcttaacactgttaaacattttctttccttgctgtaatttacaatgaaaactgtgcccactcatgtctcagcaaagttccagacattatggattcatcacatataaattctttaaaaatatacttctgtcaaaagacttgatgactactatgtacactacaaaaataaatcttcatataaataaattatatggcatacttttatctttgtaattgaaatgacacaaactcatttccaccaaaattggcaatgagacccagtttgaatatttatttcctttaaactccttaccctaaaacctaccatgagtccttaatgtaaatgttatatactctgaactatttaacattagtaagcactctatacaaataaaaattctgtctgttataaactggcatgacaaatactgtagaggaaaacattcttatgatacaaaattataaatatcagcaaagnnnnnnnnnaaaaattaaaacatccaaatgaacaaacaggacagacaaaataaaactattaaaagagagagagaaattctaattccctgccagccccaccccccgcccaccccagttctccctttgccaatgtgactattggagaaagttctacaccatgcagaaatcaggggccgcgcagcctccggcgcaacacgagctgggctcaggaagggagcgagggcacgccaggagccagagggaagtcgacttcagaattctgcatcatccctcctccacgcaggacgttttctgagcagagctgggtgttaggatggcagaccatgtgggtgacaggcaccaagacagcagcaggggggtggccagggtccccagcagagnnnnnnnnnnnnnnnnnnnnnnnnnnnnnnnnnnnnnnnnccagcagccacaagcggctcccaatcagcatcttaaaagttttgtggtgagtatcanggtctgaggtcactatgctgtgggtatttctgggggcccattacctttctgtt

SEQ ID NO: 442501 - DNA, 388 bp, Homo Sapiens
  misc_feature (345)..(345): n is a, c, g, or t
cagtttgaatatttatttcctttaaaccccttaccctttagggttttaacctaccatgagtccttaatgtaaatgttatatactccaaactatttaacattagtaagcaccctatacaagtaaaaattctgttcaaaagtaaaacatagctgtagtaatgtttccaatagaaataaaatctctgcatttctgtggttataaactggtatgacaaatactgtagaggaaaacattcttatgacaccaaattaaaaatatcagaaagaattttttaagttaaaacatacacatgaacaaataagacattcaaaatgaaagtattaaaagagagagggagagaaattntaattacctgccagccccccagttctccctttgccattgtgac

SEQ ID NO: 442502 - DNA, 848 bp, Homo Sapiens
ggggttctgccatcctcaaagaaagatcagggtgatcgaatccaggcatccgtaaagcgtttggcatcaatacatcctttgattcagacgaataatggtagtaacattgtgattcttaaaatattgaatataagtctcaggagaatgttgtggtaaccactttcaagtctggctcttgaatgaggtccacagaaggcaataaatcggtctggtattatccaatttaaatctccattttctgctttttcatagtgttcatattcatcaaggttaaatgagttgaaattaaggaagccatactgcattgccttctttactgcatgaaaacagtcaagaagtgtaatgtagaaattgcaacttccataggcagcatctctgaaaggaatataggatgtctctccaaagattaatattctatatgcttcttctggggttctccccaaatatataaccatgtagcatccaacaaggaaggcagcatttgcttgttttctctgatcagagccagtaaaatgaacaattttcttccttaacattgtaatggactttaatttcttattgatcttgcaacaatatctgtaaaccattgccagattgagtggtccaaaatctgcgtagaagttctcatattcaagttcattatctatgctgaaataatgtacatttgatgcactctttggtctgctgtagagaatggcaaaacaaaggcgatctgaaatggaaaaattgcaatgttccttcctttgatcacctcggctaccaaagctgcccccgcgccctcccggctcatgactccaaagcatccgaaccgctctcgacgaattcgagctcggccgatttggcctgat

SEQ ID NO: 442503 - DNA, 535 bp, Homo Sapiens
gagctaaacttttacaaaaataggtttgtttagaagtcatatcactacatgaaaaatcaccacttttgaaacttacggttaaaggcagtttctcttttaaaaatgtgctcattgattattcccacccaaatagccagaatattttgtaattacccattaccactcctaccatctgaaacgtgcatgaaaaaaatgaaaaattgacttcatctgaaaagagttgtgtcatgatatatgaaacgttttttgtaacctccaggaaggaacattgcaatttttctatttcagatcgcctttgttttgccattctctacagcagaccaaagagtgcatcaaatgtacattatttcagcatagataatgaacttgaatatgagaagtaagtattgctctttaaaagattttaactttttgtttttgaagaatctaaaggtatggttataaatgggatggcctgggaaaattataaatctattgattgctaattacaggatgcttgtttttcacctgtagtaataaaataaacctttagagc

SEQ ID NO: 442504 - DNA, 698 bp, Homo Sapiens
  misc_feature (56)..(189): n is a, c, g, or t
  misc_feature (199)..(221): n is a, c, g, or t
  misc_feature (414)..(422): n is a, c, g, or t
  misc_feature (663)..(663): n is a, c, g, or t
ccccgccccaaaaaaaggtttgaaaaaattttttgggggggggggggcgcccaaannnnnnnnnnnnnnnnnnnnnnnnnnnnnnnnnnnnnnnnnnnnnnnnnnnnnnnnnnnnnnnnnnnnnnnnnnnnnnnnnnnnnnnnnnnnnnnnnnnnnnnnnnnnnnnnnnnnnnnnnnnnnnnnnnnnnnatgtctccannnnnnnnnnnnnnnnnnnnnnnaaaaaagcaggcataaaatacaattacattactacgaagatgcaacaaaattttaaaaaagaaaaaggggtgcaatttttttcagagaggacagctgatcaaatatttataattttctaaaccatgcagttcattacttattacaattccaaacaaaactcattattatgggggatgggagtcagggagaggnnnnnnnnnaagcatgatatccagcgctgtcacacagtgcttatgttcaaagtgcttacaaatgggtgtctttcacagcatagggggaagctgaagcccttattccaggggggaagggagagggtgaggtcagtaggcaggtgtccaatgcaggcctcaggaggctcgggcaggtgactttgcctccaaatcaggtttttagggccacgggtttttaaggcatgtttcaggtaggggttaatataggtgncccgggtttcctcttactttacccccccggatcct

SEQ ID NO: 442505 - DNA, 1295 bp, Homo Sapiens
  misc_feature (48)..(48): n is a, c, g, or t
aaacaaaaccttccgaaaaacctgaaaacatcgccaactaataggcancaaaataaacaggttgacccacagtcttgtttcccgaaatttctgcccccctttcaacgcccgtgggtcctaaacttcccgagccacagtgccctcaaggttgtccatagttgtggaaattgaaagagagacaccaacttctggcagaagctggtccccctatggctgttccccagcttgtccaatgggggtgacaggcacatcattcccatgacattgggtaccaccaggaggatggctcctgatacagctgacttggctggcaggcccacgtggaaggcaaactggccagagaagtcatacatgccgcaggaatgcatgaggctgagggtgttgcgcactgcttcagcactcagcacactctcgcctgtgatggggcagatcccaccgttggcgagggtggctgccatgacactgcctgattcacaagtgacctccacagaacacagctggaagtagagatcaagggcagccatcatgtccacccccttaggaaagcagtggcattgctgaaacccatgtattcattcccagccattttgttgagatactgcaacactttcggaagagatctcggtccaagaggccaccactactggactcttggaccacgcggttgcatctcgctcatgcagtctcggagccgaggatctgatggtctgcagtccagtggcctttagtgcagtggtgaacttgtggatagggattcgttcctgtccttcagcaatagtgtaaaagagccaatcacccaggtcgggacagcatgccactttctgatgaatcatgatcctggtgctgcggctggtggctgtgtggcgtctctctgccctgcgccgcggcctcactgaggtggtgccggacgcccccgccaaggagggggctccggctcgggtgaccccagcctcctcgcccgcagtgactgccagcccggctcagggccttctgcagagccttcatggagcgcatgccccagcaagcctccggctctgcaggtgcgcccgggacctctagctgtggctgggaaggaggggacggagcgagcgagacaaggtgcgggggagttctgtgacgggagcgctggacctggaagacggagaatgtgggcccggtgggtggggctggggctggggcaggagaaggggcctgcccctttaaagctggctccagggttaggggcaccctcaggacaggggctaggtgaggagcgttggggatgaaggagaacccgggtggctttctagtgggtg

SEQ ID NO: 442506 - DNA, 799 bp, Homo Sapiens
  misc_feature (110)..(133): n is a, c, g, or t
  misc_feature (347)..(367): n is a, c, g, or t
gagtgttttaccattaacatttattgatgggatggataaatacagattgagaaacatacttgacagcaggatatcaaactgatggccagactataaaatgtatacatccnnnnnnnnnnnnnnnnnnnnnnnnacaaagagcccttactataatggtcacttacctcctatcattcacataacagcagtagatatcccaggggtagcatccagagctgaggtgccccaaggaagacagaggcaatggcagaataatatgctgagaaaggactcttaagagcaatacaaagagaacagacaaaaatctcaccacaaaattgtacctgagtgacagattggtaaagtgnnnnnnnnnnnnnnnnnnnnncgctctttggtctgacaagaaaagagttttaggtgtgtgaagtagggtgggaaaaaaggtcagtttcaaattcagtaacatatggtaacactaagttaggctgctgcattcttttctttgggtacttaagccagctggcacttccactttgtaaccaattatattatgatcaacaactaatcagttagttcctcagcttcaactgaagagttcctgattacctgatgaaggacatacttgctctggcttcaattaggcatgctgtcaagcatccctctccatgcttaacatgggcaacacaaaacccaggagtccttctctttttttcattaggccatggattaaacacttcacaagggggaaggagtaggacactggttttttggtaaacggtccctttttttctttacctccctttttccaatgcccagt

SEQ ID NO: 442507 - DNA, 3046 bp, Homo Sapiens
  misc_feature (47)..(47): n is a, c, g, or t
  misc_feature (790)..(809): n is a, c, g, or t
  misc_feature (2496)..(2566): n is a, c, g, or t
aaacagctgtgtgccataaccatgggccacacaaaggcttgggtagnggcctggatgcccatggagggggatttaggttgggaccaggttaaattccatgaagctgtagcaaacaaaactccctgctgtacccccttaaatccaggtcatggcattagtcagagcttgacctcccttgtccctgatcaagagcaggaattcaaggcatgaagcccatggccggcaacagacataccaacaccagaaggggcaaaataacctcaggaaagtgaaagagctctagataggtcttccagaggtgctaaaccgacacacctttatcccaaccccaacccgggaaagataagcaaactgaaagaaaatgcacagcaaatagacataatcttgaagatttttaaagaataaatatttttttgtaattaaacattatgcaaacacgtgccacgcttgctttgtccatgcatatgcgctatatacaattttgaaaaatactgtgttgtcctcttgttttaaaagtcatatacaaagtttttatgtttttcgtttgttgaatcctcttgctgcctacccctttccccatcccaagattttctttacaaggaactaagcatcattcactcatgaccttggggtatgagagaaagagagtcagtctgtgtgtgggtgtatctgtatgtgtaggggaggaaggggaagaggtcctttaccaaagtacaacaaaatggctggtttgaacatgaaaagcagtgtcaaggagctgtttgaaattttaactgtactacactcaggnnnnnnnnnnnnnnnnnnnnggagtcagctttgagaatgaagctacgttacaagttaaagttggagggcttttagtgtgtctgtcacacttttgttggcggcctagaatactgttgtacaatggtttatctacctttttattacaatataatttacttaaactttccattaacaaaacaattctggtactacagaccagtggtgtcagaataggcttagtgcctccttgtttgtgtttgttttgttttaattgcatgagcactctagatggtaaagttttcagagttcattttatgcagggccattctcagtcctcaatgtactcccacagatctttttcatagccttcatgcacatgctgtaacaaaacccttcgtcgactctcacagtatctgtacttgtcttgtactttctgctttatatcctgcagagaatcttgggaaatatctcgttcaaggtagcccgagagcacctctgtggcattctctagatctgcttggttattctcaaagataatggactggttattctttttgaggtagaaagcgaagacataagtgtacatgagtgtggcacgacactggcagaggacatcaactgccttcttcaggaactgcacctcaatccaggacatgttgtgctgctgcatctcctccattttctgtttcacctgagcatatagtttgtgctcaaagcgcaggctctgcatgtggttcatatagcgattacagtagaacaggtacctctgcagggctgccctagatcgctcctgtgcatctcttgctgcctttgcatcatcctcattatagcggttacagttgtaccaggcagatccatgtggttcccatgggccaagacacacccagcaaaactctgctttacaattctggttacgacagaccatgtgattacaaccaccatccttctcaattgtgacatggcatttgggacattcctttgtgttggctgcaatccaattggaggtttcactgtcatcatcacactttttaatccatttctttaaccacttacatttaacaggatcatgccaattttctccacagttaaagcaaaattggcgcccacatttgcagcgaacaggtttagcatcaggatattggactttaacaacatggtggcaatctggggcaggacaccactttaacagtcgattgcactctacaaagctatttgttattaaatgctgatactttaatttaacttttgaatctgtgatcaggcgcataactgtgttgtcatccactaagatatcacaaccatgagcaggacacgaaatagtctgacccatgccttcttccattattttggtagttaaatattcactccagcactgcatacaaaacttatgtccacattcaaggccagtgaaatacgagttagggtagttcaagtagcagatctgacaaggcatatcctgtgctgatgaccttgtattcatctggcgtgttcgagactttttacttggattaattacatgacactcagcaaagagcttctccaggtttccatcaaagtccctttccattagcttctctttatcccaattgaagtgggtaaggagtattcttgtgatagttgctggattctggatgacctcgttgacctccccggatacattcccaccatgtgttgtagaatctgctcggccgtgagcacctcgtagcggtaatcctcctcctgctcatnnnnnnnnnnnnnnnnnnnnnnnnnnnnnnnnnnnnnnnnnnnnnnnnnnnnnnnnnnnnnnnnnnnnnnnccaccgcccgtctccccgcacagcagtccgtcccgctccccgccgacgcccagcccgggctccaccagctccacctcgcccagatccagggtatcatcgtccggctcgtcgtcgtcttcgtcctcctcctcctcggcgccgctgtcctcctcactgcactcctcgtcctcgtcgaactcgtagttgtagccctcgtccgagtccatggcgcgacgcgcgggggcccggcggacgctggccgaggcggggagagggcggggacgccgaggccccggctctcgctccggctccggctgatgtccggacgcaggcctggctccggccccgcgagccgcggctcctccccaggagcggcggttggcgtttgacggctggtggcggcggggagggcgcggaggagggagggagggagcgagggggccgcttgctgcccgcctcagtcagacgcggctccgatcccggaaattccggaccggtcca

SEQ ID NO: 442508 - DNA, 737 bp, Homo Sapiens
  misc_feature (450)..(684): n is a, c, g, or t
attgtatttcacatatataaatattaatgtgtaattttatattatcaggatcattctatgcattcttttctgtaaccacagaaaatatattatgactgtatatagtttttataatggttgtacaaaattatatttcagagaaatacttaatttattaaactatttatggataatatctaggttgtttataattttataaccttttttatactctagaggaaatttttgctaaatattttattcatgtgaaagaatatttattatatagttaagtgaaagatacagtagactgaatatctacagagcctgttcccaacttatggaaattctagccaataaattgaaattttttgcatgttcattcccaatggtacatgtcttttgtgatctggaaagtttatcttattttttaattactttatggtttgattgtatatgtatttatctttnnnnnnnnnnnnnnnnnnnnnnnnnnnnnnnnnnnnnnnnnnnnnnnnnnnnnnnnnnnnnnnnnnnnnnnnnnnnnnnnnnnnnnnnnnnnnnnnnnnnnnnnnnnnnnnnnnnnnnnnnnnnnnnnnnnnnnnnnnnnnnnnnnnnnnnnnnnnnnnnnnnnnnnnnnnnnnnnnnnnnnnnnnnnnnnnnnnnnnnnnnnnnnnnnnnnnnnnnnnnnnnnnnnnnnnnnnngtatatcgggccggaccgattcgccttccaacagttgcgcacctgtggctgct

SEQ ID NO: 442509 - DNA, 243 bp, Homo Sapiens
  misc_feature (98)..(108): n is a, c, g, or t
tttttttaactatatatcatattcatttattatcaatccacaggaaaatctgattgctacatgagctcataaaagcttttttcacctttacaaaattnnnnnnnnnnntgtgccacaaggatgtaataacaactgctgataaacaagaaaaggaatcttaaaattataaatttgctgtagaaaagataaaaaacaattatattttatttagaattttaccttgaataaaatattcccctgtat

SEQ ID NO: 442510 - DNA, 768 bp, Homo Sapiens
  misc_feature (283)..(577): n is a, c, g, or t
cagggaaaacacagaactttatttcaacagtcattaggttccaccacacaacagggacaccatgggattgttttttcatttaataaatacaaatgaataaaaatactttattttgtcaagagactgcctctcctccctctcccgatctcacagaagcctccaggcaattgtgtgcccctccagggcctgcacccacagaccccgtctacttgcacaaatgactcttctttacagagagggctccatctcatttgcctgcaaatacaacttaggtataataccnnnnnnnnnnnnnnnnnnnnnnnnnnnnnnnnnnnnnnnnnnnnnnnnnnnnnnnnnnnnnnnnnnnnnnnnnnnnnnnnnnnnnnnnnnnnnnnnnnnnnnnnnnnnnnnnnnnnnnnnnnnnnnnnnnnnnnnnnnnnnnnnnnnnnnnnnnnnnnnnnnnnnnnnnnnnnnnnnnnnnnnnnnnnnnnnnnnnnnnnnnnnnnnnnnnnnnnnnnnnnnnnnnnnnnnnnnnnnnnnnnnnnnnnnnnnnnnnnnnnnnnnnnnnnnnnnnnnnnnnnnnnnnnnnnnnnnnaaatgagccccttgtgagaaggaaaagaatctgctgtccacagaagccaggcgtggagctacttcaaccagaaactgtcacccatgacactctgtgtgggttcagtcacacagaccacgatccattatggaagggagggagaaaaggatcacatcaaatctactgtatgcctcatagaccatcccttattt

SEQ ID NO: 442511 - DNA, 933 bp, Homo Sapiens
caggatggtgacttcatgggccccgccggggaaaagaggcacggtctggaaatggaagcatttccgggcaagccgcactggtgtctcactcgggtgtctaccagggccaagagactttcccgtgcggccttccatcccaccaacgcgggcgaaccttgtagcccatcaaaggtgagcgctcctataagcatgatcagcgtctgcagggcatccgtgtagatcacagcagccaggccaccagcaaccgtgtatacagcagtgatggccagtagcccaactatggccaggtacagatccaggtgcaaagactgctggatgaagatggcacctgcatacatgtctaccgagatcttggtgaagatgtagataaataggtagagtacagccaggatgatggggattctgatgccaccgaagcgcttccgtaggtattctggcatcgtggtgacctgaccagcaatgtagatgggtaggaagatccaggccaacatcagcacagaaaacaagccattaagttcataagctgatacagaaatgcccgtagcagcacctgaccctgccaggccaatgaaatgtccacttccaacattgctggcaaacaaggatgcacccactggccaccacaccatgtcccctccagccaggaagtagcctttcactgtgtctcttttggtcttcactgtggacttattccagatgcagggctcacctgccctgggggctgtcagtggcttctaaggcactaggaggtggcggtggttgtaaggagggagatacccgggatcctctctctttgcagccaagagcttccggagacagcagtgacccttcctcctatatgcccgctgctgagagagcctccaagcgggtcaaactccaaactccagcctcagccagtcttccactgtcccgcatcccgagaattccggaccg

SEQ ID NO: 442512 - DNA, 492 bp, Homo Sapiens
agctcggtactcctgggatgcaggggattaacaagggatgacgtatgactcttctgtgtttgtcagcatctaggctaggccctgatcccagggaacctgtgctgcaaatgtccactcattcattcattcgttcatttgttcatccatcaacctcctttcttcacaggtagacaagtatgcaggtgccatcttcatccagcagtctttgcacctggatctgtacctggccatagttgggctactggccatcactgctgtatacacggttgctggtggcctggctgctgtgatctacacggatgccctgcagacgctgatcatgcttataggagcgctcaccttgatgggctacagtttcgccgcggttggtgggatggaaggactgaaggagaagtacttcttggccctggctacgcaaccggagtgagaacagcagctgcgggctgccccgggaagatgccttccatattttccgagatccactgacaacgg

SEQ ID NO: 442513 - DNA, 699 bp, Homo Sapiens
  misc_feature (486)..(486): n is a, c, g, or t
  misc_feature (570)..(570): n is a, c, g, or t
  misc_feature (626)..(626): n is a, c, g, or t
  misc_feature (628)..(628): n is a, c, g, or t
  misc_feature (642)..(642): n is a, c, g, or t
  misc_feature (662)..(662): n is a, c, g, or t
ctcagggaagtgacagtcaatatttttattcttttggggtcttcaactgattggatgaggcccgcacacattatggagggcaattttctctactgattaaaaggttaatttcatccaaaaatactctcacagaaacacctaggataatttttcaccaaatatttggatatttcatgatctgatcaatttgacgtaaaatgggtcatcatggctgtaataaaatgtggagcaaaaggatataaggttagggaagaagacagtatacaatataccttctctttggaacttggaatctaatacagaaatgtagtaaaaatggttaagtcaaagctgacacatagtgtacaaagagtggagcagacggtgcagtcttccccagtacagacaagagtgtgcattgtctacagagaatttaataacaataacaaattggctatgatttgccctactattatcactgtgttccagcaattctaaacaattcanaaataaaatactcctccttgagaaaacatctttggtagatctaatttcaaaacaatttctggggttcccattgagatttaatanatattatatacacgcaagatttaagctagaaatacttattctttaataaacaatgntnatctatgtggaagntaattctgggaggccccagntagacagaccttgccctgactgtgcttgactggtctt

SEQ ID NO: 442514 - DNA, 859 bp, Homo Sapiens
  misc_feature (669)..(681): n is a, c, g, or t
tgcaacttttatctcaggtaccaggactgtgtctgttgagggatatttacaaagcttggatcccgtggtccaacactgacgaatcggtttgcgggggaggtgctgggtgtcattgttgaaattgttgaaaaaatgttgttgttgtttttttaaatgtaagtgcagcatcaaaacttttaaaaaactgaacagtagtagtagtagtttgccattttcggaattgttctgcaatgtgagtggattcattgtccttgcgggccatgttatatacttaactgctgactgctgaaccaaaacaaactaaaggaccaaataaaaaaaggaatataactgcattttctttttccaatatgttacagaaaaacattgccctttgactgtcccgttatatattgcagatctcagctactacaaaagatttagttctccatgtgcctcctcaatgctcaaggaggatcacacctgtgtgggtaaattcatgaaatactgtgaaacagccaggctccgtaaggaaagtgtgttacaacaggaagtcagtgagcaagggtagtcctccgctagccacgtcacctaatgctcacgctaccatggaaacacttcaaatgttacaaagcccaaccattttccagcaccatatgaggaaattacaacagtccctaaagtattttnnnnnnnnnnnnntcccaaaaggttatggcctttgctgtttgaccataatgcttgctgtttccatgtacaagttgatttgaatcggtttttctccccttccgctgatagtgaagttgtaactgcgctgggttgaggttgcgtccatgttacagagttgagaaggagtcaggtggtctgtctggtggatggt

SEQ ID NO: 442515 - DNA, 841 bp, Homo Sapiens
gggagaagctatcacctccatttctaaaaccatttcaggtttgtttggtagtctttcttaatgtatttattatcgctttttgtgagtagggtcctgttttatccaggaaccaatttctgccctagcctatcatgccctgcttttgagagtaccaggtatctttgggattgggaagctggctgtttcagaagtatatgtctcatagtgtgcagaacttggtgaccaagtgagaagcgggaccaatgggagactcacaatggactgagtcttgggattatcttttccaaattcttccatgttagaatcacttcagaaaataagactttgatgctttgtctctgagcatcatttttctcctcataaaaacacttccttattgtatgtagcctgcctcctacagaggcctggtaggtgttactgcattctaaaagaaaaatgtcatctctgtaggagcgactatcaggcctagtgtgaaatattagggatcctaggcagaagagctattagtcctggccttcatatcttcaccaaatgaaaatactgtatataaaatttcaccaccaaacttaactaaatttctttttctcaagtcaagccctcccaaagaaaaaaagaaattaactttcctacagtgtcagccaagcaaattttccaatttagttttgggtacaaataaaagtcatttgaaaacaatcctccaactgaggcggaggtaatttttggattatgaggttatttttgcaactcgccatctcacatggtcatttggaacatccagtaactgtgggatctggatttggtggcccttatagaaagatcccaagggtaaatttagtttaaa

SEQ ID NO: 442516 - DNA, 689 bp, Homo Sapiens
  misc_feature (240)..(595): n is a, c, g, or t
  misc_feature (597)..(619): n is a, c, g, or t
ctttctcactccatcctgtaccttccctcctaaaagcagagtaacggctgagacacaattattagcctgactttccttggagattgtcttggttaaacaaattttccagaaactaatctgggtagcttagatcattatttatttgtacttttttaaaatttgttaataccaggctttcatttagttatcttgaagttaatgcctcttctataacgtaattattagctctatcacctaggnnnnnnnnnnnnnnnnnnnnnnnnnnnnnnnnnnnnnnnnnnnnnnnnnnnnnnnnnnnnnnnnnnnnnnnnnnnnnnnnnnnnnnnnnnnnnnnnnnnnnnnnnnnnnnnnnnnnnnnnnnnnnnnnnnnnnnnnnnnnnnnnnnnnnnnnnnnnnnnnnnnnnnnnnnnnnnnnnnnnnnnnnnnnnnnnnnnnnnnnnnnnnnnnnnnnnnnnnnnnnnnnnnnnnnnnnnnnnnnnnnnnnnnnnnnnnnnnnnnnnnnnnnnnnnnnnnnnnnnnnnnnnnnnnnnnnnnnnnnnnnnnnnnnnnnnnnnnnnnnnnnnnnnnnnnnnnnnnnnnnnnnnnnnnnnnnnnngnnnnnnnnnnnnnnnnnnnnnnncttgcaaagatggggtcccactatgtttcccagtttggtcttgaactactgggctcaagcaatcctccca

SEQ ID NO: 442517 - DNA, 1487 bp, Homo Sapiens
  misc_feature (947)..(955): n is a, c, g, or t
  misc_feature (1086)..(1086): n is a, c, g, or t
ttttttttcaatgtaaaatcaagttttatatgattcaaagagaaaagttacattacacatgctcgtttaaataatgtcaaagtctgttacataaaacataattatgaaacattttaagtcttatcattcaaactacttaaaaggctcaaagtcacaaaagatcaagcaaaactgcccaggcaataaagtgcacgaggggagcccacctctccagcggccgtcagcacccagagccgccagctgagggctccatgccgaatccatacacaaggtttgtggttctcagaagagttttcagacaggaactgtttccaacttaaaatctttcaacagacaaatggaggtggaagggggatggtttacacaaagtatttccaaatgtaatcaggaaatggaagtgtaaattaaaaccgttttcaacatgtatctcctctttagaaatatcactgcttggagaatgttgtgacaagcaaccaaatactcagaagaccttatccaccagaatactggcaggactcacattaccttgccatgtcataattaagaaaaattatccaaatttgatgccatttatagtgtgtacagtcaaaaaatgtgtatgctgattttgatgagcaggagaaaggactgggtggtgaggaaacatgaactatgcacaacatgagacaactgtgctgtctcacgaagacacgacactcacctatggagtgtccagactgaaaacctctgaataacacacacatttgtgtcaagtaacagctgatactaaggggcaagttaacgggtatcaagtcacacacaatgaatgaccaggtggagattttatcagactacaaagaacaaaacacaaaacctaattttattcaatattccaccttaccatcatttaaataaaggtaaatgctggtaattaacatagacaaaatttaaatacatactgcacaatnnnnnnnnnttcccaggctaccaaattagtgcaacattctgtatgttcctacatttattccattgcctgaacttccaatgtttaacaaaaaccagtatcagtggcttcttgaacacaggtggccacattctctcggttantctacgtgctcatacagttgaaaaatattgtcccatctattttctaggtagactgtaaaccacaccattccaagtaattttctgtttggtcaaaacaatttccttcaaacaaaatgaacagaaaggcagttgggtagtattactgccatttagcgtaacttgcatttccttgtgtttctagtatttggcaaacaaaggaagcggaatcttggcactgcctgccttcacatgcatctcgccccagctaagctgtgctctggtggagtttcatccaaccaatacagacatttcctttttttctgagaagttactctacccacaatatagtacggataaggccacagcaaaaggagtcagaactgacaattgacaaagcagctggatttgagtgtttctttttt

SEQ ID NO: 442518 - DNA, 717 bp, Homo Sapiens
  misc_feature (663)..(663): n is a, c, g, or t
  misc_feature (693)..(693): n is a, c, g, or t
  misc_feature (696)..(696): n is a, c, g, or t
gagtttactcgtctcgactttgtttttttggattcttttctctgacttgagaaaaataattttaagaatgcatactaatttagttttgaaataattaactgttttaagaaatagaataatctgagtaaagaatcaaagtccttaacatttttcaattgaattattaataaagattatattaatgtacagtattttacccatgcaggtaaaagttgcattagctttctttgctgcatttaggctattgcaaatttagtagcaagataaatgtaagataacatttgttatgttacagtatctgtggatcagaagtctggacccagcttagatgggttttctccttcacgatctctccataatgaactcacagtgccagctgggatgagttttcatgtggaggtcagagtagggaaggacctatttccaagctaacttaggttattagtagaattcagttccttgctcgtgtaggacctaggccctctgatcctgaagactgcctgaagtttcttgctacatgaacctctcaataggtagttcatactatggttgttgcctcttcaggcccacaggagaagaagactatttagtgagaaggccttacataatataagacaaccatggtagtaacatccatcacttttgccacatatgttgctatanggattcagaattctggctactctaaaaggnagntttattggcctgggttggtgg

SEQ ID NO: 442519 - DNA, 701 bp, Homo Sapiens
  misc_feature (481)..(492): n is a, c, g, or t
tgcattttttgttattgtactagaatgaaataatcttaatctgaaaagttttgatggttaaactctttaatatttttgtattcctgactattttcttcatttagctaagtttacactgaagtccttaattacccttctccttttatgataaaaataacatccttcattatctataattttccagtggcttccacatgccaaaaacgtcaactacacaatttttctcttatagtcagaacactggcttgtggaaatgaagcacttcattcgaaatttcaccagtaaatgttgttgatgtgtgatctctagcttacagaatagatggaactgcattcttacatttaaacaattatcctctgattaaataaattcaaatacatctaaggaatagaataattatcagttttaaatattagttagacacgtttaacaagatgcccaatgcgttgcagtacataatcctttttgtgaagttctttcnnnnnnnnnnnnaaagacgaattcttgctcttgtcatccagtctgtagtgaaatgccgcgatcttggtttactatgcctcccagtttcataccgatttttctgcctcgggcctccctaaccgcttggaattacaggcggcccaacaccatgcctggcttcttttccgacttctcagtatccaacgttatttgcactgtagcccagttctgccacgctttct

SEQ ID NO: 442520 - DNA, 714 bp, Homo Sapiens
gcaggggcttcttgtgagattatctgtcttgaagatatttgtgactaattacaagcagtgtaacctgggagagaagctgttcaggctgaggattttaaaacgatgagatgagagaaaattagcagacatcttttattatgtctactgtctttaaaagtcaactctctggaaaactatttttataggcaaaaagtaggtgggtatgtggtatgattatttgttttacttttgagggcagatgctgtacctcacatcatgagcaatccaccctcatgttagagggaagatggagtcgtttctgggtgtttgtgaactcttggtagagccaactgaatgtcagtttctattattctgtggtgaataataactcaagtaattttcataaagaaacagattgaatttcactgtgaacattttcatcaatttctagaatcttggaatttcgctaattagcgagttggaagtattgtattatgtgggaggcggatttaatgaattaaaatactataaatttttgctctttttggtttggatcctgaaacatttacactttattgacttcctagatatgggcttaagcaagtctctttttaagacaggaagtcattgaaaaattttttgtgagctccaagagtacgcttgttttattgtttacattttgtgggggggaaatggcctttgtcccatgtttgggttccgtggttctgttggctt

SEQ ID NO: 442521 - DNA, 407 bp, Homo Sapiens
  misc_feature (105)..(105): n is a, c, g, or t
gctcggctgcttaacccggttgctcccacgtaacctggtgtgggtggctctccctgccttcaaggtcacaagcttactcctctctctggacataagcagcccganctgtgtcctggctcctcactgtccgtctgcaaagacggaaaagcggacaagctctagctctctcctctgggcacgagcacctgtatagcgtcagcaggcaagttataccttttacagacaatagtggtccagaacctagtacaaacttacacaaaccggttataacaaatggagtatgcacctgtgccctaaactcactgagtcatgcaggctcggatgcctgccttggcctactcttgaccaaagtgcatccatgtacattatacctctattagtctgcacactgttataaacaacttctg

SEQ ID NO: 442522 - DNA, 1134 bp, Homo Sapiens
aaagaacaaaccagtatatatccaagaagactatgagctgaattgtaaatctctatgcattaaaaaaaatgtaacttgacattttagggtcttcagttacacatacacctgttataaggtgtttaatatagctcaggaaagtgagcattttgtgagaaaaatgaatatatcatatctaatggaaaagattggatgaatgttctcaaatgttacaaagctgtttaaagaaaaaggtatatataagtaatcggaacacttagaagactgatagatgtcacacagtggtattatagaaggataatacagagccaagatcaaattaaaagacaataaatggaacagaagggaggcagtgtttagctttgtataaacttttaggtttgctctgtaatctgctaaaccatatacattcttttgtgatatgttattatgtatgtggcacttgaggcactgtatgtaaagtaaggaatgctttactagttctccttggttttatctttgtttaaactagctttaaagtattaaacaataattgaaatgaaaagcttacctattttaaaaagccaaatttaaataaatatagaactttaaaatgtttatcagttgtttccatgaaagaatattagtttccagtaaattttagtgatggctcactcacttttctattttggaattacatagttatgtaagtaaaatttttaaaaatcataaagggagcaccattgtacagtctagcataaacagcaaattttaaagaggacatatttaagttcataatcatatttttcagtaaatattgctcagtgaactggaaaactttaatagaaaaatgtctgcagttttgtgattgttaatttggttaaaccgatattttatattatttaagttaggtaacattttatattactttcatatgaataaaagtaatccatgcattgtagagtctataaaatgttgagtttttttagatgatataaactttgattctgggcactagtgctagtagatattactaccctcctgagggaaatcagaaatgatttacccccagtggaatacattaattcttaaaagcggctcttttcagtagtgtgaacttttagaaagtgtctcagttagtttaaggaaagctaa

SEQ ID NO: 442523 - DNA, 683 bp, Homo Sapiens
  misc_feature (289)..(352): n is a, c, g, or t
tgcaggaattcggcacgagcagccatctgtgtcatatgccatcattcttcctgacatctctgaattacaaactcaaccaagagttccagtaatgaatctagaaggttactttttcacattttacaccctgtaaattttatagaataacccagttctcactctcattctgcttatttgatccaagtgaagaatactatccaatattcacccacagttcctctaggtagggatgggaggaagtagggagtaaatattattaccaaggagagagggaaaagaagaatatagnnnnnnnnnnnnnnnnnnnnnnnnnnnnnnnnnnnnnnnnnnnnnnnnnnnnnnnnnnnnnnnntattaaacaacacaggaaaaagtaagtatggagaaaaataatcatgcacatttcaaaagaatacagaaagtgggaggaaaattacattctctatgagaataaggcagaaatattccccaaaaggagaaaaaactaaaagggagaaaatactcatatatcggtcacgtttatatggtaacttttacacttttttaaaagtcaaccccatttttgtttcactgaaaaatagtatgtgtcctgcagtatatactcaataaatgtttcgtgaattgaatttaaaatattttactttggcggttatttctttttcacagtgctcacagggtctttt

SEQ ID NO: 442524 - DNA, 222 bp, Homo Sapiens
aaaaggacattggaatcaggaccctctccatcctgaggtgcctacaaggcatctctctctgcaaacgagtaaacatcaccctccaactccttacagagtggagcaacaggctccttcacctcatttctgtgctgcttgggaggcctggacagcccaataaccagctcctcgctgatgaagcaatcaggtggctcgagggggggcccggtacccttcgccctt

SEQ ID NO: 442525 - DNA, 702 bp, Homo Sapiens
  misc_feature (631)..(631): n is a, c, g, or t
  misc_feature (634)..(634): n is a, c, g, or t
  misc_feature (664)..(664): n is a, c, g, or t
cgcctctgcgctcctccacattatctccttcctcagtgtttttcaaatcactgtaaaatttgcagaacaaatgaacatttattcacctccaacatctataactgatgctaattgtccccaaataaatgataaatggaattagattctgtttgtacacttgccaggtccccaaaaggttaggtatgagcttgtttttatttttactgtaaatctgtttttaagcacacttgcctaaatggttgcctaatcattctgggaagtatcttcattaaaacggagtgattatctgatatactctcataagtccagattttgacatacgtgcttaaaatgctagccccacatcattaatgagagtgagaaaaatgaaggtagactaaaaacagcaaaaaatacttgaactttcaaaatgctacaattttcactcacttaacatagattatcccgtttgactctcagaacaatcccatgaggaaggaagaggatttattacttctgttttccaaatgatgagattgaggctcagaggtttgactgctccagcttcagagtaggaagagatggggaatagaatagactaggaaccaggtcatccatctcacatttcccatcatgttcctttccatcactngtngtgatgcagggcacatgaatgctaagtgtngtcaccttgatcaatgaatgagtgacctgatgaatgat

SEQ ID NO: 442526 - DNA, 690 bp, Homo Sapiens
  misc_feature (542)..(542): n is a, c, g, or t
  misc_feature (552)..(552): n is a, c, g, or t
  misc_feature (618)..(618): n is a, c, g, or t
gtttcagagaggatattttttcttctcatatttttgaattttcaaattttctataatcgagcatgcattacttttgtactagaaacattgtataaaaattaaaaataagaaaatagtatcaccaatgacttatatttgggcacatatgtgtgcacaatgagatgaggtaccactcattaaaaatagtgaggggggtactttgtagattgaaggtagatgaactttggtgccaatgtcagcagtttttttacagacttctcacaaatctatgaggcatgcagtgataattcttagtacaagcaattaaggttatttcagcaaacagctgtctcacaaacacttccaagattcctttgaaggttgaggaatgttgatcaaagcaaactctcttgtgaagcttcagagacatttcagcaggacgttaaaacataatgtggaaaccgatatcaacttagctctccatcctgatgtggtttatcctattggcacaaagcttctgatattatctgtgcacaagggtctagatgtaatacattgctatngtcatagcanattcagcaaaatacctatcagtgtatggtccacaaatgcttagaaaggaaagcatcgcatttactnatgataaactctctttgctgggatagaactcacaatcttcaagatgctgcatttgtagcccttctcgagggg

SEQ ID NO: 442527 - DNA, 687 bp, Homo Sapiens
  misc_feature (258)..(555): n is a, c, g, or t
  misc_feature (559)..(596): n is a, c, g, or t
  misc_feature (646)..(646): n is a, c, g, or t
  misc_feature (652)..(652): n is a, c, g, or t
atagactcataagaaatggtgattaagcgggtattaaatgaattatataagcaacaagtatcaacatattttaaaatacaaacagaacacttcttgtagggttggtcagaaagtgtttcaagaagaaaaataggaggaaactggactttgaaggatttttttgtttcttgtagtccaagtagaattgctaggagatatagaacaggcattgcaagggtaatgatcttgagctaattccacctaataaaatggacttgnnnnnnnnnnnnnnnnnnnnnnnnnnnnnnnnnnnnnnnnnnnnnnnnnnnnnnnnnnnnnnnnnnnnnnnnnnnnnnnnnnnnnnnnnnnnnnnnnnnnnnnnnnnnnnnnnnnnnnnnnnnnnnnnnnnnnnnnnnnnnnnnnnnnnnnnnnnnnnnnnnnnnnnnnnnnnnnnnnnnnnnnnnnnnnnnnnnnnnnnnnnnnnnnnnnnnnnnnnnnnnnnnnnnnnnnnnnnnnnnnnnnnnnnnnnnnnnnnnnnnnnnnnnnnnnnnnnnnnnnnnnnnnnnnnnnnnnnnntaannnnnnnnnnnnnnnnnnnnnnnnnnnnnnnnnnnnnntgacagaccgttaaaatagacttgggactcactggatcttacttcacaanatgttngatgagtatcactatgagccagctcatgtatttgg

SEQ ID NO: 442528 - DNA, 690 bp, Homo Sapiens
  misc_feature (57)..(57): n is a, c, g, or t
accgtctctacgcctagccttggggtactggtcttccctgtggtttgactgaaaagnctgtgttctggcagctgggtaagtttaggatttcctggtgccacttagaattaccaacctccataaaacgctcaaggaatgcaagggttgtgcaatcagttattgcatcaggaaaactctctgaatagcctcattctaccctcttgcccgcccaggtgccggcttagccaacgggaggttgggcaccgaggggaaggacagagatttcctttcctatcacgcagacagtgcctgtggcaggaacttcgggaccttggatctaccccaaacactgctggggaaagtgctagtcctctggaggggtagggagagaccaggaaccaaaggaagactggggagtgaagtagggaggggggtgcctgaatgagttgggcagcagctctcctgcccacccctccaaccccaagtagctctcagtcctgccctgccgctgtaacacagcacacaatgcatcccctcctggagcctggggttcctcatctgcagagtgggaaccatagtttatccctatgtcatagagcggtgatgaggattgaatcagcccacgcgcatgtacatcctcacttccaaaattaagtcctcaggtcaggcatggtggctcatgcctgtaatctcagcactttgggaaaccga

SEQ ID NO: 442529 - DNA, 696 bp, Homo Sapiens
  misc_feature (457)..(500): n is a, c, g, or t
caagagaactaactatccttacaagatgggaaaaaagaaaagaaacggcaagtatagaccaggttgaagaggactacacaggttgaaagtagtggcactaaaaagcctaggaagttcctgtgaggaatcatattaagtgaaaccacaggttagatttcagggacctaatggaggaggccttattagaggccattaatgtaggagaggatgacaaatgtttgaagttagaacctaacctagaaattaatatccatttttgaaggaaaatataagccaaacatattaggacagaatagccaagagtataatttaaaaaaattttacagatttaaaacaaaaccataaactgcctccttcctagttatgaatggcttcctatagcacaggaaacaggtggtcaaacaacaggaaatgtaggtcctccattctggctatcttctatcatcttttcaactgnnnnnnnnnnnnnnnnnnnnnnnnnnnnnnnnnnnnnnnnnnnngttcttgtccttagactagtgacaatcagaaaacagacaaaccaataagtacaatccattgtgatccatacagtaatagacacataattctaggagttttaaattatttttacagtcagcaagaacaccaactaatcaggacggaagctggccaaagggctggccttgggtcctggaggcttccaactgtactggc

SEQ ID NO: 442530 - DNA, 414 bp, Homo Sapiens
  misc_feature (197)..(240): n is a, c, g, or t
gccagtacagttggaagcctccaggacccaaggccagccctttggccagcttccgtcctgattagttggtgttcttgctgactgtaaaaataatttaaaactcctagaattatgtgtctattactgtatggatcacaatggattgtacttattggtttgtctgttttctgattgtcactagtctaaggacaagaacnnnnnnnnnnnnnnnnnnnnnnnnnnnnnnnnnnnnnnnnnnnncagttgaaaagatgatagaagatagccagaatggaggacctacatttcctgttgtttgaccacctgtttcctgtgctataggaagccattcataactaggaaggaggcagtttatggttttgttttaaatctgtattttttttatactcttggctatctgtcctttgtttgtct

SEQ ID NO: 442531 - DNA, 828 bp, Homo Sapiens
  misc_feature (636)..(636): n is a, c, g, or t
  misc_feature (713)..(713): n is a, c, g, or t
  misc_feature (718)..(719): n is a, c, g, or t
tattggggtacggaaaccctactgattttttatatgttgattttgtattcaactcgactgaatttgtttattagatctaagagatttttggtggagcctataggtttttctagatataagatcatatcactgtcaaagaaggacagtttgacttcaagttttcctgtttggatggtttttctttctttctctttcctaattgctctcactaacacttccagtactgtgttgaataggagtggtgaaagtgggcattcttggcttgtgccagttcttggggggaaggttttccgatttttccccatttggtacgatgttagctgtgtgtttgtcatatagcttttatatgttgaggtatgttccgtctatgcctagtttgttgagtgttttttgaagagatgttgaattctatcaaatgctttttctgtgtctgttgagatggtcgtatggtttttgtccttcattttattgatgtgatgtatcacatttattaatttgtgtatgttggaccatccttacatccctgggataagtcccatttgatcatgatgtattctgtactgttggatttggtttgctagtattttgttgagaatttttacatttatgttcatcagggatattggcctgtagttntctttttttgtgagcccttatctgattttgataacaggtaatgctggccttgtagaatgaattagggggaatgcttnctctnntaggtttttttaaagaatggtttgagaactggtgttaagtctttctttggtttgtagaattcagcaatgaaggcattccagcctggctttctttgttgagagacttttt

SEQ ID NO: 442532 - DNA, 647 bp, Homo Sapiens
  misc_feature (297)..(410): n is a, c, g, or t
gcccaatggggcccccctatcaatatgaggggccctgatagaactgctctcgttaaagttgttaaatataagagctctcagaaaataaacaagagaggcctgcctgaaaaaagatgaaaagatgatcagatcgctagcagggccgtcatacgacggcaatgattcactgagttatcattgaaacccactgtggacatttaagcctggaaagcaaaggatgcagggacagcatagatgctgagataatttcccacatttctttccttctgatgtatctctcaaagcctatccctaagnnnnnnnnnnnnnnnnnnnnnnnnnnnnnnnnnnnnnnnnnnnnnnnnnnnnnnnnnnnnnnnnnnnnnnnnnnnnnnnnnnnnnnnnnnnnnnnnnnnnnnnnnnnnnnnnnntagggtcactatttgtggctacacaacttactcactgcgttcctccaggaagcacattcatactgactgtgatgtgaatgcctcctgggagtcgtgcagtacacaagctgccccactgaatgtggcagccaggagtaactcatataagtggctccaggctcacagtaagaaagagtgaaggtaacctggataccttgtcatctaaaagaattcggggtcaggcatggtggctcatgc

SEQ ID NO: 442533 - DNA, 683 bp, Homo Sapiens
  misc_feature (644)..(644): n is a, c, g, or t
  misc_feature (648)..(648): n is a, c, g, or t
tacttccacaggggtttgtacttgcctaacctgcatttgaggttgtaatgttacaggcatctgaactgctggaagaggagttggccctcgctggtttagactctgatggccctgctaattctggacctttttcttctaattttaacgtttcaggatatatcacctcctgtaattgattatagtcaacattttgcattgactgagccattaccggctctgctacatactcacaatgtaaactttccgttcctttccgggattttatctctgcctcttctttacaatctattacacagctttcaggggcatcagaaactgaaacactatcttcttctgtttgaaacggttctaaaactactttaataatgacccaatcattccatactgtaagtgggatgattttaccctccctacttgcttgttttaattctttgccaattttttcccaatcttttagatataaagttccctgttctggaaaccatgggcagaattgttctattgtttgaaatagcgtaattagattttctgtagaagctctaactccccctcttcttaaaagaattttaataaagctgagataagaggcatatttactttcagtttgccccatcgttaccctgggttcctctaagcacacaatnttancgcaaggctgaccgtggacgtacttgggactctct

SEQ ID NO: 442534 - DNA, 520 bp, Homo Sapiens
tgctgggtgtgagctaccatgtccggccaatactcccttttttgtatccatttttagatttattagggtggatcttgatataggatttgaatggccagcttgtctaaaagggcaatcacatgaaatagcagttgtttatccagttaattccatataacatactgaacactcacatatgaataggtttctgacataatcggaagttcctgtgaacactcgttaaattttgtagagagactttgttcaggtgatcatcttaattagtgtaaaagaaactctgtcggtttacctttatcgtaaacccattaagtttctttaactctgcctcagatcatttcaaatttgggacccattgtattactcctatctagtaggcttttatcttgagagttctaggttgaaatattccagtttcttgtgagttctcttccttgtcaggttgttactaatgccacataagcctcttgtttttatatgaatgtaagaaacttatgaattatagactgcagtgaggcttgtg

SEQ ID NO: 442535 - DNA, 652 bp, Homo Sapiens
gtaatatttattttaaatagtgaccacagtaccaaagcaggtatattatttgtatttgctttttattaaaaaatgattgaaatgccaaacatcaaattcaaaaagtttagagcataatctacatcaatgcctaccttctatataagacataaagtaagaggataaaatatgatgaatccaagaactaggattctcaaagcagaacactaggtctttgacagatatttacattacctaatactgtttttatttttaaataaaaaaatatatttggtcaccatcactttccacacttcatttgagaaaatgccaagttcaaagctgaccttcccctgttgttcttgcttgagtctctccaggtaggatagcagaggaaaaggacttgattaaaataaattatcctaagggcagagcagtgaatggatctaacactgggaaaagtatgggagaggaaaagagggaactgtgccacagagaggtgggcaggctcttgagaaagggctgagaagtggggctggcgtttccttcctcctcccctgagctccatcctctgccctactttcatgtcttccccttccagctcttcctacctctacccacattccttttttccttccactccaaactcaattcttctttcatcagttttttg

SEQ ID NO: 442536 - DNA, 401 bp, Homo Sapiens
ccaaggcaattccattgccatctattaatatatgtcagttgctcacaaatttctttgtacagagccacctttactctaaaagacaaacttccgtcatctgtctgcttattccatgcttcagagggaagttcagtatacgtatcccaaagcaaattctttatctttctaagtctgggcctcttgatccctatctccacggatggcaccattatctattcagttcagtgctaaccagaaattgagaaatcattcctcctatattgtccattacctgggcatccagtccctcacgaagtgaagtgtattttgcctctgtgcctgagctgctgacttccactcagcatacgttcctgccaccattcccatccacagcatactctcagcctacctctccagtcacc

SEQ ID NO: 442537 - DNA, 424 bp, Homo Sapiens
  misc_feature (270)..(270): n is a, c, g, or t
tgtgtgagtccattctcacattgctataaggaactacccgagactggataatttataatataaaggaggtttaattgactcacagttccataagctgtacaggaaccatggctagggaggcctcgggcttaatgatggaaggtgaaggggaagcagacacatcttcatgtggcagaacaagagaaagagagagtgaaaggaaaagtgctacaaacatttaaacaaccagatatcatgagaactcactcactatcatgagaacagcaaggnggaaatctgctcccatgatccaatcacctctcaccaggtcccttccatagtgcttgtgattacaattcgacatgagatttgggtgggaacacagagccaaagcttatcattccacctgtgggtccttactctcatgctttctcaagttcacctt

SEQ ID NO: 442538 - DNA, 665 bp, Homo Sapiens
  misc_feature (606)..(606): n is a, c, g, or t
  misc_feature (616)..(616): n is a, c, g, or t
  misc_feature (638)..(638): n is a, c, g, or t
  misc_feature (653)..(653): n is a, c, g, or t
gggagcctcaagccgaaagttgggtacgccagggcccagttcacgacgttgtaaaacgacgcccagttgaattttcagctgagggttcctttcaccaaaaagaagtactaaaaaaaagggaagttttgacagggaagttccattttagataatttcattttgagggctagtaaaatgtatttggggagcggcaatattcaccaggcatctggataagcaggactcgaactcaggagagagatcctagaaattaatatctgggcctcatcagtatattggcagtatgggaagccatggccgatgccccttggaaagagaataggttgaagaaagcccaaggtcagagctctgaatgaagtagactaatatttaaaggactaatagagaagaatctgcaaataaggctgggagactatagcctgtgcatgggaaggcaggaccatcggtatcgtggttctttggcttcctgtgatcagctcaggtatccggtgttccctctacctccttggctcttatgacatttctgtctttccgtctgtattgccttaatctctcctctctcatgctctcttcatatatagttgttccttcccctcttcatagcgnctcgtgcaanttccaacagcccgggaaatccnctagtgctagttcgnccaacgccggga

SEQ ID NO: 442539 - DNA, 698 bp, Homo Sapiens
  misc_feature (606)..(606): n is a, c, g, or t
aggagagtttgttccaaacagggaactgcaggtacaaaagtccaggggcaagagagagtacagacaaggtccagttctactgcagacttttggggaagggataatgctagaggagaggctggagagtgagacagacctcataatacagagtacagacttcaacccaagggcagtgagaaatcattgaaagtttgttttagcagggaaataaaacgacaggttttgcctacaggcagtccccaactcaacgatggttcgacttaggatttttcaactttacgatggtgcgaaatgattcagtatgctcctcaccttatgatgcagttatatcagataaacccattttaagctgaaaatatggtgaagttgaagaagcacttctgccttacgatattttcaatttataatggatgggtttattcagacataactccattgtaagtcgtaaagcttctgtactgaaaaaaatcacttgacctcagggtataagatggattgcagggagcaagccttggccaggagacttttgcattgttttcggagaggaaagacggtgacttgacatatatagtggtgatgaggggaggacagatttggaagattgtntaggaagcagaattaatagaacttgggtgattgataggacttggttggatttgaggtaaggggaagacataggtttgacgctaagttcgttt

SEQ ID NO: 442540 - DNA, 736 bp, Homo Sapiens
ttaccgatactcttccgcggctactggcaatctagcactagtggattccccgggctgcatgaattctgcacgagcttttttacctgcttatattgttttagcacatgttttagttcacctctgctgggtttagtggtctttcagatcatattacctgatttgaataaaatgaactttgctaaatagacagatggctcacaaagattcctgcaaagaaaatgcagattgaagtttcagagtcagcagaagattgaagtaataatacaaatacacgtgaacagccagaaagaaacagagtggatacttctatttatattatgaacttgtcagtcaaatgcataatataaaaacaatggtgatctcatcagattgatgaagaagcagtaataaaaaatagcttagaattactaaaaatactatttaaaatatggacttatatacactgttgagtacattgtacctgaaggtatttactaatgatattatgggctaatcttataaatggagatatttaaaaactaaatattcagaatataaagacagacttattggatgttttcagggattggcagtcataatccagtaccttaaaaatttattaagggtaataataccattttagaaagtccttttgaggtttagggaataaaagacaaaagtcattaactcttggtcttcttggttgggtacagtggcttgaatggatttttgataattttgggtttggtgtcttggt

SEQ ID NO: 442541 - DNA, 680 bp, Homo Sapiens
  misc_feature (622)..(622): n is a, c, g, or t
cggcacgagggatcacaccagtgtcacccttacaacagtggaggctgcttttgggcatgtggtgacccgtgaccctggccctgtctaggcactggccatcctgagtctagcacctcacacacacacatatatacagtgcatcccagtgctcaccgcctgcccacaccccccaacgccagcacccaccgtcatgacatgaacacagagaccagtaccctaccttgcactggtgacagcgcccctgtcacaaagccagcagcttcagacagcatccctcaacattcttcctggctactctgtccctgtccctcactccctctccagtagctcacagtccaaatcccacaacggatggggaagcttaggcccaagaggaagggatgggaggacacagtcatccctcctgagacccggggataggatcataaatgaggaaagttgcctttggccagtgaatgacagacgtgggcatccaatacaaatcattcaggtcctggtccggtggcccactgcagccctctgaatctgttcagctcctgccgtgcggcagctagagggggccccaggacaggattctagaaatgggcaccaagctgggaaccagagtctaaggaccactctntgttcccaagtgtagtcccagactatgggcccctagggttaattccatctctagactg

SEQ ID NO: 442542 - DNA, 1101 bp, Homo Sapiens
  misc_feature (132)..(132): n is a, c, g, or t
  misc_feature (259)..(323): n is a, c, g, or t
  misc_feature (329)..(329): n is a, c, g, or t
tgaacgtaattgtaataaaatgctgctcattgagccaaagagaagaaatgatttattaacatggggacaccaagaaaaacaaagtatgcttttattccctttgtcaagctcagttttagggttttgtctttnttttatagtgacaatccatagatatagacattcctaaaagaaaaataaataattcagtagatatatgtcactgttacctgaatatggaatgaatttgatgttttttattttgttgagacagggtctnnnnnnnnnnnnnnnnnnnnnnnnnnnnnnnnnnnnnnnnnnnnnnnnnnnnnnnnnnnnnnnnngctcgngatcctcctgcctcaacctcgcaagtagcttgggactacaggcgtgtgccaccagtcctggctaattttttgtagatataaggtctcatgatattgcccaggctgaatttgatgttatttcaagttgatttttgtgtgtttggaagtttgtcttgctcctcaactactatgcaggtagacagtcatcccccagagattcactagattgccatatagaggcactttatcatttccctattgttcctaatacagaattgtagagctggaaagtaacttcagttttctaaatctattcctaaacaggatatcactaacttctttagaatcatttctcagtatacatcaacttattgagaactgtctaatactcaaagaaatgaaatcttgagttcagtaagctgtgttccaagcaggaatcattttcacttaccaaaatatctcctattacctcaagctatccttgttgaggaaagctgaaaattaaattttaagtatcaagtctagaccatagagtgctttggtgggagtattttgattatatacctcctacccatcagaagcaggcagctaatattgtgaactgagcatttttgtcaaaagtcacagggcaagagactagagaagaatgagaaaggtcaaatggaccttgtgtgggctgactacatgggatcttgttctttggaggtctgtcacagaagagcacattgaggtgatgagccagacagactcagtcagcatccttacctagagatggcactctctattaggacca

SEQ ID NO: 442543 - DNA, 659 bp, Homo Sapiens
gttgactctgccatgtgacatgttgataccagaaacatggtgctatcagcaacttcttaattgttctccatcagcatctctgtggtttctgacaatgcctatagacatggaactcttgaagctctgttccaaataaaggtaggcccctcaggtggagctgcagagttttcatccttatggcatgcctttcttcctggcagaacttctgtgccagtgcacaagagcagggacagcagcccacttctcccaagatgatatgcctgctctctgagtgggcactgagaagagtcgagtctctggtcatcttggcttgccttttctggcacaaacgactgctgtacaagcaagctaaaagacagaggtgataagagggcgctagtattctcagcctgttcctgctcactctacaagtagatgctaggtagggaaagatagcctcatcctcttctcagagtctactaggaacaaagctttctgcaatacttaagtcctaacgctcccagggtgaaaccctgaacacagccttcacctaaagtgagggaagatgaagtcttgctttttccacaactgtttgagtccggtatcggaggctcctatatacacgactggagaggaatggagagaagtgcacttaggcgtgccccagacttgctgttttc

SEQ ID NO: 442544 - DNA, 702 bp, Homo Sapiens
cgggttgcatgaattcttttacgaggagttttgagaactagttacaacacatgtgaaagtgtgttggaaagcaccaagtattctaacagaaaaggccaagaaacagcatgcatgctgccacttccctctcccgtgcccaaggcagacatggctatctatctcggcactgtctcaccaagctatattgatcattcagaatccctctcaacacattccaggatagttagggtgacatagcctccacggggtgaagagaagcagcaatgcaaagcagggaatgcccagggaatgggccaggtggcctgtgccgtctatgggctgggcctcatgctcagctgggctgtggctgggcttcaagaggcctttgttcccagcatcctggttagcaaccccagttcctctttcgtgcattgtggttccctgagaaaacgttaacccagcccccagcacagtcaggccagccctggggaaggcctcattcatgaggcaggaccccaggggccaagttggtgctcgggggtggcaggacccctgcagccccctgttccactgtacactcccaagtccaccccgcgaggagcaccccctgaaggccatgtatcaagcccctctgccctgggccactgcatgtagtgggagctcttgtcaggcagaagtcttttgagcaaggacctggggcttctggaacttccccagcgccct

SEQ ID NO: 442545 - DNA, 456 bp, Homo Sapiens
ggatcccccgggctgcatgttattctgcacgagggcttttctcctaaaatatttgatcccatgttgtggcatctgcttctcagaagacccagacgaacacagtagaaattaaagtgcattagaatagcacaaaagataggcagtaattggagctaagttctgtatgggtcctgcttgcgttaattggtaagtggtaaagagttaatttaaggcccactgtagtaaatcaagagaaagtaataagatttttttaagtgtataaataataagctgatgggagaactggagtaataaataattgataaaaagaagacaagaatggagaaaaagagacaaagaatagatggaatatatagaaaactaataataaaatggtctacttaaatccaaatcatcagtaactatattatatttacttaattttttcttgacgcctaggcacagtggctctttctg

SEQ ID NO: 442546 - DNA, 696 bp, Homo Sapiens
gctttaggttctgtctaatgagatagaaactaagtatgtttctacttccggataatgttcttatatggaggaaagcaatttcttctccttcttgtcctgccttactgctgattgggatgttagttgtgatgactgtaactagagcaattaatctgcactttgaaatggaagtcacatgtgagaatggtagaacagcaacaagatagatgggattggtgttcctgatgagtatagctaatatactagtcctaggtggcatgcccttacatgagagagaaatacatttttattttgtttaagcagtggttatttgggcattttcctaaatcacagacccaagatcccatagctaggaagaggcagaacatgcatctcaacccatgtgtgataccagaccttctgatttctccagtctattctgctacttcctggaactctgagtgcctgatagtaatagtgagaaatatggctgggtgggcactgggaacatagcttctccttgagactaagccattgcttggctttttctcatgctgattagagggagaggcaaacaaccaaccaatcagtaatgtaacagaatccacatttccaaatctagtgctctttcgaaattgccacccattaagtcatcagtccaaaggacttgcgagtaatggcagaaatctcagaggcttagtttcctgtttcagtctc

SEQ ID NO: 442547 - DNA, 613 bp, Homo Sapiens
  misc_feature (287)..(290): n is a, c, g, or t
atatatacgacctaattgttgcctctgattcccctcaagaagcaaaaattgggtaggtgaaagttagaatctttgaggagtccccatctctgccagaaatctgaaccaattgagaaataaaccaaagtggcagatcaaatgggggccaaactatcacctccattaatggtaaagccaatattaaagtagtaacttaaattgatgggcaagtgaacttcctagtattgaaacatagacagagttggctttgtggacatgccttcaggtggcatggggccccatgctannnnaaagtcccacagttgggattaaatgttctgtggtcacattgttaaaattcttaacaaatctttgaatttgtgttttgcaagtgaagttcaatgtgacaaagaaccatgctctggggcttggagccttgtctcatacccagcctttactcctgcctcctttgccaaatctgaagacagaataagctacttctcaagctgctttctccttctttcctttccttccctctataatgcatttaaaggttagtctgtgcctacaatttctactctctaatttctccacatcccaccactttactgaaattggtttactgagaagtcac

SEQ ID NO: 442548 - DNA, 668 bp, Homo Sapiens
  misc_feature (41)..(41): n is a, c, g, or t
ggccgatctagacctagtggatcccccgggctgcattattnctcacgagcaatgtttagcttccgcttataagcggtaacacatggtatttggttttctgttcctgcatgaattcgcttaggataatgacctccagctgcatccacgttgccacaaaggacattatttcattcaattttatggctgcatagtgttccaggagcaatttaatagttaaacttgcagccatgatggagcaatagtctccgatttgccctccctcctgagacaactgaaaatggacaatcaataggaggcaatggctctcaggttatctgacaccagacaatgaagtcagtgacctctgagagacagaaaacaaatgaattaatccctaactctgccccagctgacttcatggaagtttctgggctttgacacagagaggggaaccaaagtgaaatctggagatctctctgagtggaagagatgagagatgagggataccaaccagttaagagtttcggggcagagaatcaaggagacagctgcacagataggaatttctggagattttcagaggctccctctcaagtcataagcagaacacagatcagtacgtgcatatgaatagactacctaagtcccagggacgaccagagtggattagagggaaccatccccggcgg

SEQ ID NO: 442549 - DNA, 807 bp, Homo Sapiens
  misc_feature (60)..(68): n is a, c, g, or t
cagctctgcagttttcactgtattcaggaagcataaagtagtatgaaaggtttgaagaannnnnnnnnacaagactagttctaaattaacagcttataaaaaatttgtctaaatttaataattagtataaggatatgacctaataaatgtctccttacctaaagattcatttgctttcttttaatatgagtaggcatacttagtagcttttctgaacctagcctatgtctctgtccccaaaatagctgcccttaaagagttgttagcagagagaaaaataacagtgaatgtgctcctggtgtatatggcagtgaatctcctttctgttctactttagcatactatatatatttgactgtgtacattcttatgcaattttaagtatacactcagcaataattagaaaaaaaggagagagaaaagtgatttaaacagggtggattccactctgtgggagccttcgatggaactcaaggtggagctcagcctttccaatgagctctaagcatgtagatagcctgagctgtgtctaagcctggtgtttaaagatgggtatttgtcatacaatatgggtcctaaatccaaccaactacacattttatctggtgttcaaaccaaagaaacaatgatctactcaaacattggagaaaaaaactgccagaggaggagttgccaattggcagtgtgtcttatctccatgttgtaactggactctgactttagaccattacctattaggaagattaaaaatgactgtatttttaaaggaataaatcccagtgtgcctgatttgacattcttgtcagc

SEQ ID NO: 442550 - DNA, 680 bp, Homo Sapiens
  misc_feature (506)..(506): n is a, c, g, or t
  misc_feature (645)..(645): n is a, c, g, or t
ggcatacacatagaatcctgtcacatccaggtagaacctacaactactcttcagtttcctccaagagtttcttatgaaattagctacaagtaatcaataactagctagagaacacaagaattaaactctctttttatctcccctggctccagcatttacctagggctcactcagttcctagcacagtacatacacataggaaagtatgtcaataaacaagtgctgagctaaagtgacagtgtttaagtttccaaccataagcagttcacataaaagacttatgggccagcaaactactactgaagaaaaaataatggcatgtcagagacacagttaaggataaagatatttatcttgccttgaaggagatttcagttttacctgagtgacctttctataaactgataatctcctttgttgggaaggcataggggtcaggaagattactgaattctctcagtcactaagctcttataattatcaaagaaggtgcctgctgaacacanaataaaggccccacatgtgacaggcaggcattcgttaacttatttcactagtaaagaacaaccaccagtaacagaataaatgaacagaagtccatctaggcataacttaatactagatgctggccttagatatcatctntactcaaatgggcattaccaaccaagaatattttt

SEQ ID NO: 442551 - DNA, 689 bp, Homo Sapiens
  misc_feature (495)..(495): n is a, c, g, or t
  misc_feature (628)..(628): n is a, c, g, or t
taattttcatgtttctctcccacccctgggagatattgtggtggtgtttttttctttaaatttactttatttgccttggggagagggtgagatgggtggacagtagcaattgctttcacttggtcttcctgcataagatggctcttaccccgcaggtcaagaacccaatataggggctgggccaactaccaattttgtctattctgactatacgttcaaggataaggtagatgaccacaaactggtctaataggagagctataatggttccaggtatcaatgtcaactcaagccctgtgtgcaataatttttgaattattgtacctcttttatcagtgcagttacctacgtaaataaacataggtcctcttggaggactggcagattcattactgtgcaaaccttccaagattttgtagcatcttcactcctggcaactggcttcatcttcaattaatgattactcaggctggctgtcctaggtttatatattgngcaaaggattgtgactttttattgggccaaatgctgttggtcccttgatcattcatcctttaatttcttttgatggtacaaatgtgtatattggtgttggctgctcatctgttttcacccctaagaatgctantggttaatcttcataactctcaagcacccctggtttgctctctgacctttgcaatcatttt

SEQ ID NO: 442552 - DNA, 730 bp, Homo Sapiens
aaaaatatgtggaaacaccataccacatgtttcttccttcacactatttcagtcacatgggcttctctgttgttcttctcttgtactcctcagattcttgtttcaggatcctttaactggctgtttcactttctggaccactcttccaccaaatacccacacagttcatgttcacaatttaaacaaatccttctaaaatatcacctcttcagtgaggccttcttcgaactatctatctaaaataatgtcttagggtcctaggcagaggctcctgtcctctaagaaagctttggcctttttagggagagttccttaagacagataaattaggctccacccaaaattgacagactgatagtattcagaggatactgcagagaatttataatgctaataaaggtcacccactaaagaatgagaaatgactgaaataaatataaagaatttcttgtggtcaaccctgttgccctggaaaactctcctagctgttacattaaaaacaggtgagatttcagagaagttatcttgacaatgtggcaggaaatgccctcactgtggtgggttccttagcaaaaagtgttggcaagcttgagtcagcaaaaaaggggcaaaaactacagctccagcagaaagcaatgtgtctgcagctgttgagtcaagaggtccccaaagttgacatagatggtagcaataatgatctcgtgccgaattcctgcagcccggaggatcc

SEQ ID NO: 442553 - DNA, 578 bp, Homo Sapiens
  misc_feature (140)..(428): n is a, c, g, or t
  misc_feature (449)..(449): n is a, c, g, or t
gtttattcttgggaagtactggacacacatatttcagcacctacgacagaacctgtttcttagaaatctagagtattgattttagccaacggggtatctttgtatcttcaaatctcatagaacttagagtttacggtggnnnnnnnnnnnnnnnnnnnnnnnnnnnnnnnnnnnnnnnnnnnnnnnnnnnnnnnnnnnnnnnnnnnnnnnnnnnnnnnnnnnnnnnnnnnnnnnnnnnnnnnnnnnnnnnnnnnnnnnnnnnnnnnnnnnnnnnnnnnnnnnnnnnnnnnnnnnnnnnnnnnnnnnnnnnnnnnnnnnnnnnnnnnnnnnnnnnnnnnnnnnnnnnnnnnnnnnnnnnnnnnnnnnnnnnnnnnnnnnnnnnnnnnnnnnnnnnnnnnnnnnnnnnnnnnnnnnnnnnnnnnnnnnnncacacacgtatatgtatattnttttctcaatgtgtcatgtgtataactcatgtctccttaactaaattgaaagtaagtgcataaatcagtgtcaatatcacaactgaagggtggcacgttctggagtaatttcaaggagttaagcttggt

SEQ ID NO: 442554 - DNA, 696 bp, Homo Sapiens
  misc_feature (525)..(525): n is a, c, g, or t
  misc_feature (621)..(621): n is a, c, g, or t
  misc_feature (652)..(652): n is a, c, g, or t
ggggaataagcttccaagagaagttttgttctatgactacacaaaccatgcattctttagaatgattttctaagcctgttagttcacaaggggagtctgggagccagtgattcaacgtaagtaaattgcactgaagccccaggcatggtactagaagctgtcttagtggagcagtatatatgcttagtggagcacatttacaaacaatgacaccaatttatactgcaatctacttctcctcattgagagttcttcggtttaatcatgaataaattagcaagggtgatgccataaaactcaggggtgtaaaatcttacatcttggtgcattgcaacttttaccaaataataaataacatctcgacaaatttttaaatgcttactttctaaacagtctatgcctggctaaaaatgaaacaattcaaaccaaaccaaactaaccttactctggataatgtgaccgtactataaatttattttataagtagcctcttttttttccttttatctcacagcttcattcaanattgatccaactagactttctcagtattctactctggggccatctccgtgcaacgtgctctacaggattaagagatggagaagacattcacatttntttgcttcaagagtttactcacttgcctggntttcctcaatagaagtcacagtatttctgcttgaattttttact

SEQ ID NO: 442555 - DNA, 733 bp, Homo Sapiens
  misc_feature (536)..(536): n is a, c, g, or t
  misc_feature (619)..(619): n is a, c, g, or t
  misc_feature (625)..(625): n is a, c, g, or t
agaactagtggatcccccgggctgcaggttatttttttctaaaaatatttattttttttggtttaaagtaaaaggtaggggctttctttgaaatctgtagttcctaggatgatttaatttctcaatttcaaaaaggtgtgtgttgagatatattaaaaccaatcataaacaggttattttaaaaacactctatttcaactccttcagatcaaattccactattgggtcatatttaaaataaaattacagacatctgttttatgaaaagttagttattgaggtgggaaaccatattctcttaatcaaagcttggagtgtttcttgaaatgcacatattgaacaaaaagcacttcagtaaaccacacaaactgcaaaacttgatagccatctagagctgttagagaattgatcctttttgataactggattgtttttcaaatgactgggattttgcccatttgtctcagtgatgaattgtttggtcacaaggaagaagatattcactgcaactgagttgggcctaaataaataaaggntgacttggaggacactaggggactccaggacttgaatccccggggttcttttgagggagtggggtggaccctcaagctattangactangcctgacctgaatcctggcttcttttgagaatgcttatctctctaatgctacatgctgcccgagactatgcaactgctaacttatacactccatgtgcaacctgtccg

SEQ ID NO: 442556 - DNA, 719 bp, Homo Sapiens
  misc_feature (644)..(644): n is a, c, g, or t
taagagagtgtaacttagttggcaggcagggtagtccttgcccaaaacagtagcccagaaagtaatggatagctataatctgaaccaaaatataaacagtcttaatgaaacgtaattctaaaacaaaatgtaagacccaatattcaatactactcactaggttcagaatctagtgtaattttggacagatgctgaaatcaaacaagtggcataatctgggagaattgactaacgacataaacttggatatgacagtagcatatcttgagaagcagagttgtatctagataagtttatccaagataaggcaggaaaatgtggaacctagaactcagttctgggaaacaaagctagttatttaaaggcagaaaatcaggcaccaatcaataagtcaggatagagggctttgcccctctcatgctctaaaaacctgagacccaaaagataggtaggtaagccgttagtgtctcagaggcaaatccaggggattattagattccagtgtcatcaaggtgttgttactaggatcaattgcttgctagtcatttcagtccgtatcttcatcctcttaccggcaccccaaggttgctgaggactattataagccttctttattgcccttctaccaggaatttgcgggaatngcttaatggtttctgcctagactgcccttaatcgaggtcaaggggaagaagcctcagattacagggacctttctt

SEQ ID NO: 442557 - DNA, 409 bp, Homo Sapiens
ccagttcttaaaagaagtgtaataacctgggttcctatttggctcagcaggtccgtctaagacctaatgagatgtctgcagcatgctctgttacagctctgtgcctattactagaaacttcccagagcggaagttggaactgaacaaagggagacttaaagtaagcattggccacaggagcatataaacccaatttgaatattttaaaatttaattaaccatgattatggattgcatgactgaattcaccaactgattcagtcaaaataaactagttgctattgcaattttacttcctaatgattgtaatgaattagttgagagacgctgggaaatattttccagtataatatttaagaattttctcgtgccgaatcctgcagcccgggggatccactagttctagagc

SEQ ID NO: 442558 - DNA, 822 bp, Homo Sapiens
accacggtacccatcctcctgtgtatggtattatttccagccaactttggaaaaatagcatttcaacagctttgcatatccacattgcacctgcttctggactataaatgattacgtataatttaaatttatagaaaatgttcacaggaaccagatcacagggcacatatgtgactactgattgcttctatttcttattttccaagtataaaaacatatttataatgaaaagcttatacttgctttatctccaaatcaacaaaaattaaacctctttgatattagccagatagactactctttcaactttgaccttaaaggacaataatgaatctcattaaaatcatatttccaaagtggctttcagaaagtctcctactcttacactatccccaggttcaacaagtttatttttggatgcacttaatgctttcgtttcttcttttcagattctgatttaatcacttagcttctgtggcataatcaagacaagttggatgaattgtctcctaactggattataatgaaagaagctctaactggtcttaacgtagtttcgatgtttggagtctttcacaaagagaaacaaaagcatgataagaatgtgctaagctaattcgaaagggaagcaagggtgtcacaattaacaagggtgtccaattatattgttcccatacatcattccaccactccaataggacatgggcttatagagaacagagtcaagccttgtggttcctgttgtgcccagcacacacagcattgtgcttggtatatagtaggtgctcaataaacatttgaatataatttaatctaggctct

SEQ ID NO: 442559 - DNA, 685 bp, Homo Sapiens
  misc_feature (23)..(23): n is a, c, g, or t
  misc_feature (71)..(72): n is a, c, g, or t
  misc_feature (147)..(147): n is a, c, g, or t
  misc_feature (152)..(152): n is a, c, g, or t
  misc_feature (219)..(219): n is a, c, g, or t
aagggccaagcccatgtgtgtcntgcacggttactgctccgcaaaatcgaccctgggtgagctgtgaagcnnagaaagcagtgtgccatttcagaaactacccaaaatcagtgagaaaatcttggagaaactgaaagttaccctggncggcntgtagctgggaatggaggatggggcagccaggagccagacttaagaaggctgttcacactctgctcntgttgcttgcctcccacacctcgtgacaaatgctgcctggtcccgctcaggtgtcaggattgcaaggtggctgtgtcagccagtgtgagggccccacaagccaccggtgttgtgtgccctccatcctcctcctgaaacccccctgggtgggacagttgctatccagggaaatgggcctcttccactgtgatctcctccagggccaccggcaggcccgcctgcaggagtggcttgtggggtggcaggatgcaggagagagtgagtgaggtgcttcgtgcctggggccctctgctctggggccaccctcctcgttgactcactgggagccttgctagtgcagacagggtgaccaggagctgctaagcccagggaatgcacacacgtgcactggagcagctgcctatcttaagagtccaatgcccaccgaaacacagtaggctgcacagcatccactactggaagtaga

SEQ ID NO: 442560 - DNA, 232 bp, Homo Sapiens
acataagggaactacctattggagaagtcattggaacactgctatgtggctcacaatattaaatctggactcagacaggagcaacttagtgaaatgataaacaaaagattatattattgacttctaaataaatcaataactgatttgttattttggatgaatgatttatataactaagtaagcaattgcataattatagatgtgtgtcatacacatgtctaatttagagcag

SEQ ID NO: 442561 - DNA, 637 bp, Homo Sapiens
  misc_feature (67)..(67): n is a, c, g, or t
  misc_feature (113)..(113): n is a, c, g, or t
  misc_feature (157)..(157): n is a, c, g, or t
tcttcacagggcatccacacaggggtgttgacacatgtctcagaaaaccactgatactaaggctatnttagataaattaactacactgaaatactgacattgtgaaattatcntatgtccaataccccatatggggccccattttgtgaacttatanaacatttaaagaaagaaaacaagaatgagaaaccagagtccttgataagatgggtgaacgtgtcgataatgcccagagtcacagcttcccattctcctcactactttccttctcctctatggcttcccagctgcgcttgctcttggcctcagcactgctgctgggggctttactcagtccacaggacaggcatgccagctggatctgcttcatgttttctatagcttcattcttggcattcttcgacagatctccttggccctacaaacagaaaaaaacaggcatcaaagaagacagttatgggccaggcatgtgctgagtgacatcactctatgttcttactgcccattgctgaataaggaaacagacccagacctgcaagctcacttttccagggtttaacccaaggttcttttctaacattattaagtgactttgcttgttaagccaagtacctcaacctgagcctgaccagctggc

SEQ ID NO: 442562 - DNA, 907 bp, Homo Sapiens
ttttccaattccaattaagaggttaactcattgtttttatttggtaatcagaagaacatacaagtacttatgcattactagatgctgggggaaaattatacattgaaggactgtcaggctcatctgtgcaataaagatttacaataaacacatcattaatttttctgagaacagctcagtatactctgttttacatgaatccttatgatttaatcttgtatttggagatatgatgctatggcatttggataacattggttaagcagcatcttagagaacagaacactcttcctcagaatggatggccattcttttaccctgtgatgtacaaatgcaaattacaacctgcattttatctgccagaagtgtatttcacatcatggaagtacattctatcacaaccatgaaatcaaaacaagtccattattaccatcttcccttttggaagagcattctcagaatacatccagaaataccttccttattcctccaaagaattgtttattcagctagtcattggttgaggtttgggttttggttctgcttgcctctctcttttgagtcttgctaaatgttcttgatagtaatccagatatttctcacaaatccagctgaacagcagcaacatctaaagctgaggagatgagttgagttttccattcatatatggccagtgcccttcatcaggaaagagcctacagactcatggtgagtagggtgtctttaggatgctatgtatttaatgcataggggtctacgcatcctaaagagaaaaaccctgtgagagcaaaaactgtgctgtacactaagggaggacaataacaacatcatattcacctctaggtgactgggccttgctttgggtaattgatttcccataaagatttccttttttcctgcttccgcc

SEQ ID NO: 442563 - DNA, 478 bp, Homo Sapiens
  misc_feature (365)..(365): n is a, c, g, or t
  misc_feature (389)..(389): n is a, c, g, or t
  misc_feature (407)..(407): n is a, c, g, or t
  misc_feature (418)..(418): n is a, c, g, or t
  misc_feature (456)..(456): n is a, c, g, or t
aagaggttaactcattgtttttatttggtaatcagaagaacatacaagtacttatgcattactagatgctgggggaaaattatacattgaaggactgtcaggctcatctgtgcaataaagatttacaataaacacatcattaatttttctgagaacagctcagtatactctgttttacatggaatccttatggatttaatcttgtatttgggagatatggatgctatggcatttgggataacattggttaaggcaggcatcttaggaggaacaggaacactcttcctcaggaatgggatgggccattttttttaccctggtggatggtacaaatggcaaatttccaacctggcatttttatctgncccggaggtggtatttcacatcanggggaggtaccattcttntccaccacccntgggaaattcaaaaccaggtccccttattacccctctntccccttttggggggggccttt

SEQ ID NO: 442564 - DNA, 700 bp, Homo Sapiens
  misc_feature (55)..(56): n is a, c, g, or t
  misc_feature (90)..(90): n is a, c, g, or t
aaccacagtatttaaaacactatttctttaaaggctgctatttcatatccatttnnaatgttattcacatgaatgcgaggttaatatacnagtgtcaaatagaatgtttctaaaatgtaatttaatggtttagatctttgtgaagttataactaaaggatataaattgaagaaatagcctaattttataaagaccatgccagtgcttaatattaaccagataaaaccggcacgagagtgagaactagtctaagtaaaaggaacaaagccagtggtattacactacctgatttcaaactatactacaagaccacagtaaccaaaacagcatggtactgatgcaaaaacaaacacatagatcaatggaacaggacagagaacccatgaataaagctacacacctgcaatcatctggtcattgacaaaatcaacaataacaagcaatggggaaaggacttttatatgtactgggaaaccacaaaatttgcatgacttacctttttgtgatattcagtttatcacaattatggtggcctgaaacacaacccccaatatatctgaggtatgcctgtatttagaaagtacttctcatgctgtttttctaaagaagtgatttaaggatacatagcccaaagaagaagaaggaggaaaaggagaaggtagagaggatacattcaaaccacagagccagtcttcatttc

SEQ ID NO: 442565 - DNA, 691 bp, Homo Sapiens
  misc_feature (137)..(306): n is a, c, g, or t
  misc_feature (310)..(463): n is a, c, g, or t
  misc_feature (476)..(602): n is a, c, g, or t
acaaaattcaacttaaagtagattgtaaacttcagtgggaagactaaaactttagaactcttatgggagaaaatacaagagtaaatctgtgtgaccttatgttagacaatggtttcttagaaatagcaccaaaagcnnnnnnnnnnnnnnnnnnnnnnnnnnnnnnnnnnnnnnnnnnnnnnnnnnnnnnnnnnnnnnnnnnnnnnnnnnnnnnnnnnnnnnnnnnnnnnnnnnnnnnnnnnnnnnnnnnnnnnnnnnnnnnnnnnnnnnnnnnnnnnnnnnnnnnnnnnnnnnnnnnnnnnnnnntttnnnnnnnnnnnnnnnnnnnnnnnnnnnnnnnnnnnnnnnnnnnnnnnnnnnnnnnnnnnnnnnnnnnnnnnnnnnnnnnnnnnnnnnnnnnnnnnnnnnnnnnnnnnnnnnnnnnnnnnnnnnnnnnnnnnnnnnnnnnnnnnnnnnnnnnnnngttaagaggccgnnnnnnnnnnnnnnnnnnnnnnnnnnnnnnnnnnnnnnnnnnnnnnnnnnnnnnnnnnnnnnnnnnnnnnnnnnnnnnnnnnnnnnnnnnnnnnnnnnnnnnnnnnnnnnnnnnnnnnnnnnnnnnnctaaacctgggattgtggcacacgccctttccaggttctttggagtactggagaagggttccctggcccccggaggtgtcggtgccggc

SEQ ID NO: 442566 - DNA, 640 bp, Homo Sapiens
  misc_feature (11)..(11): n is a, c, g, or t
  misc_feature (32)..(32): n is a, c, g, or t
  misc_feature (78)..(78): n is a, c, g, or t
  misc_feature (91)..(91): n is a, c, g, or t
  misc_feature (123)..(123): n is a, c, g, or t
  misc_feature (223)..(223): n is a, c, g, or t
  misc_feature (230)..(230): n is a, c, g, or t
gggagcccgtncctgctctgggtcagaagganggtgcatccaccaagcagatgctgactcgcacttacagcctgtcanccgacagagcagnttgcacccaggctgctgagatgtgccggctantgtgaataaagtgtgatgtcacaggtacaggactttcctggataccaggggaagtgcagctgggaaggagaccctgtgcctgctccactgcttagctccnatggtcnctggtcaggggtggtctccagggtcaccaacagctttctctttccattggcctgcccgtcctgcaggggaggagtccaagcatttctcaacatctcggtgtgcctaggcctgagccagggtgctctggggacagagctcaccaacagtaggaagattcctgggtcccagaccagttgggaatatgtgcagtcaggtgcccaaccttgagtgccccaggggttctgagatgagaattccccatggtggtgcagtggtcagggaagccttaagaggaatggcatcctagccagggctggtgggagccaagactcagcggccaggggaatagtgaacatgccctgagggctcaccataagccaggacttgttccagttcttgtacatggctcagtttatttaaccttcataac

SEQ ID NO: 442567 - DNA, 687 bp, Homo Sapiens
  misc_feature (104)..(116): n is a, c, g, or t
  misc_feature (163)..(163): n is a, c, g, or t
  misc_feature (177)..(177): n is a, c, g, or t
  misc_feature (179)..(179): n is a, c, g, or t
gtgtggtataataatatatgtatcccaacctcaggaggcaggcaagaggattgcttgaggtcaaaggagtccagtcagagcagcatatctagatcccatctctnnnnnnnnnnnnnagctatgtttctttattgataccaagatttaatggtgagtctagtanctattatcatttcnanctagggacgagtatacatatttccaaatatctgtagtaactgttagatgatatgaaaatgatgaatttctattgatgacaagttatggttattgctaccaatactctggtttgttgcttacatttgtatttgaaaacatgctaaatttcatctaaaggtaaatgcaaataaatatgtaaatcaccccctccccagcttcatgaacttccagaattctcttgattggcaattgcttccccacggacctgaggttaagaatccttgctcaaggggaaccttgctttagagaacagttctcggccttaaagttgagattctaagcaaaaatttatcttcttggaatttcttgaaacttttgctgtatagatggcatcttttcttattttctagcacccctgtaatggattcctttttaaaaatgttcttttctgatgttttagtgagtccttggggcatcacttggaagccccaatgtaggctcttgatactgtttcttctacaagtctcc

SEQ ID NO: 442568 - DNA, 717 bp, Homo Sapiens
  misc_feature (27)..(27): n is a, c, g, or t
ggctgcaggaattcggcacgaggattntatttctgaatgcaataatttatgagaaagaaacttacaactacattaccttttcaggtagtatgtatggtgtttcagagattcttaaaagtggagaaaacagtctgttgctttcaattttttaaatcttctcaatgttttagttttttgctctatgtactatacttttttaatagcagtcactgaactcacccctctcagttatcggatctttgttggttgtagtgcacacataataagttgttatggtgtatttctctttgtgtaggtgtccgccaccatggttcatttcacaaattaattttcatcacttactttgaagatttttaaattacttcatacatgcatacagttcagaaaaaacctcaaaccttgtataaaggtatacactgagaaactttgttcctctcctgctggtaacaatttttattagtttttatttcttcctagcttctttatgaataaaagcattgtgcttcttccattttacactactgctgacaatataaaagaatattttaccgcacagttcaatccattagtgataaatggtgtgcagcatagtttttgcattttcttatgatgaattaggaatcttttttattattaagcacattgtaatttttctggaacggttgacatggttttcaatattcaactgggtattaattgcttgattttacctttttg

SEQ ID NO: 442569 - DNA, 694 bp, Homo Sapiens
  misc_feature (393)..(448): n is a, c, g, or t
  misc_feature (452)..(452): n is a, c, g, or t
  misc_feature (457)..(457): n is a, c, g, or t
gaggttactaagcctcagtaagaaattttgattgtacaaaccaaccaaccttcttccctagtgcaacattagagagagttctcagcaaatgacaaattgcttcttgccatggacttttggagttagatgggtctagtgcaaattagggccattaaattcctgagaatgtagaaggtccataagagtaaagtcatcacagagaaatgcaattcgctaggggagcaacggggtgggatgcacccaacaaactgtcttgtgacaaacttggaaattccagctttgcctaagttcctaggtgagaaggtagttgtctggggcttcaggagctgcgctggggttacgagttgttggctgacccaaacctaaggtgtatgttgtggggtggcaggcggnnnnnnnnnnnnnnnnnnnnnnnnnnnnnnnnnnnnnnnnnnnnnnnnnnnnnnnncatnatganggaggggcctggggactttttggttaacagggagggaactcataaggatgtcgagccaatttagaccatcttctcttcagattcaatcacagactggatgggataacttccttagctcttaatattatctgggttaagaatgccgccttgagaggacaattgaatccacatttttgtgaaggtgaattagacatttgactggcttgcattctatggccttgcagaccctttccgttt

SEQ ID NO: 442570 - DNA, 693 bp, Homo Sapiens
  misc_feature (649)..(649): n is a, c, g, or t
gtgaggtctgcatttgtagactcgaatctcccatttacattcttggactaaaacctcgctcctgcttatcatgtaatcatggagctaagctaggcttggagaagagtggcaagaagttcccacgtgcatggagctgtagtttttcccacattcctcttaggagctgtgcctaagatgctgcgctagcaacctctgtattgtgaaggaactgcgtttcctggattcccacaggagttggattcctgtccttgtgaagccatctcagggaacagggtgggcggaaggggcactggaggccatcatgattgtcctaacaggcattcttctggcaggaactggcaaggatagaacacagacttggtccctgcagctgaaagggaggaggcaggatggtgatggaagaggcgaaagaaagatatttgcatgggcaagcccagtattcaataactgtggcaagacttcatccttacaaatctacttagggccgactccacacctgagccgcttcccagacctgctgttctatcccggaagcagagggcagcatggcgaagacctgcctctgtctttgacgctggcacattgatgcgattcttccgctctttgctctgggtgacccccattgcacgcagagccctcactgtttggngagggggctgagcacacctctgtgtgcttcattcagccagccgt

SEQ ID NO: 442571 - DNA, 706 bp, Homo Sapiens
  misc_feature (557)..(557): n is a, c, g, or t
  misc_feature (626)..(626): n is a, c, g, or t
  misc_feature (633)..(633): n is a, c, g, or t
cagatttcttttgaaattcctttttcccccctccctctgcctcagcaaaagaaaagaatccatataacaggttcatgttcaattgcttggcttttcagcacttattctgaagactttataatatttttaaacttgaccttggaacacagagggctttgtgggtgaggtgtatttatatttacttaagggtgcacattttaaaaatcttattctgtgtttgtacaaagacgcaaattttcatagtgcctagaaatagcacagatctattctactcaagattatttgtattttttcagggtattctacctagagcctgtggttaatcgcctccctgctccccctaccttttattccctaccccctcagggaatttggatacatgtgaggaatagtcctttgtttttcttatgaacctagaaaattacagatcataaaatctggatattaaagtagtttccaaaagcatctcatgggaaatcaaagtgcttggcatttccgagctggagaataaaatcaagaatccttaagagagaaaagaaaatggagatggaaatatngaattttaacttgggaaaaataattggaaagctaaaccttttcaaatactctaattattgaaagttggnaaaaggntgtgatgctcaagtatattctcgtatgtgtgaagatccataaataggcacctaatttataggcattttgtacc

SEQ ID NO: 442572 - DNA, 697 bp, Homo Sapiens
  misc_feature (538)..(538): n is a, c, g, or t
  misc_feature (639)..(639): n is a, c, g, or t
  misc_feature (649)..(649): n is a, c, g, or t
ccaaacccttgggccctcagggctgctcatctgccgccggctgccctacggcctgggtcccgaagcctgcgccttgggcgatgccgaagctaaacatgcccatgggcgccccgcctctctacaggtcttgcactgccctgcacctgcgcccctaggccacctcagtccaggcgaagccctgagccgggaccagcctttggtcagaatgctgctcatgacgcggctcgggcccagcaggcagtccgggagcaccggggcaggtgcaaattccacgttggaaaagtttggctgcaccatgcttgcgaagctgcagctgaacgcgcccaccagggcataagcgcgaaggagggatcgtaggtgtcaacccccgcgggccgcggcggcctcggggggacacctgcacgccagccgaagagcgcaaagccagagagtgcactggtccaccacagagcgcagcaccgtgccagggcgcagagcccacgcacgcccggtcggcgtcgcagcaccaggagcacaggctaccccggccactagcctncaggaacacgcagtctctggccgccggaccctctggggcaaagtggggcaccgtgtggagaccactccagcgacccctgggccggggtcgtcccgcgtggncacaggcctngcttctcgcttgcagacaactgaggccagccgcacgcgacaggtgggc

SEQ ID NO: 442573 - DNA, 659 bp, Homo Sapiens
  misc_feature (179)..(187): n is a, c, g, or t
  misc_feature (562)..(562): n is a, c, g, or t
  misc_feature (635)..(635): n is a, c, g, or t
ggcaatcattcaatgacatataaggaacatttaactgcatggaggactctttcttatgtttgattgtaggtacatgggtagacactatcccatttttaacatgtttaacatgttttaacatgtatcccgtttttaacatgtggtttaaatattgcgtgagtaattacaaattagtcacnnnnnnnnnctgaaatacctaattaccttgttggacttgggatagaggaactcaaatggtctttttatggtggatgactgttatagatagagatgtcatccattatatgcttaccctttctagattcatgtttagttttgtcttctaaattctgagtatactttgttcttatatgttgattaatctggcatttgtttaatatttcatagttacgcaaataaagttcacatatatcatgttgttttatccgactgtcccttcttaattctggcagaagatggaacacttaccctctagatatggtgatccagacagaatttagagtaggcaaccaaagctaattgggagttaagcttccattatgaaagctagagggttacacanaaatctatgaatttagtattcactgccactttttagctctttttccagatgtggttcagaacactgggattgngtttttactctcaagggggctttt

SEQ ID NO: 442574 - DNA, 432 bp, Homo Sapiens
ttctaaggtagacatgaacttcattctcaatctgactgcaacctattgtttcgaccacatttcttattttgctttaagaggactggaagcctaacttgactgcttaccattctttaaacacatagactactagctaacatttgctgtctgttggatgtttaccacttactaagcattatgctaaatactttatatagattattccataatccttactccaactttaggaaaaagatgttactagtatcccattttactgatgaaaaaagtgaggtgtaggacattcagttatttctccagggtctgcagctggtgaataatggaataggaaccttggttgtcgccagagtctaagttctacgtgttgctcatgaaatgcccctttttcgctgcgcagtcccgtatcttcacctattgaaatctcatccttct

SEQ ID NO: 442575 - DNA, 462 bp, Homo Sapiens
gagaactagtctcgattggagtttcttagagttctctgcctggatatggattcccccatcatattccatgagacagcccaacctgagtgtcttccagacctgaggtacagaaacccaagtcagcttttccattttatacccatctgtctctctctcacatactcaccaaaacctcatcctgggctccttacagcccggatacttgaaggcagcccaatgcttgcctttgtcgtagagctgcagtcatctccttattagtcccaggctcagggcccaacccgggagcagagattctatttgagttgagttgtgcagacagatcgcaaaacttcttttcactcctccctacacttcctttctcaccttgggttcttcttactcattcccagacattcagatttatttgctaattcattcattctttgtattgatttcttagggcagccaatacactaccccttg

SEQ ID NO: 442576 - DNA, 621 bp, Homo Sapiens
caggctgaggcacacaggttgcttttggtgaaagtacataggaagcttaagacctatgaatccgtgggtttcaagaaatgtaaggtttattatcttattcccaggggcctagcaatgcacataaaatttccatgaaattttggatgtcttgatctactaaaaaaagaacctaacgcaaatatggtaaatagtaagatttgttatatctggggatgagtatactggtgtttgcaacgtccctctctatattgatgtctctatgttaatgtctctatatgtaatgtccctctctgtaggtttgaagtattttgtatcaaattcaaaagactcttattgacagaagtgataactttctatagacttaggtaataagctgagactcaaaccattaaaaatgcatttatatgctgttaatttccacttgacacgtctagaatgtgcatttatgatttgagcaaatgggaatatttttataatatcctacctatactccatcatttctattttttactgacaacttgctattccttatttgggattaacgaaacaactgcttacatggcttccttgtttcgtgtctgacagtgaggggtggccaagcaaggttctctcgcatcacgg

SEQ ID NO: 442577 - DNA, 696 bp, Homo Sapiens
ttatcttttaaaatgtagtctgtattattttcaccaaccaaaacacacataatatattttattataaaacattagcaatgttacttttgagatatgcaatctgaaaggtcacacttgtatttattaccaggaggaaataccagaggagtcacattagaaatcaaccagacagactcgtacgtggttatcgctacttacacagcattaaatgcgggttgaagcagcacccgctccgtgtttcagacacggacttggggtgggcaaggggccctgtaagagggcttcctcctctcagtactggggctctgcgtctcacctgctcccatctccagcgcggagacgatgtcctgcaatctctcaatgatattccggtagtctctggaagctgccagaacagagtccctgcgtgcggcattgcgggctgagagccgccagttcatggctgttttctgcacaatgctgtgggacttgagaaagaggttgttgacttggctgtccaggtccacgggaatggcaatggcccggctcttggctacatcagacagcacccgaatacagctctccacggaggctttttggcttggcattaaccagttgcagtggtaaaccctgaacacgcccttgcagcagttgcacaaagaccggctggcgagtctgcaaagcctacctctgtctgagaaaggagagctgaaagaa

SEQ ID NO: 442578 - DNA, 1018 bp, Homo Sapiens
  misc_feature (128)..(140): n is a, c, g, or t
  misc_feature (153)..(157): n is a, c, g, or t
  misc_feature (159)..(191): n is a, c, g, or t
  misc_feature (193)..(256): n is a, c, g, or t
ggggggagaaacccacccccccttttcaggcccggtgttttcttcgggagaaacaataaaggccgagtttcccttccctcatggggccccggccccccaagagaaatgttttaaaaaaatttttcgannnnnnnnnnnnnctaaaaaattttnnnnntnnnnnnnnnnnnnnnnnnnnnnnnnnnnnnnnntnnnnnnnnnnnnnnnnnnnnnnnnnnnnnnnnnnnnnnnnnnnnnnnnnnnnnnnnnnnnnnnnatcttttaaaatgtagtctgtattattttcaccaaccaaaacacacataatatattttattataaaacattagcaatgttacttttgagatatgcaatctgaaaggtcacacttgtatttattaccaggaggaaataccagaggagtcacattagaaatcaaccagacagactcgtacgtggttatcgctacttacacagcattaaatgcgggttgaagcagcacccgctccgtgtttcagacacggacttggggtgggcaaggggccctgtaagagggcttcctcctctcagtactggggctctgcgtctcacctgctcccatctccaggcccacggctgacacggtatgcacagccagggtttccagactgctctcctgctctcacagaactctgtctgctctctggactctgcccttgaaactgagacctggacatgggggagacagtcgtttccttcttggctggaaactaagtcaacaaatgaaacaaacctagtctaaattccaggataatagtaaattacctggtttataaaaatacatgtccaaaatagttacttcctgggttgtgtacaatataaattacaaaaataaaatagaaaagatgaaacagttgagcacatttttcagttctttaaccaacatcagcatttatccatagagatcagtttgaaaccatttgcgtggcaccaagaccctggcaaatctaggctcaggagagagaaccctgaagctaggatgaggtatttctgtggagcc

SEQ ID NO: 442579 - DNA, 695 bp, Homo Sapiens
  misc_feature (585)..(585): n is a, c, g, or t
gtactttctggtgcatctttttggtattttattgttcatccttttattttaaaataaaaacattgtcatttgggtgttttgcttttaagcagcagcatgtagctggtgttgcatttgctgtcaaaccaagtggtgttaacttttaatagtgactttacttaataacagataaatttcatgagacttgctcaggggttgactgaggcagatgagtaggtgttttactacagcaataggaaagaaggaaggtcagggcaaaggaagtaaagcatctgtattagtcaccttgggccgccatgacaaaatactgtggactagctggcttaaacaacagaaattcatttagttatagttctggaagccagaagttcaagatcaagttgtcagcaggtttggttgctctgagtcctcactcctgaacttacagatggccacctttcccctgtgtcttcacatggccctttctcaatgctcacacatcttttgtcgtctcttccttttcttgaaagacaccagccccattggattagggcccacccttacgaccttttttaaccctaattaccttttttaaggccctgtctnctacagtcaccttatggattacagcttcaacataagattttgggggaaccacaacttcatccattacgatccttgggagagcacattatgatttcatagcactctccgct

SEQ ID NO: 442580 - DNA, 709 bp, Homo Sapiens
  misc_feature (67)..(67): n is a, c, g, or t
  misc_feature (124)..(124): n is a, c, g, or t
  misc_feature (128)..(128): n is a, c, g, or t
cagccaaagaagcgaagatatagccaggtgcaagcagagctagagtgggaggagagagcagtgggcncggggggcatggatgctccccagggctggccaaaagcactattggagggggccgggncganaacttgtctctcggaagaggagagttcaggtctccgtctggtgtgaagttggactagaaggtgtggaggggtgagggtggaaaggggtagctcctccttcctgggctcgcctggacggtagagttaggctcatctctccctgtcttgtcgtaaagtcagaatgagagtcagagtgagtacactgggaatcggagggggtgccaccgctatgtgtgaccttgagttgtcatcacccttctttgggcctcagtttccctagggtaaaatgtggggttgggctctatggtgtctataaggtcctaacaggcaatgacaacgaaatgacttcgcactgcatccaaggtttagtgcagcgccatggatgggcctctggctggagctggggtttataggaggcctgggtggtatgaaagtgagatgttccccactccctgcaccccccagcaagccatgcagcccccagctctctgctgaggctgtgacattctcctctgggctcctgacgtcttagactgaggtcttgagccgggaccttcctggctttattgtgctgtgctcctaggcccagggccgctgctgag

SEQ ID NO: 442581 - DNA, 211 bp, Homo Sapiens
cggagccacaggtctgcaggggaatcagcaagacctcaggtgatgcctggagccacagatagtactaaaccctacgaacactatattcctatccacacataactacaataaagttaaaataaattaggcacagagagtaacaacattaataacaaaatagaataattatagcaatatactataataaaagttacgtgtggtggtgtgtttt

SEQ ID NO: 442582 - DNA, 627 bp, Homo Sapiens
  misc_feature (252)..(532): n is a, c, g, or t
cttaacattgcctgatctgcctagatttttgtggtcagctcacttagtcttcacggtgcctgtttctgaccttcactctcttcagtcccttctcttcagtcttagcaaaatacttaacctcctgatacttagagaaaacagaagtcatcattagaaattcattcaaattcttcctgccaaacttgtaaacttaattgcatcagtacctggtcgtttcctcaactacttttacttaaatggaagaaatgtcannnnnnnnnnnnnnnnnnnnnnnnnnnnnnnnnnnnnnnnnnnnnnnnnnnnnnnnnnnnnnnnnnnnnnnnnnnnnnnnnnnnnnnnnnnnnnnnnnnnnnnnnnnnnnnnnnnnnnnnnnnnnnnnnnnnnnnnnnnnnnnnnnnnnnnnnnnnnnnnnnnnnnnnnnnnnnnnnnnnnnnnnnnnnnnnnnnnnnnnnnnnnnnnnnnnnnnnnnnnnnnnnnnnnnnnnnnnnnnnnnnnnnnnnnnnnnnnnnnnnnnnnnnnnnnnnnnnnnnnncccttaatggacaaatcccttggttttggtcacacaaggttttttttgccattccttttgtggaggtccttcttgggcctcagttaggttttggt

SEQ ID NO: 442583 - DNA, 664 bp, Homo Sapiens
  misc_feature (207)..(240): n is a, c, g, or t
caaaagactatatgctctttaagtttaggcaagctagtaaggaagtgagaaaagcaagacctgaactttgatctggagcaaatcactttacctttgaacctttttccctctctgtacaatgaaatggcaatccctgccctgcttgccttctgttgttttggatgacctcattagccattagacaacatatttgaaagtaatctctgnnnnnnnnnnnnnnnnnnnnnnnnnnnnnnnnnncaactaggggcatacccagatatctctgattttaaatcttccgccaacctaatactgtttcaggtggacagtaggtgcctgttaacaagtcataggtggtgggaggatccctgcacttaaaaatttcatttcactggaaatcttctcagagtgctaaacacttgagggattcaccatattaagttgctatcactgattcacatatatggagacacctctagatgtgaacagagcagtcccaggaaggaggtatgtgagagtgttatatgctgcccagccatggctctcccatcaacgcttgcttcactggctagtttagcaagaatgagagggtgttgctcactggttcgctctgatgggaagcttggcatttctctgcagcaataagaggtccctgctatttttctaagtaggtccctccctg

SEQ ID NO: 442584 - DNA, 725 bp, Homo Sapiens
  misc_feature (17)..(17): n is a, c, g, or t
  misc_feature (38)..(38): n is a, c, g, or t
  misc_feature (108)..(108): n is a, c, g, or t
  misc_feature (244)..(244): n is a, c, g, or t
cggcgcgagatgggcgnacccgactggcgtgccatgcntgcgggattgtcatccacggagtatgccgactggcaccgcacagtacccattatcatgatgttctgctgnatatgcacttttccgggctgacgtacaccgtgctcagcctgtttttcagcgatccggatatgcatccgctggatttcagtctgctgaaccggcgcgaggctgacgaagagcctgaagatgatgtgctgatgcaganagcggcagggcttgccggaggtgtccgctttggcccggacgggaatgaagttatccccgcttccccggatgtggcggacatgacggaggatgacgtaatgctgatgacagtatcagaagggatcgcaggaggagtccggtatggctgaaccggtaggcgatctggtcgttgatttgagtctggatgcggccagatttgacgagcagatggccagagtcaggcgtcatttttctggtacggaaagtgatgcgaaaaaaacagcggcagtcgttgaacagtcgctgagccgacaggcgctggctgcacagaaagcggggatttccgtcgggcagtataaagccgccatgcgtatgctgcctgcacagttcaccgacgtggccacgcagcttgcaggcgggcaaagtccgtggctgatcctgctgcaacagggggggcaggtgaagaactccttcggcgggatgacctgcagcccgggggatcc

SEQ ID NO: 442585 - DNA, 360 bp, Homo Sapiens
  misc_feature (317)..(317): n is a, c, g, or t
  misc_feature (326)..(326): n is a, c, g, or t
  misc_feature (333)..(333): n is a, c, g, or t
  misc_feature (343)..(343): n is a, c, g, or t
atccttacaacatatatctttaattaaatttatattggtgggtttaaaaaacattaagtcaggagatgatagctagggaaataaggtatcctgtgagtatttataacaaaatatttaaaatttaaaaagaataagaaacatcaattggctttttgtaacttaaaagagactaaccaagtgttgtttcccagttctgtacaagcagaggccacaggaggattcttacataagaagcacagggaaaagaattgttaattctgcgtgtgtgtttttgtttctcagaattgtttggaagaactttgtccagtcagaaatgngtaaaaacnagatgtnagaaacattnaaacagggggcatatgg

SEQ ID NO: 442586 - DNA, 682 bp, Homo Sapiens
  misc_feature (230)..(246): n is a, c, g, or t
  misc_feature (639)..(639): n is a, c, g, or t
  misc_feature (658)..(658): n is a, c, g, or t
gtttgtatatatgtctagttgcaatttcttttccatgcagtactccagataccacacaaaataagattactagtgggtactcattgttgaaccacagagtgcattgtaaaccagatacacattttctcccatgccattccttctgcaggtttttctagattccttggtggatacttgtatcttgtgtttattttcctctcctgcctcagacgtgatgcctggtgctgacnnnnnnnnnnnnnnnnncttaccagaaagtactgagctcaactgaaacagtgattttaaataagcagtgttcatggttttgttggttagtgtgtctttcattttctggcccattattgaactcctttcctagttttactataaactttaagttcgatgggagaaggatcaaagaagacataaacacatcgcattccagttaatttaaacaatatttcgtgagcacatcatgaacttagtcaatgtgatgatcattaaaaacacatcttcatataatgcgtaactagtccctttgccttgccttcaaggcgctaaagatctgacaagatgctgtcttgctggccgcaggaatttggagtttagaacggaggtttagacacagcgtgatgtgacatgaaaaagggtaaagtngattttataagagagaatnggaagatagcccgagcctgtgggc

SEQ ID NO: 442587 - DNA, 682 bp, Homo Sapiens
  misc_feature (585)..(585): n is a, c, g, or t
  misc_feature (641)..(641): n is a, c, g, or t
gtgaaatcctcagtcccaaggccctcacgttgttggcttgaaagcgccctcagccaagtttctattctgtgtcttctccctcccctgctttttccatggcactcactggagtgcatgtcccgcaggcggccctgtggggcctcccatggccaggacatgcaagcttggaggagggctgggtctgcaccgcccagcagggtagtcctcactgtcccacgcagcagagtcccgcacgagggtctaactgggagtcctggggcagggcctgcgcttctcctctcatgtccacgatgctaggcacggggtctgcgcacaggaggatgagtggagacctggctcctggggctggcagcagaggaatagggccctcgacagccttcccatccccctccagtggctctgctggctgacccagaggccctgtaacccgttcctcctggcctgaggagcatgtgctgcagctgctctcattccctggctcgtcccctccagtgtcctgtgcacagtgaggcgtctgtgtcgaagagacccccttctttcacccactccggcttcttgcctgggagcccactggagagctctggngctgcgtcccgactccctcaagcctggctgggagagccctgtcttcatcagaggtncctccctgtcccagggcaccagagctggggccttgatgcag

SEQ ID NO: 442588 - DNA, 701 bp, Homo Sapiens
gcacgagtcccactcctggagtacaggtcgtgcaaaaaagctcccgctacgtggagattgagcaagggcttggcaagcccaacggtgcgctcgaatcgcggtgcaagagcgtccccaccattctttacggccggaggtggaacagcagcagggcgagctgtctggagcccgaggcagccttagcttggtcagccaggcgctgtccagacctggcccaggctgctgccccacccaggcctcttgcccagcccacttcagtcggccttccaagactcggatcccgaaagctgtgccccctccagcaccaggcaaacaagctatatcttggtggagcagattccaccttcacagagccagagtgcaacagaatgccagaacagaagggtctccagagaccttacccgttatatagataacataacagaggctacgggttcaaggaagtgccttgtccacaggcaaccctgggaactcctgattattatctcaccactgttcccatccagcttcagtcctgagcccctgtgaccatccaccttgcctttctagaccaacaaagagagtgggtctttgccccagggactcagaccctcaagagccagagacccacgcctacggttccctaggatgcctacaccttcagctggcctctgattccacccactcaggaagaagtgggcacttggatatggcaccccggt

SEQ ID NO: 442589 - DNA, 667 bp, Homo Sapiens
  misc_feature (603)..(603): n is a, c, g, or t
gaaaaagtttttataaaatattaatgttatgcaattctattgtgtttaaagatactggtctctgtgtgtttaacttatgggaggactagaaggaaaatgttttgttgaactacaacttgagtccatatacctagtagatctgtctgctagtttccgttacattctatattcgtttattcagtattcactcattcattctatatttatttgtccgataactcttgcccttctagatgctaatatgtcatctgtcacaattccacagcaaaagtactatggaaaaagatgggtctgctttattcactgaaaaattaaagaacacttcaaaaaggaactgatacttgagtttattcattgttcattcaagaaatatacttattgagcacttgcgacatgctagtcactgtcctttgtgcttgcaacaaatcagtgaaccttaaaaacaaaaacacaacatactcctgttcttatgatgtaatcttgagagatggtgattgtttcatcaaacagaaaaaaattacaactcgttattaatttatttgtgtgattcttccactggactctaagttcctttaagaagggaactcttgcttgtactgctgnatctttgatgcccattgttcagaccccatataggcacacagttattttggattacctatacttt

SEQ ID NO: 442590 - DNA, 1448 bp, Homo Sapiens
tgtgtcccttctatgagaagacaattagcccagtattttgacccccaggtctttttatgatgcttccagcacaacccccgaagcctctctgtcttcttggctccatcatgaagtgtcagctgctggggtcactatgttgggtgccatccaaatggatgtggtcattttcatccctgccctggtgttctaaccccagtaatgtgaaggaaaaagaccagcaaacgagaagcggctccacaaaacctgtttcagtgggttatgtttttattctacgttattggtaggacagggaacagggccaagacctccacactcccctgggaagaacagtcaggagaattagatacatctaaagtgggcacaggacagaggccagatcttcctgggaggtggctgaagagacttaggcttaagccacgggggccaggccgacctggttgtttgccctgtcgaagacggtaaagtactggcggatgaagacatcacccaggatccaaagctctccagattcggtggggaggttcatgccctggaagccactgatgcagctcccctcgctctgcaggatgtaggcactgggtggcacggggtactggactccattgatggtgaagacgatgtcgggcaggctgctgatggctgagcagctgaccaccatgtcgccatctgagttctcgctggctccgatgtcgctctggatgttggcaatggggctggttgggccggtcagcagagaggtgccggtgtcaacaatggcctggcagccctcagcgcaggcgatggcctctccgttcatggtgatgctgtccacggtgatctgccagtaaccctcgacggtaacaggcacccagttcagacttccagtgtagtaagaagagtcaatgccaccaaagatcaccacgctgccactctggtcatcggcgctgaggtagacagagaagaggtcctgagaaaccaggccctggttccagatgttgtcaaagacgggtgtggccccggaggaggaaatgctggggtaggccagccccaggatgccatcgaagggagcataatacaggaaggagccaggttccgtctcgctcaggccgaagatctgattggtgtcagagatgcctccaacctggacagtgtcgtatccgaggatgcctgtcatgctgccggtgccgtaggtgatggagactgtctcgctggtggactggtaggtggaagaatcctcagggttgaagcggttgtggttggtgcaggcaagactggagcagtagactgagggcacccacaggttggaggagccggtgtcaaagaggacggtgaaatcctgggcaggagttccgatgccgatagtgccgaagtactccatatccaggtagttctccaggagctgttcatctaccagggtgggagcctcccactgggggaagtactttctggctgggttgaggttgtgcttc

SEQ ID NO: 442591 - DNA, 688 bp, Homo Sapiens
  misc_feature (592)..(592): n is a, c, g, or t
  misc_feature (595)..(595): n is a, c, g, or t
  misc_feature (608)..(608): n is a, c, g, or t
  misc_feature (611)..(611): n is a, c, g, or t
ctcagataatatgtcaatcctaattattttcatctctacccctgcctcaacgtgcatcccaatttcatttctatgcctagacttttttgcaagatttaataaaaatggaattttactcctttctacattattccccgcctccccacaaaaaatagctgtggccctcaactagtactaccaattgtgtccaagatgcttgttatcctagagtgacttattgattacaaagtcactttctgatgtttattattattatttataaataggagcaatatggtaatcttgagttgaagaaaattgttgctgctgtttggacgacaccagggatgaggattgacagggaagaaccacactcaccctagatgcctcagatgccagtctccatgaagccactcatgaaaactctccctcctcgacatgctcagaggggctttaggggccagtgaccagtggcttcttatccagcaggacagatgcagccacatgttcacaaacaatacagagtagaaggtagtccacgtccaagaggaaggacttcacacaaatggagaggccttacaaggaaaaggcacagcacatggcaacttaacanaangagggagagttgnatngaattgaggaaaatggtggatggtaccagttcgggggaaataataaagatttgagacgagctttctctgagcatttc

SEQ ID NO: 442592 - DNA, 426 bp, Homo Sapiens
taatttttccagacacctcagacccaatactgttgggccccagaagagtgtgcagtctgccaaaggctaggtttgaaaatgacaacttgttgtagctgcttagatcgcagaaagggtgtgggaagcagtgcaagcacactcgctagagcagtttcatctcacagtatcctggaaacttcctgtgttagtttcagggactaggaggttcaaggggctctccccttggcaagattgcacagttctactgtggggatgtgggccactggaagtctctcacttatcactctctgtgttgcttatttccaaatcccacccaatcccagccaaacagactgcaactttccttctccgtccttgcttttggtgtttcctgtcacttttctgttgttcaatgttctttctttgattgtattttgtgtccttgtt

SEQ ID NO: 442593 - DNA, 509 bp, Homo Sapiens
  misc_feature (45)..(45): n is a, c, g, or t
  misc_feature (49)..(49): n is a, c, g, or t
tgcctctcactcagtgatgacttggattaccagccagtttgacanccanccatcgtaccctcttaacctctatctcagccaatgttctgaagggaacttagtcatccctctaaacttgtgatagatagagattcatggacccacccttataagactgctttcttctcggaagtcttgctgctcttatctgttccccagtatgtggtttgtcatctgaaaaaaatacatagggctgtggggctgtgattcggagctgtgattcatcaataagacccacaggattgtcagcgttcttcagttatgtgtttgtgccttcctcatgagccagggaaaggctggggttaccaccggggcacggcttctgaggagggtgagagaaggaggctgttatcttcctatggcaagtctgccatgtggacccattctgtggaaatgtactgtgtcatttatcttagtttttgtgtttttcctgcatacactgcactgtgtcgtttattttagtttttgca

SEQ ID NO: 442594 - DNA, 422 bp, Homo Sapiens
  misc_feature (66)..(300): n is a, c, g, or t
ccaggagaaatgttctagaaatatcaattagatacattgttctatagtaaagattaactctgatgnnnnnnnnnnnnnnnnnnnnnnnnnnnnnnnnnnnnnnnnnnnnnnnnnnnnnnnnnnnnnnnnnnnnnnnnnnnnnnnnnnnnnnnnnnnnnnnnnnnnnnnnnnnnnnnnnnnnnnnnnnnnnnnnnnnnnnnnnnnnnnnnnnnnnnnnnnnnnnnnnnnnnnnnnnnnnnnnnnnnnnnnnnnnnnnnnnnnnnnnnnnnnnnnnnnnnnnnnnnnnnnnnnnnnnnnnnntctattttgtctaatataagtatagctactcctgctctttttggtttccatttgcatagatatctttttccatccctttatttttggtctatatgtgtctttataggtgacatgaattcttt

SEQ ID NO: 442595 - DNA, 540 bp, Homo Sapiens
tggttcaaaaggtattttagcttttagaattctgggagatagatcttcacagctattttaacttgcaaagcagcctgaggggatggggcaggtcccttcttcccctccaactccccaccatcagaataccccatggctgcccagttggttcccaggtcagtctgagatccaaacaaaaggggaggaagcaacctcaggacgtttcccgtcaccctgtttcccatcacccccagctccgggaagtccccacgtggcaaccagttcccttgccaggctggcttcggatgccaccatccctgggagggggttgtggaggaaagaagggtggttgagggcccagcttgtgttctgggctttgtcccaccatgaggggccaatttccctttgtgtaggggacggcttcttgcctgctttgcctggctgcctgtaggccctgcaactcagcagagggtcggatccactggttcagaattccccaaccttcacccccaaccagcctctgtccggttcttcttcctggcctggggtctccttggccct

SEQ ID NO: 442596 - DNA, 678 bp, Homo Sapiens
aggcaagaagaaagatccatgaggcccaaaagtccaacaagacaccaatggtgataaagaaatttgggtaaatcccaagggccccaagaaacattgaccttagtagcacacaaggaagcccgttccttagagcccccaaaattgtgcacattggttcttgttggaaggattggtttatccccaagcaaacgacctgttcaagtggcagtaacaagtaaagcaagcctagttttagtgccctaaaaggtgtatgttggttctggtaatggaagccacaggcaaggttggcttttctttaggccctcccaatggtgtgcacaggggccagtggcagggagcagggtgggtcatttcctaggcccccatattatgtgcagaggtgccagtgcacttgtggcaggtggggctggccttacctctggtctgcagacggtgcctgcagatgccagtgagtggcatatattgatctccagaccctcagatgatgtgcacatgtgccagtgcaggcagagtgggcctattctcaggccccccaatggtgcacatgggcgctagatgcagtggcacaggggtgggggctatcaatcctcaggcccctggacaatgcgcacaggtagttgtggcagcgccggttgcagcagttatatcattctatattgaaccttgtttataaatcag

SEQ ID NO: 442597 - DNA, 726 bp, Homo Sapiens
ggtggacgatctagaactagtggatcccttgggctgcaggaattcggcacgagcaaagttaaagtgctataaataaagaacaacttcagagaaactcatgctagtaaaatgaaaagccagtgacgatcccagatagtgtggctctgcaagcttgtgggtcttccttgtctacgtggccatctcttccctggactgtgagcacattgtgggctgctcttgggcttaaattgtccctatgcagtgtccctagaacacaaagccaggcacaggatggaggctatttgattattttaaaacactttctgaattgaagagagccaaataggacataataaaacgtagaaaacaagaacaaaagcaaagatctctaagtcttaagtggaaagaaacaatctcaaattctcagctggtctgtttacacttatttaacccagatgcttccatgaggagcaggaattgggcaggtatgtaatgctgcccaagggacagatggtctcagggaccacatttgccaaagcatgactttattctcaccccacatcggggaagtgtgagtaggaaaggattcttcttcattaggttttgaagcacataataaagatctatctgacaggatgtgacttccctcttaaagcttgacggaggttcccaacaagttcgcttaggttttggaacatttaaagatggtataatccttcgtatagacagagaggtgattggggggcg

SEQ ID NO: 442598 - DNA, 449 bp, Homo Sapiens
attgtttgaggttgtttgtattttttattttagaccttcttgtttcttcaaaagtgtttagtcattttagttatttagactttccgtataaattttaaaataaactcgaatatttattttaaaaaattcctgagattgtgataaaaatggtgttaaatctctacatcatttttggaaaattgacatttttgctatgttgagccttctaatccaataacattacatatgtatatatatatattcataatttatttagtttttaatttcattcttcagtgttgtgtagttgacaacatttaattactctgtgttttgtcacacaagtattttatttttgaatcactgtaaatgatatatgttgacctcgatgcccatgggttcattgctaatatatataaaaataatagatttttgtatgttcatcttgtcttttgtgaacttgatgaact

SEQ ID NO: 442599 - DNA, 449 bp, Homo Sapiens
agcaaccgcctatgagggaacaacacagagttccttcatagagctcacaagtttgagtcaggtaacaaaaaataaaacaaataaatatataattttagcaagagtacatgctatgaaaaacatgcagcacagttaagggagtgagaatgatgggggtgaaagggataataccatagatatggttgtagtgaacattaatgttaagctcttatcattgggcctgacacatggaaggactcactaactcttgtctattgttgtcattaggttccgtatactgacccgggggtttgggcagccccctaaacatggaagatcccaggaaaaatgatttcagtgggtggcatttaagatcctaagggaggctggcatgtcagtcaattcaaatgaccctccccttaggtggtgatctgcactgcttagagctggtcctgagttgtcccctcatc

SEQ ID NO: 442600 - DNA, 679 bp, Homo Sapiens
  misc_feature (221)..(221): n is a, c, g, or t
aggagaatgacatagattctgacatagattcaggccttgatcaaagcctgtactctaacctaaaactccagaactaagatgatctatccaagatccagaatatcaacttccattcttaggctctctgcctttgagcctcaggacttcttgggcatggactttctaacaggagggataaggcccttcttgctgggaatatgattagagaagagaagctgggnctggttccccccttcattctggcttaaatattacctatcttacctcagtatttcataatctgaaactcataatttattgttcaagttactttagaatatatttttcacattataggcttttcacattacttggcatttatctactgttcttggtgagacccacatgtttttcctctagagattttctaaggggaaaagaaagtgttcagagagactacatcatttgagtttattcaaaatattcaaattaactaatctgtaatgaccttattgtctcttttatttaaataatgatgatgtaaaagttatagattgtgtctacacacataaatggactattttcctcatagaaaaaccaaagagatatctgaagagttatctcttctaccttgggcagaagcccaaggtagagtatatcttcagttggtatcaagtcctctagatgtgatgcttttttt

SEQ ID NO: 442601 - DNA, 639 bp, Homo Sapiens
  misc_feature (17)..(17): n is a, c, g, or t
  misc_feature (37)..(38): n is a, c, g, or t
  misc_feature (96)..(96): n is a, c, g, or t
  misc_feature (189)..(189): n is a, c, g, or t
atgagagcacatgcaanttgaggaatcactgtacatnntgtcagtgcttgggtatttgaccctcagtaaacagcatttacttaacttttaccaganaatgtcttgatggcattatggtatgatttatttacagttctacagatttggggttacatttggaaatctttccattgacaaaataactctccncaaggactgttctcaggaaatatttgttttcaagcctttagaacccacttgaatctaatgggataaacatgcacttggtcaactagggattggttatgctactctttttaaaagtcatcagatcaacatttccaaagtgtggttatttagcaagtcttccaaagaatatcagtggtttgcttcttttgcttaaatttaaacaaaggttgttctcagattcaacttacttgatttcacaccaggattttgtagaaataccttctaaacatcctcctcatctctgaattgcctcaaggaggcaagcctgttccagggaatgaggtcaatctgcacccactttgcaaatgaggaccttcacatttaggttacattaaataactgtatcccaggaatgtgcctcaaaaaccaagagtggtcaaagagtccgtctcaatttcataaatactttac

SEQ ID NO: 442602 - DNA, 673 bp, Homo Sapiens
agatatctgtataagcgcttcttccagcctcacctccttgtcttcagccaccaaagcaggctttgcgatttgcccaaaatgcctgtgtccttcttgatccatagaaaacgcggagcaaagaccattattgtgctgttctttctgctccaataaaaaagagttataacagaaagctgggaccaaagcaggctttctgtcgtgtggacaaagaaattgttccttcagctcagtcttcaggcagatggcagtaaacaagacggtgtggctcagatcatatcactgggaggctcttgctctgtcaatgccaccctgctctctggacccagctaggtgcccagagtagcaagcagaacctttgccttccatccagaatgcctcaaaccccctttccccagtggatagaggtgcaaagaccacccagctaggtgcccagagtagtaggcagaacccttcccttccatccagaaggcctcaaaccccccttccctagggtatagaggtgcaaagacacccagctaggtgcccagagtagctggcagaacccttgccttccatccagaaggcctcaaccccccttccataggaatagaggtgcaaagacacccagctaggtgcccagagtagctggcagaacccttgccttccatccagaaggcctcaaacccccctcgtg

SEQ ID NO: 442603 - DNA, 710 bp, Homo Sapiens
  misc_feature (16)..(16): n is a, c, g, or t
  misc_feature (22)..(22): n is a, c, g, or t
  misc_feature (40)..(40): n is a, c, g, or t
  misc_feature (48)..(48): n is a, c, g, or t
  misc_feature (67)..(67): n is a, c, g, or t
  misc_feature (80)..(80): n is a, c, g, or t
  misc_feature (89)..(90): n is a, c, g, or t
  misc_feature (99)..(99): n is a, c, g, or t
  misc_feature (128)..(128): n is a, c, g, or t
  misc_feature (139)..(140): n is a, c, g, or t
  misc_feature (169)..(169): n is a, c, g, or t
  misc_feature (183)..(183): n is a, c, g, or t
  misc_feature (196)..(267): n is a, c, g, or t
ggacagaccacagaanagtgtnagccatctctcatggccntagctccnaaatgaactagatacatcntggtccagagggnaactgctanncttaagggnaaagcccatttcagacagagcccattacntgctgactagnnagctcttaggccttgaatagccagcatcnatacctaagtagtnaactgtggacctnnnnnnnnnnnnnnnnnnnnnnnnnnnnnnnnnnnnnnnnnnnnnnnnnnnnnnnnnnnnnnnnnnnnnnnnagttccttctgcttgagaaaagcagggggaaaagcaatgaggactcttgcacgttaggtaccagcttggccacaggtatagcaccaagtgggctcttggagttccttattccaggccttgggtcttggacattcagagggacgcttactgctatgaaaggagagtcccaagtgaggtagcaacaagctgactggaggttcctggggcctgaggagaacatggacagtagcatggcagtactccctgtgggtctgtggtggtggtggccatgaggtgaggctcctttgcctgtggaaaggagaggaaaacgtgggaaggactgcatctcatggtttgagtgccagctcagccacagtacaacaggacaccaggtcagtataacaggataccaggtagacttctaaggcttttgactatagtccctggcctcgtgccgaattcct

SEQ ID NO: 442604 - DNA, 806 bp, Homo Sapiens
attatgtcctacaagcattaattaattaacacactttagtaagtatgttcgcctgtaatattgaacgtaggtgcgataaataataggatggggcaggaatcaaagacagatactgcgacatagggtgctccggctccagcgtctcgcaatgctatcgcgtgcataccccccagacgaaaataccaaatgcatggagagctcccgtgagtggttaatagggtgatagacctgtgatccatcgtgatgtcttatttaaggggaacgtgtgggctatttaggctttatggccctgaagtaggaaccagatgtcggatacagttcactttagctacccccaagtgttatgggcccggagcgaggagagtagcactcttgtgcgggatattgatttcacggaggatggtggtcaagggacccctatctgaggggggtcatccatggggacgagaagggatttgactgtaatgtgctatgtacggtaaatggttttatgtactatgtactgttaaggatggataggtttgttggtatcctagtgggtgaggggtggctttggagttgcagttgatgtgtgatagttgaaggttgattgctgtacttgcttgtaagcatggggagggggttttgatgtggattgggtttttatgtactacaggtggtcaagtatttatggtaccgtacaatattcatggtggctgggcttggtgaggtgtgtttttagactattagtctgttctacctttcctgaagattgaggacggtaagggatataagatttcactgaataccgagaccctgactgcttg

SEQ ID NO: 442605 - DNA, 628 bp, Homo Sapiens
  misc_feature (22)..(22): n is a, c, g, or t
  misc_feature (46)..(46): n is a, c, g, or t
  misc_feature (81)..(81): n is a, c, g, or t
  misc_feature (321)..(331): n is a, c, g, or t
aaatcttgaatctccaagtatntgatataaagtcttaaaataattnatttaatccgtgactcatagtgtttcaggatgttntgaaatctgaggtagatgcacctagactcaggccagataaatgtatccttgaacatgtgtctatccatgctgaatgggatgttgcttctatcttggacaggatgtcattgataaattttattatctatcctactgacacttactttgggtatttacccataaatgaatataataaacaaataaaggatattatattcaagggattctgacaatactatgctcctgtaactcttaaaatgnnnnnnnnnnnctttagagtttgtaataagttgcatattctcataagatccatatttattcttcatttgtttatttgttctaaatattatactagaaaataaaaaagttaacaaaattaattgaaattcaaagcttatgctgttgatttaactctggtacctgctagaaataggtttccaagctcttccttatcctgtttaaaaataagggtaatgaatcttgaaagcaccaccaatgttatgaggctccaagcaagccactaacattatcaggtcaaccctgtaccttcattgtaaattaattttct

SEQ ID NO: 442606 - DNA, 410 bp, Homo Sapiens
cgagaagactgacgctcccacgcaaggatcgtttctgcccggctgtgccacctggggctccaggcctggctttgctctctggcttccccaccattggctacctggcctcgggcaggcccggcccagctctgcgactcagtgcctgggagaatgaagatgatcctttgagggtcctaagtatggggagggctgcgcaaagccatgactcagcacgtgggagatgagcgctctgcagatgcacacctgccctggggggagccgccagctggggcctgtggcaggaggcaggaagaaggaaccttgcacaggaagggcccaaccagggtctgcaggggccaggtctgctgtctcctgaggacagggcagagactgcgtgtggctgctggcgtggagtccgttccccaggggtg

SEQ ID NO: 442607 - DNA, 721 bp, Homo Sapiens
gtggtctcgatctcctgacctcgtgatccgcccgcatccgcctcccaaagtgttgggattacaagcttgagccaccgcgcctggcactagcctgttttttgataacaagactggcggtgcacaaagttgggtctctgtgttcaccgggaggtgggcattggccaggtgggacggtctccagcgcctggtgcaaatctccaccaaagtgcaggaaacagcatcaactattactgcaaagttttggtttggcgcagcgggtagacgttccagcgctgaaatgcgcaagaaagtttttgctgcgcatgtaggcgggtcaggcccaagcgcttcttattggctaatgtggagcgaacctgcacatccattgactgaaagctccgtctatttgaggctaaccgagagcgtcccttccttttgtgttgcctggaaacagactgtccgcctactaacatctgatcgcgtttcccattggtcggcgtttccggaagcccgtccttccgtttccggaagcccggcacaggctgggtctgcagatggcgtccgagtgcacagtggccagtgtgattccgcagtcttgggctgttcggccaggcgcccaccggacgtgggacgctggagggtcagcgcgtggagtcctggccttcagcgtccgcggctgggtcggccatcgccacggcggggactaggactggctgcgttcccggccctccccattcggtcc

SEQ ID NO: 442608 - DNA, 694 bp, Homo Sapiens
  misc_feature (28)..(29): n is a, c, g, or t
  misc_feature (33)..(33): n is a, c, g, or t
ggcgtgaaagcaaccacaagcaacaatnnttanttactgaaaaaaggcaaaacgaatttttttcatattctagaaccatgttaatctttgttttcttttattttattaaagcattcacttttatacttgaaatggaaaataattctcagctatcaaagtcataatcagaaatagtggtgtattccttggataagcccacgttcaaatggcctaaattagtcatcctagagttctaagaaatctccatttattattctttctttgctgttattctgtccattaagcatctccatatataatttttgagaatgtgccctcccttgtgaatattccagtctaattttgcaagttacattttgaaaataacagaaaattcctacaaatagtaaaaatgtattttttcttaatgccattttaaagatttcttccccccttaattagtcagggactgtctgtattaattttccagaactaaattcaaaatgggatttaaaactattgaagtacactttctaccaactatcagtccattagtcatgtatatgccattatatattttccagtaaaaaactctttctactgacaatcatgttgaataaaaccatatcaataatgaggagtacggtttcttaaagtagaaaaaatatcttgatacaagaacacatcactttgccattttcaatcgtatactttc

SEQ ID NO: 442609 - DNA, 715 bp, Homo Sapiens
cttctcttttttctctctcctctttactaaccaacctccagaacaattcttcttgaccgtaagtgactctgcccacctcctggtgggtttctcagctcgttctgatgggtggctcacaggggtgggaaggaaattaggttctgcaccaaatagatctaaggtactaaaatgaccctcctggacaggaggctcaagtggtaggactaaggcctaaaaccatgcaatgttttgggtttcctctgctttttcaacttcagctctttcccaaagacctgcacctcccattctcctcttttcaatgtgtgtattccgagatggccttgcgtacctgccagatcatccatttccaggggcaagtctctgtctttgctttcactttgcatgccatgtgacttcttaaacaaatactccttgttattcttgtgcccacggctctctgcatatatgcagcagcagagacatgggctctcttgtagatatcccctgaaattgatacttgtttttaccctagcagctcaaataacctccagcccttctcctgcccattggcatatggctgggacagatactaattgggactcttgctttgccagttccttatgacttagtatatgctttttggtcctgttatgccccaggactgagttttttggtggctttcgcagattgtcagcgtgcatactgggacttatccttggactctggccctattggg

SEQ ID NO: 442610 - DNA, 699 bp, Homo Sapiens
  misc_feature (17)..(17): n is a, c, g, or t
  misc_feature (41)..(41): n is a, c, g, or t
  misc_feature (58)..(58): n is a, c, g, or t
atccaagactgcaaganctaaaacagatgaagaaatatcanagattaagggtcagaanatagccttaaagtttttaatgaaataatgaatagtttttctagtaagaagaaggcagcaaggtgatcaggtagacattttgagatatatggaaagttgtaaataaatggcaatcttctctttcagattgtaagtaggacaagaagaaaaagtaataaaatataggacagttttaggttatttcagagaataagagtggttaaagaaaaactcagtcaagacatttggggaagagtgttcttacattactttaaaaatactgtaaaattttaaaaatagcataatctctttgttttcaaattatgaaaatgagataatgttaccagatcagagtaacacaaccagtcaatgacagcataattccagctctcatatgaaaatctaggcctttgctccttgactccagtcttccactgcttttccatttttttatgtttcttaaccagttagtttaaatgtagcctggaaattgacaattatctctgaaagatgtttctagcttaaaatgcctgtgattatcagtgggtctattaatgaatgagctctccaacctcttcccttctgccattcacttgtgaaaaaccttgttttactttaaaacttatagacttcctgagaagcaagagctcaaataaaaatctt

SEQ ID NO: 442611 - DNA, 751 bp, Homo Sapiens
  misc_feature (237)..(245): n is a, c, g, or t
  misc_feature (708)..(708): n is a, c, g, or t
tggatcccccgggctgcaggttatgattcaataggcctgcggtagggcccaagaatctgccttttgagcaagttccaaggtgatggtgacactgctagtctgaagccaacatttgagagcttctgatctgtatcagaattattctggctttttcatggttttcttgctttgtgtggttaaagtaatgccacctactggacataattgagaagaactctcagtagaaacttaaaacannnnnnnnnaaatgattaaattctaagggtcctgtcgagagcttgaaaattcttgtccttttgacaaattgggaacagacagagtatttttattgtgacacaagaatatcaacttgtttgtaggatttcttttttaagtaaagaaaacattaaaaatattctcccttctgtttatagttaaatgcataagagcaatactgacactaagtgctgccaattacttgttgtactctcaatttcatgaaagaaaggaacatatcttggtacaataagtgcaaaaattctttctctttggtcctatgtattcatctagacaatgagaaaaggtgagataatctcaacaagtagtctctaatgttctgtgattctgcccaaaagacatttcacttagcttaacctcagaaggagaaagaatctcatttagaatgaaagcctgttctctgacattatacaactctttcattttataaanactaacctatgtgactcttacccctgcagtcatattctgggtc

SEQ ID NO: 442612 - DNA, 716 bp, Homo Sapiens
  misc_feature (686)..(686): n is a, c, g, or t
ggctgcggttttcggcacgagtcttccttacctacttacactatttttgtagtttccatctatttattttgtatatgtagtatcatatttattgttaaagttttaaaaaaatttgtcttttaacttttgtacaatgattaaaagtaatttaccattatattattctatatacagaacctatacatttgtctttactaatgaatattagtaagaaatacgatactcatttaaaaagtaaatatatagaaaatattttatgctaccaccttgccgtatatcatcctttcattttaacatgaaaaaatccctttagtatttcttgtaaggcatgtctagtgataatcaactttcttcacttttgtttgtctggcaaatactttttctctccttcattttcaaaagacagttttgcctgatatagtattattgattagcagttttacgttttctgtcagcacttcaaatacataatctattcctttctagtgtgaaatattctttctgagaaatctgttgatagtcttacagagattacttggtgcatgacaaatcatttctttcttgctgctttaaacattactttttgacttttgacactttgattataatgtatccttatgtgcatttatttgggttcattcgattttgcttttacggctagatgtctattttcttctcccagattngggtttcagtcattatttatttttctgctg

SEQ ID NO: 442613 - DNA, 212 bp, Homo Sapiens
agaactcattggtaatctacataacctctcataattaaacagataaaaatttgaagaaagagtattttgtcgtagaaacaagcgagaataagaatatctgagggataaactggcactataggatcattgtgttcagtgtcctaacattcaagaatcgtctacattacattgtttaaggaaaacaaattatcagaaacggtgtgaatacgtgg

SEQ ID NO: 442614 - DNA, 727 bp, Homo Sapiens
tccccgggctgcaggaattcggcacgagcaaacttttagatactgtaaatattgcattaaaaattgtataactgcttaaaaataccattttttattcacattagacccagttaatataaaatataatagtttgaggatcataatgtgaaaagtagaatgtttttgaggtaaaatgaaaaagaatgttagggaatatttgagtcagatatttgataattgggtagtgatgaagagcaaagtggtcctcctgtgcccatgtgcttctgagagagaatgagcacttcagaattgctgcacttgggtgtgccgtagaataccagacactgtcagtcttctggaccaaatatatggagcgaatacactggactatgaaatgagctttcagttatttaggtgcctccaaattattatgaattattgaggagcatcacgtttctaggtctttaggagagggcatggcggttaaactggttttcccaatttctccaagatatgttgctcaccttgtgtcttgtctgccctatagcttgttatggagttctgtggggctgggtccattacagaccttgtgaagaacaccaaagggaacacactcaaagaagactggatcgcttacatctccagagaaatcctgagggtaagggtgcgtggctacagtgcttcaactcatgatcctgtgctttccgtttcattttccagccccagtacttctttgattacttatttt

SEQ ID NO: 442615 - DNA, 679 bp, Homo Sapiens
  misc_feature (569)..(569): n is a, c, g, or t
  misc_feature (614)..(614): n is a, c, g, or t
taaaaacatttatcaaggaaacaaaaaaatttaaacagttttttagtgagatgagaacattgtgtttataacacctaagccacatttattactttccccaataatcagttatttaattgtgataaaaaattatagattcaatttacatgaaaaaaattgatgagtagcgtgtttcttataaacagttactacaataatggataattgtctcaaatgcatgctcctaaataatgttagctctcaccatcttcactgactggtagggtataagagagatggtaaaagtaagatattaaataaataacaaaaataatccaaaatagccttggcttcacccacacacacacagtactacttaaagtactggctcaaagatgctgatattaactctttacttaaatgtcaaagccaaagccacatttaacagcaaagccacatgcaacagcaaagccacttggctttactctttcaatgcatctttacaaaaatacatgttcttatctatcatcctctctcttttgttttatttattgtttcttttcaaatctttctaaagttcttatactctntttcccttaaaattttctcctaaaacttctctctgctggttacangattcctctgttcagttattagattaattggccctaactttctgtgttgtagatggatttgagtt

SEQ ID NO: 442616 - DNA, 681 bp, Homo Sapiens
  misc_feature (87)..(87): n is a, c, g, or t
  misc_feature (103)..(103): n is a, c, g, or t
  misc_feature (265)..(283): n is a, c, g, or t
aaccctcgaaggacattctacctccctttccaattcgcaacatcttcaagcctttcttagccagagaaagatggtaaaggtgcagtnttctgaaggtaattanattagcaggcaccccacttctgggctcttgggtgtcagagggggagtgatatacttagtcctttttgtttacacaccaaaagattaggtttccttacattcctaagtaatttcagaagattaacttttagataggaaacttcataggccgagcaggctgagnnnnnnnnnnnnnnnnnnnttcatgtcaccctcaagcagttccatcaagggatgaaattttaaatcacatcatgtctcacacccatttcttagtgcaaaataaatcacttgaacagagtgcaagccaatttttactttaaaaatgttgtgtcctaaggctgtcttcttgaacttcaaaagcacactttgtaattactctacctatcaaaggaaactcaacatttcacctccaatcttcttcagcttgtgttatcatttttaattgttaataaaccacattaattttaaacttattattctgtttgggaattcaatgttttcgaggagaatatgctgaattatatttaaataaacttgtttacgtacacttcttaaatatacttgtttacatcagctaaagttaagtggggctttttc

SEQ ID NO: 442617 - DNA, 634 bp, Homo Sapiens
  misc_feature (54)..(63): n is a, c, g, or t
cccccgggctgcagtgaattcggtacgagagattttgggctttgttggtgccannnnnnnnnncaaggtcgatatggctacatttgacgccgtatcatgatgattacaatactggctctgataatacctggtgattttaaaggatttttttaagcccattttgagccttcctgtttattgtttcttcttcattggaggaagatattaaatatgtgaaacacatctgcaaatggtacttgaaaaatgaaatgaaatgcctttgtgcttcttgcagcccattctacaatttattttaacttcacagttaaaaagtgtatattttttattttctacctatctagttatagcctaattgatttctttggacagagaaacacattcagtagacaaactttaggtgaatggaaattagtcctgatctattttgacatagctctttatttttcatgtgtaacgcagcttgccttcatgggcaggaaggtggatggggaagccgcacgtgcctggcgtagtgtagatctaatagcggtcgtgttacgaagattaaatgagtaatgtttggtaccctgtttggacagaacttgcaaacggtgatgcgttgcatgcatcaactgtgatgatgctttccgggttt

SEQ ID NO: 442618 - DNA, 720 bp, Homo Sapiens
  misc_feature (29)..(29): n is a, c, g, or t
  misc_feature (122)..(134): n is a, c, g, or t
  misc_feature (300)..(300): n is a, c, g, or t
gagagaggaaccacttagatgcttaattnccctgtatacgtttcctaatatgtaaacatttcgcaaacaagtctcaagggctttatgaggaaagatagccagagagaaaatgcttcaggggnnnnnnnnnnnnntcgattcaagtattaagtaaaaatgatgctgtcatttggccatctagtgtagtctgctcctcttgcagcaagcaccttgagaacactgtatggtgggcagctgtccagcaaagattgtgacagtcaataagtcatttccagaggacacagtggaggagcgtggggncggtgggccatttgaaataccctttcagagcataatttcctgacaaatcaagctgcttcttgggtagatggaggcactggccatcaaggggaagagtgggtggatgtcggcgagccattactctgtcaccagagacctcgcacacatttttattccttcccacagttattctttcgtttcatataattatttatactctgcagtgacacatagaaaagcaatttacctaatatttctctctataggagaaggccaagccattataaaaaagatttctagacttctttgtactccatagttcttatgaaataagacaaatatactcatttttcatgatgtgcttttgtttgaagttctttattacttttaagatttagtcaatttgaacttctactcgtaccgaattcctgcagcccggag

SEQ ID NO: 442619 - DNA, 720 bp, Homo Sapiens
ggctgcaggttttcgcacgagatcagttttctcttctctttgaacgtggggtatgttgcacatagcattttgaaagtacgcaaagttcttttggaaagagctttatgataccttattgtcaccgtggtggttacgcttaattgacattttatgggaagtcctggtattatttcctgggctctttctgtttccatcttttagtctttctctttccccttatatattctctcactgccccgctagcctctccatcctctctacagaagcctagtgggcttgggttcctttaagcgggtccagtgagcaggcgcctgacccttgattgaagctcaggaagggccagcctgctctcctccccttttggaggccagagaggagagagctgtgtttaaatattaggagctggcagcaggggacgctgcggagctcttttaaaaagcacactcttttcacccaccgttcgatgccttgggccctgaagactgagttctgggcccaccttcagattgttcagttgatgttttatttgggcagcgtgactttctgcagttaaattgcgcattgtttggaaaacttttctgttcttttccttaaataaaaagactgaaatacgcatatacttagatcggcacaacccctatcattaccaccaccacgcacacctttcttgtgtgtaatgaaacctgcaggcattaattggttattgtatgctgataatct

SEQ ID NO: 442620 - DNA, 676 bp, Homo Sapiens
  misc_feature (624)..(624): n is a, c, g, or t
aaatatctaaacaaaagtatttaccattcatatcctacctttagctgggtgagtcatttgatggcaattttctattatttgcatagcacatgttagagtttagaaataaacagacatatgtcattcaaatttttataggaaagtgtttaattgctgagaagtaaaacacaaaatgacctcgcagcataattataaaaaagaagcgtaaacacgaaaacaaagggaacagaaaggcaatgcaataaatatcacaatcaaacacctctttcatcaaaatatcagttccctttttaaattctgaagtgaatgctctaaatttattgttgaggctgctttaatattatagtttgatgtactatcttcgaattgatctgatgttataatcaaccttgggtcagtaacagagacaaaatccatagcttcatgccacttaactaaataaatatcaacattcaggtgaagggctttggattctatgattttacacgttcctcacctaagtcttattatcaggcaattttggtaattgatgtgctaatataattgttctcaacacctaattgggtgtcaactttaagttcaaaaagagctatgccaaagaagcgtttttacgtttctcactcnttatttttctgtactagtgagtattgaagtctggtttgcagggattatcagt

SEQ ID NO: 442621 - DNA, 716 bp, Homo Sapiens
gaattcggcacgaggtacattgggtgcctaattgtagacagtgctctgaaggagatttccatggtattatggaggtgtgtgacagagggaccagtttgatccaaggggtagtcaaggaaggtttcctggaggtggggacacttgagtcgaagcctgaagaacatttggcagttaactgggcagaagagaggggatgggatagagatagaacattccaggctgaaggaagtctcctgtgcaaagctcctgagataggaagatgtttgaggcacttgaagatagctgatgtggctgtagttgggggtgcaggggagagagggattgtggaaaggagagaagtccacacagagccgtgaagaccatactggattctcatcatggtctggagggcaggacccatgggtcagtatgctctgcagcttttacagatttctactatggcacccattaccctctatgatggcctgtctcccgttcagtcccatccttacaccctggagtaactgatgtcattgacttgccacatgaccttcaaaccatggcttattcacatccttcaatcaactttagtatcactttgtgaatgccttttttccatcttgaccagcttgttagcatgcccaattttttttgtaacatttaccataacaataatgttctctctttctattatagttgtccttattatcctgttactttttcattcattttcctcg

SEQ ID NO: 442622 - DNA, 340 bp, Homo Sapiens
gtggtaatataagtactgacatagcgaccctggaaattagtttgcatatcttcagagcgtgccttcctctttgccagtagattatacagtttgaaaattgacagttccccaaatgtggcctttctctttctcttcctctccctcactctccacaccatcccgtctctttcttatccacaaacatgaacaatttgattatcagtttaaattaccagggtcaaactatcaatattatagtgaccatgagtaaaccatatatattttttccatatatgcagtaatgaactgagagttaacattttcaatgactgaaagcaggcctctagtgaccgccggcgtt

SEQ ID NO: 442623 - DNA, 530 bp, Homo Sapiens
aacaagtgctattttttagttcccattatgtgccatggactgcacatcatatacatttttgctaatccttacaccaaccctacacaatagatatttttatcctaatgttagagataaggaaactgatgctcagagagcttaagtgacttacccaagatcacacagctagtaagtgacagagtgagaatcagatctgactgcactcaggtctgacggactccgaattgcctcctcttgccactgggcaatgggcctttgagttgttccctcacatgtctgtgaggccagaccctgagtctgagattcttgggttcccctcagtgcttgcagttccttagtccctaagactgttaagaccacagagcccatggccagtggaatcagcggggaattaaatttgcagatgattttagacaagcaaaattcagcccaggtgctggacctggaacgccctggtttacggaatgaaccccgtcttctttggagctacagcctccgtcctgctctgccttctctcggcttttatcccg

SEQ ID NO: 442624 - DNA, 661 bp, Homo Sapiens
  misc_feature (115)..(115): n is a, c, g, or t
  misc_feature (159)..(159): n is a, c, g, or t
  misc_feature (297)..(307): n is a, c, g, or t
gcccaatggtcaggggctgaaataagtgatgtgttaagctccatgcctgtcaaggttacttccccacacgatacaacagaacttccacccccttagagaatgccattattaaccnccttatattctgtatatgaatttctgccagtcacacaagaaacncaagatacccaggtcatctcatcatgtggatgttgattctcaagcatcttggaatatcctgtaattagcctccatctaccattcctcctcagctcccaattcattcttctccactctctggagcacagtcagtcattnnnnnnnnnnntcccctttttactcaacctctcctcagaggatttccttcactgtttctctaacaaaatctggctctccattaaggacacttagagtcttctcagacagtggtggttttctctcacatgtctctcttactacttggtctggagttaggataattgtctttcctgattcttcttgctaccttcagacctttgtttcttcttccttcctccttccaagcccctgatttcttttgaagtttatgtcaacagattacccactaacccagtttgttgtagtcatctaactaatccccagaccagccttattcatttcttgaagattttattatatgatttactccatcactacttctgac

SEQ ID NO: 442625 - DNA, 635 bp, Homo Sapiens
aagggtggcagcatcaatcccaagacgggtatagccactaaacacggctgccaatgggtcaggcctgtccctcagagttaagagaaggactagtggccacctaggactcacctttattagggcttggcctccacgtggttcagggatgacgtcaggaatacaaatcagctcagtttggagctttagcatgctgtatagcaccataaaagcccaaaggaccaaatttacaaaaggtttgtataaacttccttactgcatgtatgtcttctatacagtagcattcaacacaagttccccttgaaattcagccacctgcttggcaccataacacacatcccataataaacaacaaacatacaagaaagatgaaagcactaagaacttgtgagccatctgaatatggtgatctattttgcatattttcacaaattcaaatgtacttacaggaacaacagaatagtatattttaattaggactgttctcaaaaaggagaaatgcatggggatgtgcagctgtcataaagctaggtcactataaacagacaccatttacttctcttagaagtgagaaatatatcctaggattttgagaaaacaaacactggtgggtgttgtttttttccagaatggctgac

SEQ ID NO: 442626 - DNA, 650 bp, Homo Sapiens
  misc_feature (431)..(431): n is a, c, g, or t
cgaggcaaattttttgtatgctactatggatgtgatctaaacggcgatttttgagacagcatatttgtcaataatatttttgaatgtagtaattgatcatttaaatgaaaataatatattatggtctcatctttcaataattttgagagatttttctagaaactatacatttaaccaaaatcagtatttttatcatcaaaataatgtttccaagattttagtttgcaaaagttatagtatatgtgaaaagtctcttattttttaattctaaaaactgatcctaaaattttgtatagaaagtaagtattttcactctattaaaaaaatctaactcataaaattatgtatactttaaaaaaacaagctaagtatactgggttatcttggaattggttggcttcttatttatttattcatttatgcatttatangttgcagccagctttccagagccagtagatatagtggcttgtatctgtgttggcacatgtgggagtagtaaaaaatgatttgcatttctgttgatattgataagaaagaaacttataaattctttaaagcttttatctacctattattcatgaatagtagtgaccctggtttttcaactaaccctcaaacttaagctttaaattaggaatgctttcccc

SEQ ID NO: 442627 - DNA, 698 bp, Homo Sapiens
gttataatgaacataaacagcagctgaaaaaaataaccccacacttgatacttaggggatttgcctaaacacaaagaaaacaaatacctttatttttctcttctccacttccagatattattttaggtgacactacaggcagtgagaactgctataggattaatgcatcttaaagactttcttgcgttgaaaggaagatgaatcccaaatcctatagggtaaaatttggtgggagcaggtaaagagtctgtaggtttttgaagagctctgtccaaagttgaagggccgacattaagtcagggaacaaagctacacaaagaaagggtagggcttaaatatttttagctcctttcatttgaactaaggggatggtcacaacatcaattttgtatctttcttcttctatgttgtaacatccaccaatcatccccattccttgggcaaagatgattaaaaccacaggaagtcatgtggagatgttaaggatgtaccttcaggagaagactaaaatattaggcaataaaaaagaagtgtaacttttctaatacccccttcttcagaggccagtgtacagacagatgcatcaagaaagcaatagttcccaaatactagttcccaaactatcaatgtgggagaccaagcagcactgagatatatggagcacgagatggagagaagctgctgccaagatgactctc

SEQ ID NO: 442628 - DNA, 773 bp, Homo Sapiens
  misc_feature (219)..(340): n is a, c, g, or t
  misc_feature (512)..(512): n is a, c, g, or t
  misc_feature (693)..(693): n is a, c, g, or t
  misc_feature (707)..(707): n is a, c, g, or t
  misc_feature (719)..(719): n is a, c, g, or t
agtttctaaaatttcttgagcaggtaaaagcttaattcaaagtatagggagatagatgttgtgaaaggtagttgaagccatgggaggaggtaaggttgctggggaggcaaaacagaacatgacgaagccacactcgggaataacattgaggagtgtctacatttgattgcctggagaaagaggaaaaaagaaggaaaactgggtgataatgttaccaannnnnnnnnnnnnnnnnnnnnnnnnnnnnnnnnnnnnnnnnnnnnnnnnnnnnnnnnnnnnnnnnnnnnnnnnnnnnnnnnnnnnnnnnnnnnnnnnnnnnnnnnnnnnnnnnnnnnnnnnncaatgaaatgattaaaaggataactaaaggaaatgtatagaagaatgaaaaggttgagtcaggggcacagcatagtaacatgtaggaagagaggatatagacattacattgcctggggacatctctttccctctctaggccactagcataggttcaaaacagagactaaatngcaatgcttatattctgtgtagactaaagacttgaaaagtaatggagctttactaaaagatgggtttcaaatgagagagtcagatgaaagtgccagggatttcagcacctatgatggtacatatgtgtagatggcatgtatgcaaggagcagaagctttcaagtcgagtgcacagtcattntatgagaaggtgcnaggaaatgatgnaggagtttacagaacccaactgtctcacaatttgcattgtattggcgccctttt

SEQ ID NO: 442629 - DNA, 724 bp, Homo Sapiens
  misc_feature (657)..(657): n is a, c, g, or t
  misc_feature (666)..(666): n is a, c, g, or t
  misc_feature (691)..(691): n is a, c, g, or t
cggcgccaacaatgcaccatccagtggtttattcttcctgggggttcggcccccatgggaacagcccacagagcaaggcagcaaacctgagaccagagaccacagggccagggcagctgagaagtccacctggcggcacagcaggtttggggtgttggggccacaggcatggaggcagatgaggtgggaggaggctgttgtctgttcacatctgggcctaggaaagctgatggggccagcaagggtttgcaagggctcaagaaggcagccgagagccacttcctaccacctttggcacctgtttccctcgctgtccagccattgccgccagggagtcctcctgggcgcggaccgccccgagtaaggacaggcctggcttgctgcgggccggtgtggctgaccgggccctgctcgtcggtgcagcagctgatccattcgagaggcacgtccttccatcctggcccggctctcggagctgaatcgcacccgcccagcagctttcatgccaattacacagagtgtgggtgggaggctcattaacccccagaagtggaactggtccagggagtggtgaggatggacaggggcccttcagccgacgatggggggttaagcgtgccaggtcaaggggttggggagcttgctcagcaccatccntgtggtctncactgcagctctaattgcataattntgaaagtgattggcctggcaacttggtttcacg

SEQ ID NO: 442630 - DNA, 669 bp, Homo Sapiens
  misc_feature (507)..(507): n is a, c, g, or t
  misc_feature (519)..(567): n is a, c, g, or t
  misc_feature (584)..(585): n is a, c, g, or t
  misc_feature (599)..(599): n is a, c, g, or t
  misc_feature (607)..(607): n is a, c, g, or t
aagtaagtaacctcttactgaaattgtaactgactgtcaaaatgatactgactgttgaagattaaaatgtgaaaacattaaacgatttttttctgttgtgattgtgtctgtatatatatgtacataaacattctaactgtagtagcattctatttttgacacagatctgagaagcctggttaggatttaatcagatatgtatagatacctcacagatgtatttggaataatattctgtagcagaaattaaatctagtcccagccttaccctaactagtcagtggcaaagcagccttctacagtctgttactttgaaatgtatgtttcagaataactataaattaacagctttgatcatgtttatgccatgtaggtatattttataggaagatataagtaacattcaaatggagaaaaacccaatgttggagaaattgaactagtttaaattgccagtcactgtttctgcatatagatctaatttttttcataatgactgataattgnttctgtcttctnnnnnnnnnnnnnnnnnnnnnnnnnnnnnnnnnnnnnnnnnnnnnnnnngtacatgtacatgtatnnatatttccagattntgactaanactttctaattctattacctctttattctggctttcaactaagcctctgacttctggatctg

SEQ ID NO: 442631 - DNA, 663 bp, Homo Sapiens
  misc_feature (506)..(593): n is a, c, g, or t
gccattttcacttagaatgttttcacttgtcatttaacaaacattagacaaagatctactgtgtcaagaacagagatagataataactaaaaagaatgagtctacttagcattaaagataaaaagacaagtaagttatagtcccaatctgtcaggatctcagagtccaataagaaaggcaaacatgtatatacataattataatcaagggctatttgggcagtgagggagtgtgtacaaggtagagggcactgcaagaaaggggataattaactctggtagtggagggaatacgtttctgcaggagtaacaatgtgtgaatagattttaaaagatgagtagaaatttgttaggttttcaatgcagaaaagcactcctggaagcaaacagggagctgtgaaacagcatggcatgttaaggaaaattgcaagtagtgaggtatagatggtaaatatgagaggtacaggttacaacaatacggatgggaatgaggggttaatgcttacnnnnnnnnnnnnnnnnnnnnnnnnnnnnnnnnnnnnnnnnnnnnnnnnnnnnnnnnnnnnnnnnnnnnnnnnnnnnnnnnnnnnnnnnccctcaatccacggggtggtcttccctcaaccggcctctccggacggcgtcccgcctcactcgcgcgcgt

SEQ ID NO: 442632 - DNA, 674 bp, Homo Sapiens
  misc_feature (503)..(503): n is a, c, g, or t
aagtgagtcttgaggagtggtaggcataaattctgcattctgtttttgtcacaataatatttgttggctactaggaatctaaatggagaagtaaagttggcagacggtcatacaagctgtagcccagaaaacagatataagatgaaattaagaaactatcatagaatattgtattaagaacttattgtaggccaggcactgtcctgattactggaaataaaatggtgaagatacatatgtgataggcagaattcttggctaccaaggtccctgctccctgatgtgtaatatcctcttcttgagtatgggtgggacctgtctatatgatgaatatagctcccataattaggatatgctatggagcagtggtccccaacctttttggcaccagagactggtttcatggaagacaatttttccatggattgggggtgggggatggtttggggatgaaaccgtttcactttaaatcaatcataggagcatgcaaccctagatccctnaccctgggccgttcacaataggggtcatgcgctcctatgagaactctatggcacctgttatctgacaggaagcgaacctaaggggtaggtaattttcctctaacactggttaccttcggtgtgtggtgattccgggctatggccgtggggaaccctgtttttaccttggtg

SEQ ID NO: 442633 - DNA, 621 bp, Homo Sapiens
  misc_feature (384)..(384): n is a, c, g, or t
  misc_feature (508)..(508): n is a, c, g, or t
gcacgagagagagtgaaagatactttggtgtggctcgatttttattatttttagccttatgatgatcctttaatttcatcctaacctgcttcattttactttagtaagaatcatcatatgatataaagagtaatgatgaaaagtaggtttctcaaacaaaatagaccatttctaatccctgacaatactatctccagacaggcatcaagtaaactaagcaactcttctatttttcaggatctagttctgaattatttgatttcttttatgttcgtttccttctaattatttgtgtccaatttcttgtcatctcatttatggcacatccctctcagatcactgggttgtcattccaggggaagtgagtactattatcccccattntacagatgaggatactgaatgtgaatcattagttcgttcaggatagctctactattaagtggtagaggcagaactgtctgggttgagaggccaagcatttaacttgaccctaggcacactgtangatcacattaaccccattttggagcttgcaggctagtcttattatttaaaccaaattaattattgattagatgagatgatcaccatctagatatatggttattgagatttttt

SEQ ID NO: 442634 - DNA, 547 bp, Homo Sapiens
  misc_feature (58)..(58): n is a, c, g, or t
  misc_feature (87)..(88): n is a, c, g, or t
  misc_feature (131)..(131): n is a, c, g, or t
  misc_feature (153)..(153): n is a, c, g, or t
  misc_feature (207)..(208): n is a, c, g, or t
  misc_feature (268)..(268): n is a, c, g, or t
  misc_feature (339)..(339): n is a, c, g, or t
ccaccagcccagagaaaccaaaaagggtcctgaaaagatgttgcccacagcatgtccngcccacatataagaggggtacgtgcttannttcataggaagtaataaaattaatcaaaatactacataagtcnacaatgaggtaaacttcaggancttgttaagtatttacttttgtgcaaggaagttttctgagatgcagtgagtatnnaactcttgtttcacacgcttttccttttgaaactgctctttcctgtagtaactacttcanagctaataaaagcaaactccaaaacgcaaaatgtagactaaagtatactttatatcttccgattgtatttntgtttctatgtaaattgtatctcaacaatatccacaagaacatatataaataactataaaactatagtaaataataataagccaatataatcttggttttaaaataaatcatcaacattctttagattatcaattgggtttatattattgtattggtatgttaatgatttacaacttattatttttctacacactgacataattatag

SEQ ID NO: 442635 - DNA, 585 bp, Homo Sapiens
tgtcatcaccaactcacatgctgaacatttgactagtttatttattatctgtttcactctactagcatgagggctacatgaggaaagggactttgtttatgtcattcactgctgtagccaagtgtctacaatgtgtaaggtcatggaagctgtctctgttttggtttgtaattttaattttgggaagcagaagatatctgagtggactcagtggctgacagggggagaacagtcttggtgtgcacaagagtgacaaggagacctagacagagagatgtcagaggacagttcctggaagaggctgacggaaaggtggggcaactgggaagggtctcttttgaaatcaattcctttgaagcttgcaagggagggaggaagtgcattggttgagaggaatggcctgaagaagaccttcttggctttccatatttttaaggaagggacaggtggaggggctttcttgggaagagagggcacgagggtgaggaaatgtaggcttgttgatgggggggcctggaagcagtggccccaaggttgggggtgaggtggcatactggaggctgcacccctggctgccccttgccg

SEQ ID NO: 442636 - DNA, 668 bp, Homo Sapiens
  misc_feature (37)..(38): n is a, c, g, or t
  misc_feature (167)..(233): n is a, c, g, or t
  misc_feature (308)..(357): n is a, c, g, or t
  misc_feature (381)..(419): n is a, c, g, or t
aatgggcatggctgtgccaataaagctctaacaaaanncaggtatgcggtcgggcgcagtggctcatgcctgtagttcaagctactcaggaggctgagcaaggtggatggcttgaactcaggagtttgaaaccagcttgagcaacatggtgaaatgctgtcattacnnnnnnnnnnnnnnnnnnnnnnnnnnnnnnnnnnnnnnnnnnnnnnnnnnnnnnnnnnnnnnnnnnntagccagatgtggttgtgtgaaactgtagtcccagctactcaggaggctgaggtgggagaattacttgaacccannnnnnnnnnnnnnnnnnnnnnnnnnnnnnnnnnnnnnnnnnnnnnnnnnattgacagggtggggcattgtctnnnnnnnnnnnnnnnnnnnnnnnnnnnnnnnnnnnnnnnggtatgaatgggatttggccccgtttgcagatccctgctctatagtactgcttatctcaaaactgttgttagcagaagaaaataagggaaatgaagtcatcctcagtgtcttcattctctcccaaaagtaacaggggaagggttatttagccttacatggtcatgggtatgtgcttaaatttagagggggatcttcccttcacaggtcaaataagctctttccctggcccacgaataggtctcccatac

SEQ ID NO: 442637 - DNA, 681 bp, Homo Sapiens
gacacgaccattcactcattccactggttgctattgcactgttctctgtggtcagccaccaccctgagcaagccaagcaaacaggaaattcctctccaggcttaggggatagcgtgggggaactcctgagcaggctgggctgagggcagccccccagggaaggcaagggctaggaagagggaggagtccctagagggcgaggtattggagggtggggctgtataaagctccccggcagcaggaatgctcaaagctctgggctcagcctccttccagggtagggtgtgattctgtcttcaccctcaagaggggtgttctgcacactgaggaatgaatgccttgctaagggtggacccttgggcttggagccagcagtacaatagctgtctggccgtctcctgtgggcagaatccagcctctgcccccactcccagagagacccaactccctccaaaaggctatggactcctgagcccccttgcaggagaggcagtgtgggttcaggctccctgacccccgccctgtccctgcccggtactttgtcagagactcggggtcccgccgtgccgagagtgtatttctgagctcttccatgcatatagtgttccttggttccctatcctcgtcccactgagaatgtccagtagcccctctgggagtcggggtgcagttctctctctc

SEQ ID NO: 442638 - DNA, 705 bp, Homo Sapiens
cggcaggaaccggacgagcacaagagaggggcatagcccaggtaatgggcggtcaaagtatgggagtagatgttaaaaaagggtgtgatagcgtccagacgctgaacgctctgtgcagcttgtatatattcccaagcgagcgaaaagctatcgaagtctctatgagccttcctcaatattgagaaaagtcttaagcttgctattaatatttccaaggcagatggcattagcaaaatgatggttgctctggacgaaattgtgtctgcccgaaaactcagatgttgaagccttaaccctcaatatgacggtatttggatgtgggccctttgggagataattaaggttgaatgaggtaatgagaatagggctgtcatgataggattagtggcttatgaagaaaaagaaggagtagaaggaagaattggagtaggagaagatatttctctgccttgcaaggacacggcaaaaaggcagaaatatataagccagaaaagagaggcaggaacagaattggccagcaccttgatcttggacttcgcaacctccagaactgtgagaaataaaggtctgttatttaagccagccagtctatggtattaacagttacagcaacccaagcagcctaatacaatgatcatggctaactactgggttgttaaagggttgacatgtactcgtgccgaattcctgcagaccgggggatcc

SEQ ID NO: 442639 - DNA, 618 bp, Homo Sapiens
gacaggacccacgtatccacactaacctataacatactgccccctaccctgtgtacaacacaaagacaaaggtatcctacagagaattcgtttcctgaaagactgtatttgagcggacagaaacagaactataccctgtggcaaagaaaacactaaaggttgaccagctgcactttccttgaaaacctcatgggataaaaaatcagtatactctgataaactcaactatgcacacaaacattattgcttccaaagtgcctttgcaaaaagggagagctttcacatttggggattttattgtgaaaactggtgtaagatatttgtctgtgctgtgatgctctgtattttcacatcattttttaaaataaaacaaagtgcaatgcaatttgcttccccagaaaattggagccccaaacagcctcaagattttgcctatgggagccaacctaccaattcgtttgattgtttagcacaacctgcaattcctacaggcaatttcacagttgcagggatttcaagtatgagagaattcaaacctgacctgacaatgaacaactacttcacttattttttattcaactctcagctcgtgccaattcctgcagcccgggggatcca

SEQ ID NO: 442640 - DNA, 677 bp, Homo Sapiens
  misc_feature (131)..(131): n is a, c, g, or t
  misc_feature (185)..(185): n is a, c, g, or t
aagggccgggcaccaggcctgaggcctaagagggcagcggtcggaaccctcggccaaaagcaaaggagagtccatccgagagaacacgtccgcggactgcaaaaagccccctttggctgctgcgtgaaggnaggctccggagagcgtggaatcagaggtgtgaaggcggggcaggggctgccagnggacggtggctgaggggactgagagcatggacaggctcctgagtgctgggtggtcccgcggaaagtgcctggggctctgcagggctctcaagagaccgcgtgcggcctgggggctgccatccgggatcagaaaatgtcccagaggagaggggggtgtgccaacacagagtgagccgtgcactggcttgggactgaaggaacttgaggtgccgatactcgtatgtggggatgccaagaaggtgtccattgggcttccaggacctgcccggctgtgcacttggtgctgggggctccaaacccaaacgagtaagacaaacgcttagcaacttggcaaaagtctattggagccttgaatgcgtggttacatccaccctgagcctcagtttccacggctataaaatggggtaatcgcaggggaggaagaaactacaggctgtgggtttggggatccctgatgtcccctttcttgcccaggacctgtggcatactgcc

SEQ ID NO: 442641 - DNA, 572 bp, Homo Sapiens
  misc_feature (282)..(360): n is a, c, g, or t
  misc_feature (371)..(510): n is a, c, g, or t
actagtggatcccccggtctgcaggaattcggcacgagaagacatctaaatagaaaaatgggcaaaatatataaacaggcagtgattttacagaagaatcatcaatatgaaaaggagctcaatctcaataatccttaattaagaataattaacataaccttaataataattaagctcaaccctcactaataaaagtggaaaggcaaatttacacacccatcaaacaggcaaaattttaaacatctgatcacatcaaatgtttcgcaaatgtcaagaggcagnnnnnnnnnnnnnnnnnnnnnnnnnnnnnnnnnnnnnnnnnnnnnnnnnnnnnnnnnnnnnnnnnnnnnnnnnnnnnnngaaactcttgnnnnnnnnnnnnnnnnnnnnnnnnnnnnnnnnnnnnnnnnnnnnnnnnnnnnnnnnnnnnnnnnnnnnnnnnnnnnnnnnnnnnnnnnnnnnnnnnnnnnnnnnnnnnnnnnnnnnnnnnnnnnnnnnnnnnnnnnnnnncagtgtataccacaactacataattcagtgaagacaaatctcagaaacatgttgaacctgca

SEQ ID NO: 442642 - DNA, 1779 bp, Homo Sapiens
  misc_feature (49)..(49): n is a, c, g, or t
  misc_feature (652)..(660): n is a, c, g, or t
aacacaaagtacggcaccaggattaaacactcctggctcttaaataaantgcatagtgaaataaatactgaacactgagttttaatactgtaatacatttcaatataaaataagaggtgaatgtgaaaatactgtattacatgttgaatacatttatctgaaaatgttataaaaaaacacacatgtaagctctgatttcagggaagaaaaattcatttttgtaattttccatagtttaagattttaccacagaacttattcatagttttagatgcaattaggttgcaaactttcaaagaaagggtgtaggtgtattaatgaaacagtcacttaaacactacattctaaaaccatctattctggatgaatggcaactttgagctatcaccctgtttcagatttagaacggtacctgccaagttcagatatgcaaaggaattgtccaattcttactaccccttataaaattcagactcactttctctgagtcagacttttctccgtcatattttctaggaagggcaaattccatcttttgtgaaatgggtcattaggctttatcatagggatgtttttcactgttgaaatcagataaaagaatcccaaataaatgatgctgctaaattaccaaactgctagagattaaaaaaannnnnnnnnaaaaagccaacactttgccaagcttgttataccttattatttcttgattctctttgagtaaaaagcccaaatgactgtatggaagagagatgaatggtagaggagagaggaaacacaggttctctaatgtactaaatcaggactttggcaaggaagttataaaaatataatatattcaaatcagtaacttcataatttattagacatcccatttattagaactctaagttcttttgcttttatataaatgaaacatttattctataaatagaaatgtatttttcagaattttctttgggttggtttcttggtagcatctcccagtaacacatgaataacatactgaaaccatgatacaatgtttaggtagatatacatatacatatgtggtcatgtgtttttaaaaaacaagtaatggtaattttaaacaaaaccatgtaaaatatctaagtggaaatattttttcccaactctatagctagatttaaaagtcccagtaaaattttgtaaacaaaatcatataagaaaaggcaaggctggctcttccctatggtcctttagtggagctatatttgcatagatcctagacaaatgatgcaaaacaaattccctccaatttccactagcaatctccctaattcgctcaacccttacataagcatcagatttagatttttagagttttgcccaccaactcaaatcggttcccttcttcttccatgtttctgatttgatatcttttcctgacttttttcccctcctaccaagccttcctagtctctcccagcctcaggagcttgctcagccagaaaggaacaaaggctgcttccatttcacaaggcagaagtccagctgacaagtggagtgcgtgagccagctggttctgagcccagaagtcccgacaggctttccatttgtttccaatggctttattccacatgactttagtaaaccgtactgaatcaatttctgaccttggtactttgaagcaacacttgtatacagatattaagggaagagggaagttaagggaggaaaatcgaaggtcaaactgtgtgtcaaacaaggtgctgggtcctaattttatttttagttgcctcttgaatcgcacaagccgct

SEQ ID NO: 442643 - DNA, 706 bp, Homo Sapiens
  misc_feature (453)..(453): n is a, c, g, or t
  misc_feature (480)..(480): n is a, c, g, or t
  misc_feature (565)..(566): n is a, c, g, or t
  misc_feature (576)..(576): n is a, c, g, or t
  misc_feature (615)..(616): n is a, c, g, or t
ggctgcaggtttttctatgtttagatatgtttaaatacacaaatatttatcattgtgttacagttgcctacagtattcaatacgataaatgctgtacaggtttgtagcctaggagcaataggcaatatcatatagcctaggtgtgtggtaggctatgccatctaggtttgtgtaagaacactcttgtacaacaacaacattgcttgatgcatttctcagaatatatccttgttattaagcaatgcataactgtatttggtaaaatacagagatattccacatattttattatgctattaagcatcgtttaaaataatttatgtcagttataacttgtttattctttcacatgaacattgaaatcattgagtttacttcttaagcatttcattggtatcttcatttaaattgccttatgtttatgttatcatactaataaacaggttttctttnttgggcctcagtgaagtttggtagttntcattatataagatgttttgcatttcttgttaggatgtttcttatgtattgcatgtttctgattattggtaaagatggaactttnnttctgtaaanttcttaagtggatactgttgagatctatgtatatctatnntctggatcgatgtcaatatctatatctatattgctgattttggatcttcttctttatctactgacttctactagtacatttttctttggt

SEQ ID NO: 442644 - DNA, 409 bp, Homo Sapiens
ttgaaaaccatttttaaaagctgtctaatacgtggggggagaaaactgtatagattaacaatataaatgataacttggaataaatgagaaatcaaagcaggcatatcacgaaactcattttggggttgtaaattctttgggcacaaaaccatactccatctttgtccatttgttgctgttctttcttttatgtgtatggtgttttatagcagaatctctttctgcctgccatctactgcggctggtccctaccctggggtgggtggaacaggttctagagaaagggaaatgactggggggctgggatggcaccccagaaggcatctgccccaggccttaaaattctctggattctagttattcacatgcttcttttctccattcttgtaggctgctagcaagtttaggc

SEQ ID NO: 442645 - DNA, 1141 bp, Homo Sapiens
  misc_feature (305)..(314): n is a, c, g, or t
  misc_feature (1086)..(1087): n is a, c, g, or t
ataagcccacagatttaatttattagcacttaaatatattcagattttattaccatcgtctatagaaatttaacactagccatctgtgcaactgtcctctgaggcagaggaacaccatacgcaaatattacacactaagaacagtaccacattcgacaagactctttcttgattcagtaaaccaagcttgacaaaccggccaacccaaggtgaatgattacagttatagggtacaggggaaattatcacctagtgaatattacaaacaatattaaaatgttacacagacttacaaaagttctgcnnnnnnnnnnccctaagactgtatgtatatgtgtgtgtgcgtacacaggttcacaatatggaaacctgtaccttacagcactcttgaggtttcagcaaagcatacattatagacatatttgccatacagtgcaattttattgtataagccatgaataatagtgcacttaaatccaagagtcacattcaaatattatcaagagaacaatccaaatacccggctattgaagaaatacacattctttgtttttataaactaagttctgcaagtacaacatttttttgtgtagatggtattagatcagtaaggttttaaacaatgagatttagggtgcattttgtagaataattcacctctccaaagataacgtgcattttaaaagtgaagcaaatgtcttggccagacaaacacaggcagtgttgtacaattcagttttattacaaatcacaaatatagttaatccttagacctgcagacggttaaagagaatggctctagaagtcagtaaactctcatcagaattactttgcaggacaatgtagtgtttacagtgagcctcattatcttccactaaattgggcacaaattactgttccacagtgtagttcaagagctggaacattaagtttcttaaaaaggatttagataacaggttcaggcattttaatatccagtcctagaatttcagagggtctcttctgggactattggtttaaaggaagatgctgtggacagtggattataaagaccaaatgaaggtagaagtaattttattcaagaannataaagaaaactgataccataagaaagttatagtatcagtatatattttatcat

SEQ ID NO: 442646 - DNA, 675 bp, Homo Sapiens
cacgagattattttaacataatgtaggagagatatagttttaaatccaaattgaggaagtgttatattatttcaacacttttggaattagtggtgtctcacaattaggaactgttctctgatttcagtaatctctaatatcatacatagcaacatctctgtgggtttcctctgatctctccaaatggggttctgttgaatcaggaatcagcctggagagtggtggctagaatgatctccagatctattgttatatactgggcaaagtcccttaaaccatggttaaatgaggcccttttagaccagatactcatattgagtccatcagactatgattaattacagactcatctatttgtgaagatttcattcagttttcttttaagcaaagttttgacataaacaagtactttaaatagggacacaagtataatagaaaaacatctgaacatctgaccatttaaatttacatgaagagggggtgatagatctattggtttttcctgcccttctgctgaatcaagaaattgctttgaatatctatattcttataacacttttctggattgagacaagtgctcgtattagcttacatataggttataagtccagaattcttgaaaactttgaatgcaaaggagtattatacattaccacgttctctgcattggatcgc

SEQ ID NO: 442647 - DNA, 296 bp, Homo Sapiens
aataatcacttttattgagctaatttatatatacctatttaatcctcagtggccctaggaagttgggtctgcatcaaatcttcttagatttgaccataatcaagctgccaactcctccttttctatgcctactatgtgccaagcttagtgctaggtattttactgacattgtctcatgtcatcttcagaaccaccttaggaattaaaagccagtatccttattttgctcaggaggcagaagagttactcagcagctcaatcaggggcagagttgggatgtgcccagtcctatccac

SEQ ID NO: 442648 - DNA, 721 bp, Homo Sapiens
  misc_feature (65)..(65): n is a, c, g, or t
aacaaaaggtctcctacatctcctagcaagaagcacccagtggatttctgcttgaggcatatatnttagattcgagatattttagatttaaattcaagtagaaattaattaggaacctatcagttattctaagatttaagctgacctcgattcaaattcaagctaatgattaacttaaataaaacacactgatgagtacattaaaaaaatagtaatagctagttaccaggtagacattaaggtataattgcaccttcaatgacaaatggtcaagaagtcttaattctacacatatctatatttaattaagaactttctaaatttttgaaccataattttgaaatcttactttgttctacaattgatgacttccaagataatcatttcatcccaatattttttctactttgagcaagtattccgcagttctgtattccctggaagctaatgaaatctctcaggagtgtagttttctatgatgactggtgttaatgtctggtattattttgtattactggcttcatgtatttgatcttatactttctgcaatggttaattccagccctatctatgatgtgtgaccaatgatggaccatttgattattggaaaacctacccagctattcatgtgattgtgacagtgaagcaagttcattttcacttaatctaatgagcaaacctcattggatcagaaagatttagttgacttgctatgctgcgc

SEQ ID NO: 442649 - DNA, 602 bp, Homo Sapiens
  misc_feature (182)..(190): n is a, c, g, or t
  misc_feature (420)..(466): n is a, c, g, or t
  misc_feature (469)..(469): n is a, c, g, or t
aaatattttactaaaaaagactcacttggaaaaataaaatctcattaacttaattatatctacatttttgtgtgtacatatacatatattgtatgtctaatgtaatcttaattcaaaatttttccctgagaattgtgctttgttctttcaaacagaacataattattttaccttggagccannnnnnnnnaaatggttggctttatctccaaacatcagtctctatatcaaaacatataatctgtcattatatacataagagaaaattacgtatgaaaataaacaaataagaaagaaataatttatccacacacacattttactcgaatgctgggttgagtaactagtatgaagatgacaattccctcagtacaaagggtggagcaggtgaaaaattttagcacatgtaccctaaaactnnnnnnnnnnnnnnnnnnnnnnnnnnnnnnnnnnnnnnnnnnnnnnncanacaaatttagcacaggctcactagagggtacctctacgattctatctccagcttcaaggtccattttgccagctgactatttccagacatgttgatggcccctcatacttttctggttagccactccctccct

SEQ ID NO: 442650 - DNA, 762 bp, Homo Sapiens
tattatacagcattgtcaagattatttgacaaaaggcagtaacaagccgaaggaaaacacatttacaagaagctgaacaacttgtatcagaacatacatcaaggtgaagagtttcggccctcttggtatagggtatgtatgtgtacatctccaattttgaacaatgatgacataaggactaatactctatttattcaggagaccccataatcaggataatagtaggcattcagagtaataaagtgatcacagttgaatgaacgtgttcaccaaaagtcttagaccaacctgatatcatcttacacttgaatataagttgtttccttatctatcctaattttttaaaaatctgaatgcacaagccctgtgatattagggatgtatattagtggcgttaagagtaaaaaataagcatgattcactaataaagagatcatatgctttccctcatgaatttgtcaattactaaaaacccatctattaatcactggagccattgattttccgctctctgctttcttacaatgaaaacatggaaccaaagtccacatctcagtcatgagatcttttcaataaaggtgttttaaaataatttttaaaggaaatgcagttcattcttggtgtggaactgactaaacttggcaatagaatatgatgaaatataagtaatacaagcctccaacattggaatggatgttaaattctgaacaaatgatgcaatggatatttaaagattctaagatgatttttggctgagaaatc

SEQ ID NO: 442651 - DNA, 709 bp, Homo Sapiens
gccaatgatgactttccatttacaaagaaatgaacaaattaaataacatctgagtatgcatgtttaacattctctgtatttattaaaacacaactaaagctaaatatcattttgatgaagtttatctgcattttttctttttctagtctgactgtggcttttctcttagactgtaacagtttttgcaaaagttccatcagaagatttaataaactcttcatgcatcttttggagagttctaatctataaggctgaaaagttaaaaagtaacgcattggattttgttcaacctgtttaacaaatttattggatgagtaaactcctccctaatcctctctccctaccactgtaatatctgttcagatcccaagtgtccgtaggacatattttagagcaaagtttgactgacattttagaagaatgttcgaccaagaattttcaattggaaagaagttgacgtgagtctgaagttgaacagtcttggtgctggggagcttcagatcagcctagcaaaaagactctcagaagaccgtttgtcttgtgaaaagggatttttagctacctacgtaaaacttcctctggaaagatcctgatttgcactctgtgatagaaaaaggcgtaggttttgggtgtcagaaagacctaattgattctacaaccaagctattaggtgaagtgaccatggaagatgtgtccttaccctcttctt

SEQ ID NO: 442652 - DNA, 737 bp, Homo Sapiens
  misc_feature (14)..(14): n is a, c, g, or t
  misc_feature (41)..(41): n is a, c, g, or t
  misc_feature (358)..(369): n is a, c, g, or t
taatggtttgtttnccggggttagaagccattccgaaaagncccagtttccgtccccagtgtagcaaaatgtagttccctcggttgtttttcctttaaatgctttataattttacactacctttttaatatacaaacctcattccttcattggataacttgaaggctttgatttcctttaaaaatttaaattttagtgtgtatattactttgacagttccctcatctttgagatgcactgatcactgtgcttgaaaaagacaatactgaagattgtactatgaagtttattgaataattttcataaattatttatccaaatgagagatttttagatttttgtattctgcttagttttnnnnnnnnnnnntagtagtttaaaagagaggctagtaagtttgatgctattcttgccaaacgaaactcagccaaaatctttaaagtaacaagagggaaaaggatgactaatcgttctgcttctgagtacattttccaaaacgttggaaagaaacttctgaattgaaatcttgaatgtattgaatctgtcaaggtacacagcggtgcctttgtaaatgttcattactttatttaatcaggtgataagatggtgtaatgtagcagagctttaagaatagaattcaattatcactttttgtgaacaaatgcggaaattagcaaatgattactagtataattaatttgcctaaaatgaaaggggatccgtctatgagatcgacc

SEQ ID NO: 442653 - DNA, 684 bp, Homo Sapiens
  misc_feature (97)..(97): n is a, c, g, or t
  misc_feature (111)..(111): n is a, c, g, or t
  misc_feature (197)..(197): n is a, c, g, or t
  misc_feature (457)..(484): n is a, c, g, or t
aaaaaagctcaagggagtctactagactccctagaatggggtgggcttgtcaagaaatttcacttggaccaaaccaaaaatagactttgctaattcnccagacatctttcntgtcaggttacacagtttcaaaaggtgctgagggcttcctaactttagagatgagagaagaggcactgcaccatggatctaacttntgtgaattctaatcagcaattcacaaaagtgagatcttacaattataaaacccggtctccaaattctaccttgctttccgatctttctgccaaggtctgagtcttagaaatattagcaaattcctgttcatggactgtcaatctgaaaagactgtcaactagtcagtttcatggaatgcataagaaattgcaaactggtagcaggcagcaacgtttgggtctgtagttttgttttgcttttcactggttgtccaacattnnnnnnnnnnnnnnnnnnnnnnnnnnnnctttggaggagcttacacaaaaatctgggtatctccctttgcttgaaaaatcaagtctgactgattcacagttcttcatgactcagctggcactaacagggggctgcctcttagactggacatggatcctccaactcattaactgcacatccggccccatcccctccattaagttacctgtctggccctgcaggcttctg

SEQ ID NO: 442654 - DNA, 722 bp, Homo Sapiens
  misc_feature (527)..(546): n is a, c, g, or t
cccgggctgcaggctttttgttattccagcgtttactgtaacatttcttgtatcaagaatgtagaatcgattgttcacatttattttcagaaaaggagatagagttgtaatgtacttacaagtttctaaccagtttttaaaagaccaaacaatactgaaaggtaaattaattgcaagcataggaggcaaaacattagttagaaaaattagtcaaaacaccctctcatttcaattcccaatgtgcaagagaaagaagcaaatcaaaatacccacatctcacatttaggttacagaaactattgcctaattattcaaataaacacctaacatttctttattctttgatgtggatattggtttctgtcctcaggtttgtttcctcacaattgattgctgcttttctaagaatctcattctcacaaaacatgcaaacacagaaataatggagactgttttcttttagacaccctttttaagatgaaagaaaacggttcccatgtacttccaaaacacttgctctcacgtgnnnnnnnnnnnnnnnnnnnngccataaattgttcacatgccctgttcctaaaccagtcaaaaatgaaggtaaaagaaactaccatgactgacctaagttaatcaagttcacctcttgtaggctggagggactttcattccctgcacttgaccccttttacaccactagggttctgttagcacctattggggatgcg

SEQ ID NO: 442655 - DNA, 634 bp, Homo Sapiens
  misc_feature (241)..(588): n is a, c, g, or t
cccatattttagagtatggtttaaatcaaaattggaataggagatgactcttctgagagcaatttggatatcattcagttctgaagtagaaagagtttgtgggatggaactagcagggatagaggaccactgcatgtggagcctgatgaagtccataaccattgggaagtggcgcgggcgggtgaggttatgaagcagtatcctaggggatggtgtttttcaagttagagataatgacccnnnnnnnnnnnnnnnnnnnnnnnnnnnnnnnnnnnnnnnnnnnnnnnnnnnnnnnnnnnnnnnnnnnnnnnnnnnnnnnnnnnnnnnnnnnnnnnnnnnnnnnnnnnnnnnnnnnnnnnnnnnnnnnnnnnnnnnnnnnnnnnnnnnnnnnnnnnnnnnnnnnnnnnnnnnnnnnnnnnnnnnnnnnnnnnnnnnnnnnnnnnnnnnnnnnnnnnnnnnnnnnnnnnnnnnnnnnnnnnnnnnnnnnnnnnnnnnnnnnnnnnnnnnnnnnnnnnnnnnnnnnnnnnnnnnnnnnnnnnnnnnnnnnnnnnnnnnnnnnnnnnnnnnnnnnnnnnnnnnnnnnnnnnngttttccatccatttttgccggcctggggggcaacccctgtccccg

SEQ ID NO: 442656 - DNA, 515 bp, Homo Sapiens
gacattcctccacactgagaagggtacagcatcacttctgcggtatttctgccacatgcaaaaacatgagacacccaggaggaggaggtgggaggcagacaggaagagagggaagaaaaagggataggtattggtggaggtttgatactaccacctccattaagatgttgatagtgaagacaggaagatgtggaggcagtacgtagattacaagattgtgaatcaacagaatttgaggatcagtatcagatgagaaacaatggattctgaagagagtagaaggaggtttaaggaagatacccagatttgtgggctgatgtacaagtggttgatcttgcctttgattaacaacaggataaattgtgagagacacagttttagggataattttcactaatttaagattctcaattcattcatactgcaatcccaagatgtagcatatccttagtgaagccttttattattttaatctgttgattaatcctctataatataatttagggtcaagtttt

SEQ ID NO: 442657 - DNA, 278 bp, Homo Sapiens
aaagaaatgcaagtgagaatagtggttttctctgagtagtgattaagtgtggaatgaggatggcactcgaatggttgataatgttctattattgttctgttgttgtgcttgcatggtgttcattttctgaaaaatcactgagcagtacattttaaaatatttcttatctatatttgttgtatttcacaatttaaaaaagatttttaaaacaaagttagtggttcttattgaacaaatacaagtggttttccaaagtaaatacttctctaaacttaaaa

SEQ ID NO: 442658 - DNA, 444 bp, Homo Sapiens
  misc_feature (16)..(16): n is a, c, g, or t
  misc_feature (160)..(160): n is a, c, g, or t
cctcatggcatgcatnagcattggtaataatagattaggtttactgtttgttctcatactgtaagctccatgaaggcaggggaatagtctgtttggttaatcatgtggtatctaatgtctagtaccatgtctactacatagtaggtgctcattaaatatntgttgaatgaaagaatatgctgtgagttactttccatgtaatagctcaaatgagcaggggctaaagcttagaaacttcagataaaagaattaggaaaggtccttaatacatgattatttttatctgctgtgttacataagggtcaaggactgggactaagacttaagttctctctaccttggtgtttagacataaagaaatttgctttatagacaagaatggtttccatagaggccaaatcaggagagacaatagggttcctgaggaataaatcgtcctgtgat

SEQ ID NO: 442659 - DNA, 125 bp, Homo Sapiens
aagaaaaatgaactggagtccaaaccagaagaaataatcagataaaagtatgataagtagataaaatgcagaaaagaacacaaaagtcatatgacatggtacatatcatgagcatatctagtcag

SEQ ID NO: 442660 - DNA, 703 bp, Homo Sapiens
  misc_feature (677)..(677): n is a, c, g, or t
  misc_feature (687)..(687): n is a, c, g, or t
cttcttgcctcacctaataatagtcacgagatcaagatgaaactaccagaactcagttgatctaaaaatagatagagtctcgtcaggccagctgttaagaaaatgagagtaaaggaatgctcagccagaactgaataattaaactctgcaatgatcatgaaatgtagaggactaagtcactggtctgagtggcaggcagttggacccgagcagggagacagggagtaaaactgaaagtgctatcaatatcaagaagagtcactcagaagcatagtattcaagttgacaggcaaaactttaaattttaaatagagtttctaggttggatacatgcaggaagtcagaaattcacataagctgttgtagaaggagagatagattcacatacaatggcagccatttttaggccttttactagaagctagaaaatgagaggggagattacaaacgagaaatcctaaaagaatgtagtaggggaacttgtagccaaacacctaaaacatctgatacaataattattacataattaaattatctaggaatttttataatagggtgttggaaagaaagggttataagacaagaatatatattttatttaatataataccctaattctggtccaataaagcaagtgaaaagtaaaataaaatgaatttactaccaaagtatttagntcctaagcanaatattacacattttt

SEQ ID NO: 442661 - DNA, 693 bp, Homo Sapiens
  misc_feature (519)..(519): n is a, c, g, or t
  misc_feature (522)..(522): n is a, c, g, or t
  misc_feature (610)..(610): n is a, c, g, or t
  misc_feature (676)..(676): n is a, c, g, or t
gaatatttaatgtaataagcattttacaagcattacctcccattattatttcaatcctctgaaataggaactctcattagttctgttttgtaaacaggaaggcctagcctcacagagttaagtaatttttccacagcggtattgctcgtcagaggtgaacagaacctgaactccagttttggaacatttagagaaaaataaaaaggagagtcaatatatttcttttttgtgggtttctttttaaaaagtgcaacttacttttgatctggaataatcatattgcattaaagtattttctcttcaagtctcaattaactacacccagtcaattataatcattgaaatatttagatgctgagttttaataatacaattcatggggtcatttatgacaatttatcatattcacttagcaatgacacaatttcacgggtgaaatcatgataccaggattggacaaaataaataaataaaaagatctggccatattttcactgctttgtgtttcctcctttgaanatnggtccccagcaattaagtattaagggccgatagacactggcaagaatgctcaaactcacttacattaaaataaatgtaattaaacttntgattaaaaaaatgatggttcatattagtaaaaaatttgagtcctaatggttgatatgttgggaantatatgtttggaaggtt

SEQ ID NO: 442662 - DNA, 716 bp, Homo Sapiens
  misc_feature (659)..(659): n is a, c, g, or t
cttaagacaaggcacaaatccttttttccattaatcaaaactttacagaggatataagcagtaattttatcattcattcaactggtttgcacagggagagggaggccagaagtctgactggtaagaacttttgcccttttcggggcatgtcaggcttctgggttcccttcccctgagctcatttaagctaagcagtttaaagtttggggatcttaacttttccccatttgaggatgcatctaagggaagtgtcctgtagtacaggacacaattacccatccacgaagagaagacagagttcgaggaaaaagaaggctttttttccccaaaggaatcccagtgattcaggaggcatttgagagaagtacagactgaagatgaatggctacccatctagaaagaggggaggcatccctaggtcctttctcttcctagcaaatacctggggtacgtgagggagagtaatggtgtcccattctttcttctgtccttatatccccgagtcctgggcaacctcgcagggtgccacccatgaatgccaatgcaacttttcacccatgttaacagggaggcctaatgggtgggaatatccacatttacctacacgcagactccctttcttgctcgtggtaacttttgagttccctataccttgcttngtcatagatactagattgactctatctatttgggagggggcctattgtcagcttgcc

SEQ ID NO: 442663 - DNA, 708 bp, Homo Sapiens
  misc_feature (665)..(665): n is a, c, g, or t
  misc_feature (677)..(677): n is a, c, g, or t
aagagattctacagactcagctgcaacaattgccagggctcctggtctgggatccagtggggttctgctgggaggctgctgaattctgttcatggtcactgaaagggcaccctggtggcctggcggcaggactgggcttctgcctacactcaagcccaggtgcttcctgccactctgcccagtgagactgccttgatccacagctgcggtaggagacgaggaccgtgactgtctccttccagtctggggtaccaggcagggcccagacaggagaccaggacccaggttcagcaggggaaatggttggaaatgttgaaaaggcatctgggggtggggaggccaaccagagaggagcagcagcaggaaactgtcacccctccggccccctaccagtggggttgctcccagggctggagaaacaaagggagggagcccagaacctggactgcccaagggagctggagccatgaagcagatggactcacagccagagctgccacccagatctggagatcaggaggaatacccagacttctcttcttactctgcccttcatcttccttcagactttcattgggtctaatcagaagccagttggcaagagggtctggagcatgtgatttgccctccaagatactgagcagaacacatgcaaggtacagatngtgacacaccanactgaccaggacacagaccttttcgggctgc

SEQ ID NO: 442664 - DNA, 750 bp, Homo Sapiens
agcccaatcggtgtaaacaagaaatgaaactcctggccttaagacatttgtggtatgctaataaggtgggtgagttgtctggagcttgacctaagcaaggcttggattcatgctgtagattggattcaagtacaggccaagtccttctgaggctcaggctaaagggcagcatcttcctagggcatagtcgtctcatggtcaataccaagaagacaagagaaacatgtaatccctctcaagaatatggactagaacaggcatactgtcaatttcacctacattaaattagctaaagcaagtcgcatggccaaaaccaatatcagtgtgatgagaagtatggaaattagtgtggatgctgagagcagggtaggtatgtaaagaaccgcagcagtgcttacatccaccatagtcacccttccttttcttctcatggtcactgaaatgtcattggtttctgagtgtggcattaaaagaactgaatttttctacaaattaaaacaagattttacttttatgtctcattaaagttataatttcagaacatttttgctatgttaatcataaagatacagagacttgtatgattagagacatgggctcagtagagattgtgattactgtttataaatgattatggcaatatggatagtaatagccaacccaatttgagagagaaagacaaagttaaggttcatttattttttgaagacattatataaatatctcgtaacagaattcctgcagcccggg

SEQ ID NO: 442665 - DNA, 679 bp, Homo Sapiens
  misc_feature (247)..(259): n is a, c, g, or t
  misc_feature (550)..(551): n is a, c, g, or t
  misc_feature (553)..(554): n is a, c, g, or t
  misc_feature (595)..(595): n is a, c, g, or t
gtagaataagatacaactcttgtcctgatctaactttgtagatgcactgccaacttaactgtatagaaattgtattaacaaattctatctcttcgcagaagaatcactgccatttctaaaacaaatttagaatatttccagaagtatcatcctaataaccccacgtaataataaaataataatcccaggtaatcattttttacagtgttcaaaaatcatttttactacttgtaggtgttttcttgtnnnnnnnnnnnnntttttaaggtgatttttacccttgaattttggagctaatagccatctgagttttctaattgcaaagtgacaagtctattcaatatctgtaaatagaaattaatattttcaggaaagcaaccctgatttttttattaaagcatcttttatcatttacagttaatttcagctataaaagtgtgaccccaatgaactatagcagttccaaaataattgttgtaggtggtactttagagagaaagagagaagggaaaagaatactactttcttataggaatacccttatagaatnntnntgtgaatcgcttttcaatcacattaagctgcacattatatngtagtcataagtgaggaagtagactaaatggaagatctacattttacaaacataaagctattctttaaatctatttctccgctt

SEQ ID NO: 442666 - DNA, 185 bp, Homo Sapiens
gacttcctgttaactgtatttgggaaattgtttaaggcaggatgcttgcttgtgagaggtctcctcttgtgttgactctgagatgccagagtcacgttgcttcgtgacaccaatttgaactggggttcactgttggcaccccatggctgccccaggtcagaaaaggaaaggccaagattccccta

SEQ ID NO: 442667 - DNA, 553 bp, Homo Sapiens
  misc_feature (298)..(298): n is a, c, g, or t
  misc_feature (330)..(330): n is a, c, g, or t
  misc_feature (413)..(413): n is a, c, g, or t
  misc_feature (451)..(451): n is a, c, g, or t
ttaaaaaaagataactgtgaaagacaaattataaattttttgtcagttttatgatgtaaataaaagtaaaatgtatgaaagcaaggatagcaggttgatatgaaagtataccattgtaaaatttttataaataaaataatagtatttaaggtagactgtgttaatttaagatgtatattataaactctagcacaatctctaaaacaatacaaagatgtatagtcagtaaatgcaataggggacataaaatgaaacccaaaatgtaatcaataaattctgaatgacaagagaaggaggnggggccctgaaaacaaatttcaaggaaattangaaattatatgaatgggattaaaaataagacacagcatagtgaaaattgcgaaatgcagcttaaagtgtgttagaaggaaatntttagcttaagtgctacattagaaaagaaagggagttnaattgataatctaaaccttcaccttaagaagcttgcaaaagagtgaattagacccaaagtaggtaaagggaagaaaatgtccaggattggaaacggttttca

SEQ ID NO: 442668 - DNA, 168 bp, Homo Sapiens
aataactcttaatgaattttttctggaaaaagaccgttagataaaatatgtatgctagtggacaaggtttagactctaacatgaagaaatcaataaatgaccttcttatacaaaacactaagcataatttaaattctattaaggacacaatcttgcatcatcatatgc

SEQ ID NO: 442669 - DNA, 351 bp, Homo Sapiens
cgaaaataaataaatactaatggccccaaaccttaataaaataacccaatctagggtataatcaaaagacttatccaaaccaatgaaaaaattattacttatttcaattgtatagagaatcacagattccaataaacaactactgtatactcatgacccaggatagatcttactgcattcccacacttgtctcatattccacctacagcctccctcaacttttgagaaaataaaatattacaggttataagtgaagcactatattctccctctttcatcccactccttcctcttaccctagcaaatagcaccatgatttggtatatatcattcctatgtttttatattttg

SEQ ID NO: 442670 - DNA, 670 bp, Homo Sapiens
  misc_feature (439)..(439): n is a, c, g, or t
  misc_feature (528)..(529): n is a, c, g, or t
caggcagttagggacacagcagtgaactaaataggcaacaatccttgcctttgtggcactgacattgcagagggggcaggcagacaatgaatgagcagacaggtaatagcagtggtatattagatggtggtatgtgatggagaaaaacgtagcaagaaaggggctgagggagtacaggatggctgtcagagaaggcccgtggagaagatgacatttaaagcatatgatagagccagaactgcatcgatctggggcaggagcatttcgtgcccagggtacagaaggcacacaggccctgtggggaagctgtcaggtgtattctaggagcttcagggaggctgctggtgtggctggagcccggtgaaatgggcagagtgtgctgaggatgaggtcagagaggagcaaaccctttgagccttacaggccatgccctgaactntgggctttacttgaagtgacgatgagcctctggagatgaacagaagctggacaggatctggcttaagtagatcatgcatgtgggactanngtgatgaaagctctaaggtactggtgagacatagcacttaataaatgtaactggcggtatattaaacttattaaacccatatgggaggggatccctgggtagtggttccctggatggatgtacactcagcttcaccgtttt

SEQ ID NO: 442671 - DNA, 610 bp, Homo Sapiens
  misc_feature (505)..(505): n is a, c, g, or t
  misc_feature (516)..(516): n is a, c, g, or t
  misc_feature (522)..(522): n is a, c, g, or t
  misc_feature (528)..(528): n is a, c, g, or t
  misc_feature (541)..(541): n is a, c, g, or t
ggaaaagtaagaaaaggatttacagtaactatactaaaactatatataaatgtataaactacattttaatgaatctatacgaagaataaaatttctaagaagaaagcaactgaaaagaaaatttttatttacctcattcttttttaaatgaaagaaacagcctgggggtaaagattctgttgacagacaatcatgctggccccagatttcaggacctttgtaacaggtctctatactaaattacctctattgaactaccttgtgagggctctatttttctgactggatgctgattaacggtagtatttttcttctaagtagtactcctgaatagcaaaaattagatgtgcaaaatcattctacatattgcataccgagcacttttctctctctgtcttctgtgtgttcaagcatagtcagcacactcctttgtgcaacgtgtgcccctctcatcttccaccagctatcctcagccagaaaccaggtggctctggccatgagtaanatctggatggngatcanaaaggngtttaaatccttnttttgggatatcagaatccaaagatatggaagcagaaatctgctatatggtttattgccgtcgtttccg

SEQ ID NO: 442672 - DNA, 441 bp, Homo Sapiens
agaaattaaaattacaaatatacagaacatacataatgagattctatttggttcacattttaacattacctttctacaccatctgcctctggattttcaataagacatcttttggtttgtaaatcttcgtctttgccaaaagacagtttctagaggttcagaaagttgtcacactaatacagtcacaaaatgaagcagcatggagcagcttaggaggacacaggagagtgggtgttttattacatttccgtgccagatcattgtttctaggaggtaattcataaatttttaattcttctagtgttcttgagcaatgtaaaaaggaccactcctcacccagttcaacctcttttatcacagtagttgcaacaattttattatgcaagattggttattctattatcttgatgcttatttaatagcgcatttttgcccttctct

SEQ ID NO: 442673 - DNA, 721 bp, Homo Sapiens
gggtttttaaagtaaatccttctctgtttctttacgtaataagattaacttgaagccaagcagggtcacctaggctagttgctccaccgccctgttcccaatgcttgccttggtgaataggacacagaggacatggctgtgatgcaacttacaccagcctcctatggggaaggagagcctgctcctggaggagctctcaaagtgcacgctgagatctgctgtgtcccacacaaaatctgaactgaactgcagggtgccaacgaatgattctgtttacatcgtttttctgggggaactcaaaagacgtgcatacattttgtcgacccattcagtatctctgtcaaggtaagaaacaggaaatactatttttccaaaagatagaatcatagaatttaaaatctggaagaactctcagggatagacgctgtcacataaccctctgccactgcccaagattccaaagctggggcagagctgggacaactcataagcagcagacacggctacctgtcctcttacctgcctctgtgtcagctgcactcatggaaggaggaggtctcaaaggctatcccagagactgcttcatgcccaggattccacactattcatttttaacaatcctcattatttttgatccgggagacgccctcaatcaggaacttacatgttcacactgcacgccatctgattctcttcaagtggggccagaggcccggcgcct

SEQ ID NO: 442674 - DNA, 642 bp, Homo Sapiens
gggaaactagatgtttctgccttttgaacggggtagggtggtttacctggttttatggccaggaatagtatctattatgtttgcttttaaataggcatgatgtggaaataccatcctggtttgagaggcatttgaggattttaatttatggaaagcacaacatatgcaattatatttattgaatacctagatgcagtatagatatttaaattgttaaaactttatgaaaacttgaaaaacattgttcaggttcataaatagctttagtgatgcctcccctctttaaatacctgtcacaccgtatgaatatggtgagatcagactccctaagactcttttcaggttcatttttataatgtttactttttagggcagaacagtagctgaattaaagtaatatccagttcttactgattgagacagagtggaaagaaagacatcattgtacatcactgtcattccaagggtacagtgtaactctggatgggtgaataacttacctatcactacaacacttataaatgagaatttctcagaatttcattctaggcaagttccactcaacaccagatcaagcaattctatctatttacactattagcctagttttctcatacagtcatcacaagcatagggatcttc

SEQ ID NO: 442675 - DNA, 630 bp, Homo Sapiens
  misc_feature (383)..(498): n is a, c, g, or t
  misc_feature (587)..(587): n is a, c, g, or t
  misc_feature (595)..(595): n is a, c, g, or t
ccaggtggcacttctagtggagccaactggtgagcacgggcccacagtgggtgtgaggcgggacaacgggggcacacttccctcctgcgtgtgtacctcacactgtgctaggatgattatggttctggcatacaaagtcacttatttttcatgcaacctggtccctaaacttaagaaaatgcctttatctggtaatcaactgggaaaaacattggctgaaccccatactttcaagtacttatgagattttcaaaggtggttcttacacactaacttaagagtccccagatggtgagtcccagctgcgccacttcataactaaatgatcttaagtagctaatgacttaaccttgtagagcttccattctcatgggcaaatgaannnnnnnnnnnnnnnnnnnnnnnnnnnnnnnnnnnnnnnnnnnnnnnnnnnnnnnnnnnnnnnnnnnnnnnnnnnnnnnnnnnnnnnnnnnnnnnnnnnnnnnnnnnnnnnnnnnntttagtggtggtaatagcactgcttttctttggcatttgctgtgtagctaatctgggcattccaccaggttgctgaagcaatagacggnccctttanatagcttccagacagcatgtcatttctggatgctt

SEQ ID NO: 442676 - DNA, 892 bp, Homo Sapiens
gggtgaatttccatgtttttctagaaactttcatccacatgtttcatagttttgtctttcccattccaaaaacacagcagctcctttccctgaagaagaatattgttccaggatcacctttcttttgcagaattttcccacaccccatcacccaaaatatttgctgcatctctaggcaagcttgttacttcaacatatccgtgggaggccagatcttgagacagatttcccagatgatactcatctgccgttgcaaatgctgtgcagtgcattaggtcctcgttcacagacagaactggaaggttggtcctggatggctgtctggtcctggatgcttttagtggtctcttcacctgtgggaagtcttgttttggaacaaatgtttccgttgatacagatgagaaatgcctctttaatatttttataaaccatttagaacccaacagatttggtttgtgggtcactctcctgtgagtaccaaaggatttcatggttggaaggtgtgccttttcatcttggcaacgagcagcatttaatggagacagcatgctggtatctgactttttttggttcatttccaggatctgagacttattcaaaccactagctgttttatcaggaaggaacaaatccaagctttgacgtattgtcagtgtgctgcatgttgtattttcaaattccttaagtggttttaacattagatgaccgattcttcggcactgatgtgcttttgataatatatgatgagatctggccacggctctgaggagtgtggctggcattaccacatcccaagctctccgccggaagagaagaaggaagcgccagggacgcacgcttcctcggcaggagtgcagggaaagagccgcacccccagcctctcactactgca

SEQ ID NO: 442677 - DNA, 396 bp, Homo Sapiens
ctggaggctgtgaaggctaaagttgaggggatgaatctggtgagggccttcttgctggtggtctcaaagctgtgcagagcatctcatggtgaggggcctgatggtgcttgctgaggtctctcttcctcttataaagtcaccagttcactcccatgataacccattattccaataattcatgaatgaattaatccattcatgagggcagagccctcatgacccaatagcttcttaaaggccttgtctctcaatactgctatattgggggttaaatttcaacataagttttgaaggggacaaacatttaagacattgcatatgtcatacgattaaagtatgccttagagtgtgggatttgaatgttatttatcctctctgagagaagcagaggtgttc

SEQ ID NO: 442678 - DNA, 690 bp, Homo Sapiens
taaaaatgttcattcataagcaaatgcatatatgttatgctctttctccatattttaatcccttatacagctgttgcctcactttcatattcctttgttgtaatgctgccagcattctccttcctccctcctcattaagaagaatgaattgaacaagctacatggagagatttacactgcaagggctgtcagagggaattccaacacaatgatttacttcggtatcaaattcaaaacgaggatcagaaatcctgcattatcatctataatgaatctatttcatcaactaatttaaaatcatgcataattcattacgtgcattattcatttatatttagcatgtatttccctagatgtggtctctatgctaactttgcctcactattttttctgcataaaatgattatacgtttctttattggtgaaaacagaatgactttttgtcaaattgggtcactaattttcctatataacacaataatacttcctgccttttattttcaaaaccttttcctttacatttgcattttatccttctagtaatcatgtttttatcaatcttgtgttattttattttaaaagtaggtaatccatcattccaaaggattgagaaggttgctcaaattaaatgtaactgtacgattgaacttagaactactcctggttttcaagtctccaatttgttggcct

SEQ ID NO: 442679 - DNA, 724 bp, Homo Sapiens
  misc_feature (326)..(358): n is a, c, g, or t
  misc_feature (689)..(689): n is a, c, g, or t
ccccgggctgcaggattcggcacgaggaaagttcaaaaatgtgacagataagaatttaatttactgataaaaagtaaaatagtataaaaaaagcattttgattaatactaagatagagaaaatttgactgaaaatttttggcagataataacatttttaaacgaacactttatctctttgattaaagttagcatcaggtgtaaaaaaactatcatctttttactgttattttaattatagtttattgggggactataaaatggtacattatttattttaaatactttttcttatttcagtcagatttagttaggataatgtactannnnnnnnnnnnnnnnnnnnnnnnnnnnnnnnncaaaaaataaaataatagcatgcagtaatagtaattatttgaaataaggtaatatgcaatagtaaatttgcagcaatttggaattatatgtgtttttcatgtttaattttgtttaaaaatcatcatagatacagttttatgggaaatatgcaaagaaaatatcttcagttgataaaaactaagttgataatcatgaaaaatatctgcctctgggtgaattacattactttaaagtgctactgttcgttgcatcttaatcttggttcctcttaaaccttaccttataaaggacaccttctcccgacgtaaagctaatccgcttatcggtcgnctcttcagcacgtccatctcgttttccctcggctt

SEQ ID NO: 442680 - DNA, 689 bp, Homo Sapiens
  misc_feature (343)..(387): n is a, c, g, or t
  misc_feature (411)..(565): n is a, c, g, or t
  misc_feature (613)..(613): n is a, c, g, or t
  misc_feature (634)..(634): n is a, c, g, or t
  misc_feature (650)..(650): n is a, c, g, or t
caggtttcttgcctctcaccctgtgctgggccccgtgctccagaacagctcatcggcgctttgcccacatcttctgctggcagagtctccccgattccatcttccacagccctctcaaacatgtgctttcttctccaaccccagatcagtcatcaccctctctctgtcccagatcaaaaacagcctcttaacttgttccctcttgccagccttgcctgtcctgcttatgctccacactgcacccaaaattaccttttcctctgatcatgtcactcccctgcttgccagccttcaacatcacccattgccctccagattcattatcagagcccaatcatcaagnnnnnnnnnnnnnnnnnnnnnnnnnnnnnnnnnnnnnnnnnnnnngagacagagtttcgctcctgtcannnnnnnnnnnnnnnnnnnnnnnnnnnnnnnnnnnnnnnnnnnnnnnnnnnnnnnnnnnnnnnnnnnnnnnnnnnnnnnnnnnnnnnnnnnnnnnnnnnnnnnnnnnnnnnnnnnnnnnnnnnnnnnnnnnnnnnnnnnnnnnnnnnnnnnnnnncacccatgtggccaggcctggttcgaactcctgacccaggtgatccancttgctaagctccgtgctggnatacagcatgagcatngcacctggccctttatatcttctctgggttccttctccc

SEQ ID NO: 442681 - DNA, 567 bp, Homo Sapiens
attttcttgaagaaataaaattcgctttgcaagatgataatcttgaatgccatggctaggtaattaaacaattaatataaactctgttctctttaatgaatatcttttttttgcctagtgcttcaactatagttttacagtgaaatgaatgcttaaaaattatatattttaatcttctatgttctgtatagatctgtttgccaactaacgtggggatttggtaattacaaaatattgtaactggaagggcattaaaaatccaacaccttcattcaggtccgataggagtgggtggtagagatgggagtagaaccagacagcctttaattcatttgcctctactttgtggcatgtgatagggacatttgatttactgggacataggtttgatgttgatcatagatgagtatcctttaaaaaacctttaaaaacttcaacaaagtgatttttttccaacacttccatccagaaggtattgcatatctcagctgactctcatataaaattattggtttggacattcatccctaacaacctttgcatttataatattcaatataatactgc

SEQ ID NO: 442682 - DNA, 435 bp, Homo Sapiens
gatcccccgggctgcaggtttgattttctaccattttattttagtgtccctagatttgctttgttttcatatttatattgaggagtttacagagcttcttgaatctgtgggttgaaacatagctgcttttgaaattctcggcctgtatttcatcagacatttttcttctgtctcaatttctctgcaactccacttgcgggtatgtttgacctctgctatgtctttacatctcatacgctcttctataattttctccctatttgtgttccaatctgctctttattaccgacctaatttcccgttcaatgtttctcactggtagtatttacacctgattttttcaatttcaggtatactataatatttgcaatcttttcttctattttcttatatttattaacaggttatttttctttgatcattacgatgtcttgt

SEQ ID NO: 442683 - DNA, 697 bp, Homo Sapiens
  misc_feature (60)..(60): n is a, c, g, or t
  misc_feature (68)..(68): n is a, c, g, or t
  misc_feature (143)..(143): n is a, c, g, or t
aaaaaacgtgacagcacacagagagcatactttctactgcaatccctcaaatagtgagcnaatcctcncaacctcaagtggtgctaggagagatttcacttcaaaggctcagtgtgagtgtgagaatgaacttgtggcaacanaaataatgaccactattgtcctattcagaatggaaaatagtctagtggttagagcatgcagtcatgaattgcctgttctcagtcatttcagtttcatgctgggtgtcctcaatccaacctaaattgccccctttaacaataattcttctattcattataattgaacacatgttcttcaaaacgcggtatattgaaggcataggctaaactttatgatggccacacaaatgaatcaagaaaaaagcttgaagccaaagaatttggcattcatgcagggaaacgacaaatgtatgtaaatatctacatcagaagagagaatgcctggagatgtgctctgaaaattaaataggggtgaggttaacaagtggtggagataggacaagggcagagggaagaaagggaagtggattttttatggagttcaattcgagttggattttgaagaatggtgggacctaaataaggacgtagagaggagaatgcagagtttcatttcaggaagagaaagaagcatgtacaaatatatagcagtgcaaagatgtaaacagtgaatg

SEQ ID NO: 442684 - DNA, 154 bp, Homo Sapiens
gaagatagttttaatactattgctaccatataaaaagagacagcagtcatttaaaaagatagttttcatttcatgtttaataattatctccttaattattatgtttttgtaaatatataaagttagtaagtatttgggaaacactatgagtttg

SEQ ID NO: 442685 - DNA, 667 bp, Homo Sapiens
  misc_feature (602)..(602): n is a, c, g, or t
attcattaaactgtactttagaatacacaatacacttttgagactttcaattttgccttgtaaagcagcattaagatttttctcctgtaatttgttcagtaaattttattaggtcttcctccgaccctcactagggagaagatgaagaacactcagtgagtaaagatacagagcagggaaggtgtcattgacaatagaagacaagttgatcattcagatagcaaaggactgggagcatgggttgtgattcatggagcctaaagcatgacagacagtatattttaagggagatagtgaaatttatggttcttgcacatgggatagatagttgccacctatggagcaccattggtattaggtgagagtgcccattttaaagtccagaatgccaagtcctgtgtaactagtcaaacgagagggttccctgatcccccttgcaagacgtgtgacaggggtgtggcttctctggccactgctgttgctcccccttatgggaaggggagcatgcagacagtcaggggcaggaaccgggatgagggcttttggactctggccccagggtagcatctaggggtgggtgcctgcagcttccgaagccccangcgggtattgctgcatactctcttagctctgcaatctgcagatggcttaagtgtccagctcgtgc

SEQ ID NO: 442686 - DNA, 638 bp, Homo Sapiens
  misc_feature (436)..(436): n is a, c, g, or t
  misc_feature (513)..(513): n is a, c, g, or t
gcaaaatgatcatcaggactctgcattgtttttcattaaagcatgagtctcaataactgactgcattacaggctgtccaccatttttaggggagtgcctagggctaagaatagtcattaggtacaactcagtgtgcagagtctccaacttttttgagcccattgacttagggccaggagcaataaccacaaaattgcttccctagctttctcagagcccatctgctggatttttcaattgactcactggatatcttggtatgtgaatcagaggataaagagactattgttccatgtcagaattgaaaagctcatgtaaataatacattagcattctagccgcatggtgtctgctggcactttctaagagatgattgattgacatgactggcagagtgccctgtgggatgttgagtctcttgcaattgatccagtangcctcccatcacccttccactgagagtgtcctgcaggctcactagtacctaccaaagtgttccttccagaaaggctntgtgcttcattgaccaccctgctctttgtgtagtttgttagaaacagaaatgccagtttttgagttggtctattaagataacatgcccaaactcgtacaattaacccttattcacttactagcat

SEQ ID NO: 442687 - DNA, 727 bp, Homo Sapiens
caccaagaggttggtgttttatcattcaggagaaatctcccgccaagatccattgacctctcaccaggccccaactccagcattggggattgcatttcaacatgaggtttgggaagagacaaatatctaagctatattatctgtcaaagaccagttatctatatttatatgagtctatttctgggctcccacttcttatccattgatatatttgtctattctttcaccgataccatcctgtcttgattactattgctttactctttgagcatttaaatattatatgcttgttatagtatttataaatgtttgtaatttcctattttgatttccttctttactctaagacttactgataaatatgtttttaaaactatacacatacaaattttagaggctttcacttgttaacttcttatatgttatttgcttctgcaattttttgagattttctgtgtagcttatttaatggtcagtttttgtggacacttcacaagaaaaatgacgcatcttaaaaaattattctattagaagcctactttttaaattatgattgataggcctttataaattcctttttttgtattgctttccaattctacttccttactggtaatgggaattgggtatccatctttcttgaatatttctagaaggtggtgataaccaattgcatactctctggccttgataggagttgattaaggatattttagccctgctggct

SEQ ID NO: 442688 - DNA, 755 bp, Homo Sapiens
  misc_feature (499)..(517): n is a, c, g, or t
tagaactagtggatcccccgggctgcaggttcactttgacactaaggcttaccaaggcaaaagcagacaaaataaaggtctttaagaacttaaatgacacggaaactttccaattgcacttcagaataatacattagtcttattgtgacaactagtccttctcatttctcactcacactttcttttttctctgcagcagaaaccacttttattaagtataaatccattctcagtttttgcagtattggccaattgaagggcatctcttcccccaaccaggacctggcccaggggctggcatgtagtggatacaatatgtttgtgtgaaatgaaagaattcaacatagcattcattttgatttactctagatcttttcattaagcattaacggtacaaatgtgagataattataaggaagagaaggtgaagggataccaaataagttttttaaagttatttgtttagataaagttggtctaataacatgaaactaacaannnnnnnnnnnnnnnnnnngagactgagtctcactgtatcgcccaggctggagtacagtggccagtcctagtggtacaatcttggctcacttgaacatctggcaccaggagtcaagtggatcttgtgcctaacctcccaagcagttgggattagagtgcccggccccacacccggtttaatttggatttttactagaacggggtttcatggtggccaggttggtccttcctgacccttaggatcacccacctcccct

SEQ ID NO: 442689 - DNA, 607 bp, Homo Sapiens
  misc_feature (540)..(540): n is a, c, g, or t
  misc_feature (571)..(571): n is a, c, g, or t
tttttatcttgtcaaaaataactcttcttcctcagtccatgtaagccatctaaaacttttctactcattccacagttgcctgaaaatgtgaagatcagaaatggactgaggcaaaagtgataatgaagacattctcataggcgttgggttccgagatcaattccttaaattttaaaagattcttgctatgatctcatctttaatccataatgtgctattcatttctctatttttccttgatgctccagaagtatattctttaacgtggctttacacaccaaagtagactagattttctgcctgttaatgatgatgggcttcttacttacagtatagtactgagttgtgtttcttattcccatcccgcaatgtgtgtatgtgtgtgtttcctgataatacaggtaaagcactgataaatgaagataaattgttggctttgttcccaagcttattgttctaggaccccaaactgtctccatcattaagaagcagcaggccacctaaggttgtgcatcaattagcaattaggtcacacattgngtggttgcaggcactcagccttttgccttgntcctcgcagcacactcaagcagggcaccagtattca

SEQ ID NO: 442690 - DNA, 744 bp, Homo Sapiens
gccccctggctttttcaagaccaaaatggagtttttgtttttctcttgacacaaaatcccacagattgggcagcccaagaaggttcttcttttactggggcgtgtggtaagactcaaagtcaaaagcctatggctgagcagccaactggtcttcattgagcctttgttttcacatctataaaatagggatagcaactacctcattgcactgaagtggaggctaagcgagcttcaaacaaaaagatcaaagtttggttaacttccaagcactgtgaaatgctagctcctagtactgacaggcaaaagatgtgtctttctttctcccattgggagttgccctgactgcgaatccccccgtatatgatagtgctcaagaacatttccaatatggtatagaatgtagtacttgtagccaaaatagagcacgctttactctgtaaaaccacaaatacaagtaaatttgagagcaagatgattcaggaggcgaagggatgagcaaacagttaaagatcattccctccgtttaatacatagatggtgtcaaagaagcaaaacagcctgttccattctggaagggccagtttttctttagctcaacaagagcatgtagttaggagcacaaccaaccaatgaagcaatccacaaacaaaacaaaaacgccatttagatggctgttacctgctacgcagctgtggttgtcttctctcgtgccgaatcctgcagcccgggggatccactagttct

SEQ ID NO: 442691 - DNA, 712 bp, Homo Sapiens
  misc_feature (658)..(666): n is a, c, g, or t
ggagatttcttggcttatttccttctgggcaggggagatttgaggaggcttatcattaataggaaggggatttatagggagtctaggatattggctgtaagctgagaggtcctcctgtgggatgtaaatttcaggctttgcatagttgtgtattttccttcaatgaaaagaaagcttggacataaggtatttcactccatttgccttccctcttacagaaaaggtcaagcttcaggatagtattgtaatttgtacttccctctggtggccatttttccccatcagagagagaatattggggcccggctgtagtgcagaaaaaaatgagctgcctctttttcagggtttgtgggtcaaattggtcccaatggcttaggatgcatttcaagggtgagcctgttgatgcctgagtgtttcccatctgaaagccaaaactgcccatggttttgggtttgttttgtttctccccctgcccgagaacctgcaacagtccctggaccctcctgatgggcttagttgaactcacgacgcaacagcagaaacactagttttctcccagacacaaggtggactgacgaaggttgatttagtggcccttaccaacaattcttgaaaaccttgacccttgttgtccttctagacacgtaggcttggcttnnnnnnnnncccgtacccaatttgccctatagggaggcgattacttcctggccgc

SEQ ID NO: 442692 - DNA, 665 bp, Homo Sapiens
  misc_feature (540)..(540): n is a, c, g, or t
  misc_feature (595)..(595): n is a, c, g, or t
  misc_feature (618)..(618): n is a, c, g, or t
  misc_feature (623)..(623): n is a, c, g, or t
  misc_feature (626)..(626): n is a, c, g, or t
  misc_feature (633)..(633): n is a, c, g, or t
  misc_feature (635)..(635): n is a, c, g, or t
ggtggggtcaaatgaaccagtgcaaggagagtgacatggacaaggagagtgtcctggcctgatcctgatggatgtcaatgacttccactgaagagtcttttatttgggcagagccttcagcctcagatgccaggtgctaatcacaagtgacagcataaccgtgtctatcaagatggccgtcttgagctggtgaagtcttgctattcttatggccccggagtcttctggtgaggactgaattgatagtaaagagtgtgcctggttatgtccttatctgattgattgctgtctctattgattaggcgaacatctgatcgctgttggtatgatgcctgttggtatgatgcattctgaaacataagatgagtctttttctaagatggagttacagatgtcaagggtgctctataaacagcaccattcagtccttcaacacttttcacaggtatatctataacctaccaatagacctcattgctaacaaatctctcccctgtccaatccatacctcagcctgaaagttctttctagaatactgantaatcatgccatttgtctgctttttggaggtagaacttctgagaatggatttcanagcttttgagcccaacctgattntcaanctnactcagntnatcactccttgcctaccattaccaacttcg

SEQ ID NO: 442693 - DNA, 705 bp, Homo Sapiens
  misc_feature (57)..(57): n is a, c, g, or t
agcactctgggcaggtgccttcaagggattgcctcggcatagtggacatggactggngggtggcttgctcattagacattcttaaagtgtccttgcaaaccacactgataaaaagccctactgggtgattggccggctccattttctgtcatctctgaaccaccaggttttgtttgtctgagggccatgactaaggctgcagcctttctctgatgttgcttttccttttgggcctgttcctcttggtccttattatagaacaccgaggttgccaggtttaagaattcttccagattttgttcagggcctagggctcgcttttggagctttctcctgatatctgcagctgattgggtaataaacttatcttttaggatcaattgaaccttgagtgagccaggtgacaggggagtatattttcttaaggcctcctatagctgctcaaggaaggcagaaggattttcttcctttccctgagttatggtggacatcattgaataattcatgggctttttcctaattctccttagtctttctagaaaacaggtcaacctgtgttttgactgcagtggccctgatctgagttgaggtcccagtggggatcctatactggagacagcttgctggccggtagggaatttttccctttctttggctgtcattctatcatttacttgactaagataccagctcgtgccgaattcc

SEQ ID NO: 442694 - DNA, 544 bp, Homo Sapiens
ttttttttaggttaaacttttttattatagtaatgtatcagagtaattgaaataacttcaccatacagatatcacatgctggagcatgacaatgcaacgctaattgcacactgtattgacatttcaagcatattttctgtaacaacatttgcattcatatacaggtagtaaagcacacggggataatgtgagtcatgattcatgttagcaaatgtattgctttcaagctaatcctcatacccagaatctgcagcaaaaccattaatattcagatgttgtagcatgtacagtagttattgtatgaactgaatagctcaggaccaagaattgctgttagcctttgaaagagaaatatcagtgttatttcattacttttgtaaggtaagccttattactaatttaggaactattgggtccattggattgtacctgtagataatacagcgcagttaatgtagaatgtgtaacttgagtaattttccctaatatacgatacatccctttatgacgaggtccaaaaagcaccaaaaaatggcctggtgcc

SEQ ID NO: 442695 - DNA, 687 bp, Homo Sapiens
  misc_feature (71)..(79): n is a, c, g, or t
  misc_feature (158)..(167): n is a, c, g, or t
  misc_feature (561)..(561): n is a, c, g, or t
  misc_feature (584)..(584): n is a, c, g, or t
gaagtttcctaaaggttacttttgcattagagaatttcgaagtacagattttaacttgtttctagtcctcnnnnnnnnnatttaagacacaaaactacacagctttgatttttaggggaaaaggatgataactttggactatatctcacaaggtgacnnnnnnnnnnctgttgtagttgatttctgagaattccagagtatcaggatgatgtagcaatttaaaaatagtaacacaaaattttatctctagtttttttcaaaaatctttttaaaactaaaatttgataagctagtactgagtagaatttggtgctcatcattcacacgtataaagtagatttcactcagaatttcacttacaccaacataacaattttacttttcctttttaaagcatagctataccttcagggatatgatggtatagtaggggtattctctcaaaagagaaaaggcagtcagaaaatctttggtcatgagattagacttgaatcttcagtgattcagtgattacttgatgcctctatgtgccaggcactatggcatcagtggccgtgattnattcttatcatgtacattgaggngttttagtgggttgtacttaatatgatctaatgtgtgatgagctactgagaatctaatgcatctatgctcattaatgaatagaatgggtacagactaggggag

SEQ ID NO: 442696 - DNA, 803 bp, Homo Sapiens
  misc_feature (476)..(541): n is a, c, g, or t
  misc_feature (736)..(736): n is a, c, g, or t
ctctaccttgtctccctaagtcccgattttctcaactattaaatggtaaccaccacgctccttgcagggtttgcctggtaagcagcaaatacacaagaaaagtcaagccaataaatagttgtgtggttaccactatcttccagttggagcaaggtccagaattaggttcaaacgtcatacagctaaggaagaaagcaagctaggcttcaagcccagttttgtctgactccaaaagtatgtccttcaccactcatctaccctatttactagacaacactaaaaactcgccatctcattttttaacctctgccttccacctccagtctggactggctcagagtccatgttctaaaatgtactttgatgtgaccaaacagaattcagttataagggggcagggaggaatgggtagagaattgtgtgccccttgaaattcacctgactgaaacatggattgaggagaagactttagatannnnnnnnnnnnnnnnnnnnnnnnnnnnnnnnnnnnnnnnnnnnnnnnnnnnnnnnnnnnnnnnnnctcagactgcctgtaacatgaaacagttgggaggtaacaaagatgaagtactgtacttaacaagctcaccattatagctgggacccagaatgcccagtgaccaatgaggccatctgccaccaagccaattatcatctgcccaatatatattcccatgtgtggcatacagaatattgcttgacggaaacacatganaatgggaacagggtaatcaagtacctgtgtcagcagtgaggtttacttttttagctatattcccttt

SEQ ID NO: 442697 - DNA, 471 bp, Homo Sapiens
  misc_feature (131)..(143): n is a, c, g, or t
aaatatgtagatacagtttttaatgtatcacaatgagcaacaaacatacttgatgaactatttccagaagaataagttcaaataccatctacaataaacatcatttcaactatgacaacaggtctgtgacnnnnnnnnnnnnngttttcaaaaccatgttatttaccgtaatacggtgcagtttgagacgttcaaacagttacagtaacaaaaactaatgagactactctcgtatatataaaacatcaataacatttttggtttagtttatttaaagttatagccataggggcttttattaaaacctcagggtgcatttcctatgtaacccaggcgttgagagtacatgttgtgtagacaatgattgcgctgtgataatccctttgatatccaggaaaaaacaattctcattctcaacctttggaggctgtccttttatttctcaccctaacaacgtccatccagttaaag

SEQ ID NO: 442698 - DNA, 735 bp, Homo Sapiens
  misc_feature (316)..(586): n is a, c, g, or t
  misc_feature (604)..(612): n is a, c, g, or t
gcacgaggcccatcctgttctataaagaaagatgtattcatgaacctaaccaagggagtctgagggagatgtagagaagcagagccattggaacatatgtaagcacgtgtgcccgtcttcagggaagggagccatttccccacttcttgagagaaaacagccctcctctagcaccacgaagggcttgatgatggtgccaaaggaagtggcagcagggcctggctgagaggggatgcccagcgggaaactccacagacacagcatatgctgtgcgctgccaacatacagagcactgcgctcgcaggatggtccatgnnnnnnnnnnnnnnnnnnnnnnnnnnnnnnnnnnnnnnnnnnnnnnnnnnnnnnnnnnnnnnnnnnnnnnnnnnnnnnnnnnnnnnnnnnnnnnnnnnnnnnnnnnnnnnnnnnnnnnnnnnnnnnnnnnnnnnnnnnnnnnnnnnnnnnnnnnnnnnnnnnnnnnnnnnnnnnnnnnnnnnnnnnnnnnnnnnnnnnnnnnnnnnnnnnnnnnnnnnnnnnnnnnnnnnnnnnnnnnnnnnnnnnnnnnnnnnnnnnnnnnnnnnnnnnnaacttaaaaggccagggnnnnnnnnnggggaatagagatggttccaaattgattgggcttgtgggtggttgttcacctctatgacaccaggaaccactggaggaaccgtgtcttttgaagggtggaatggcttggttccggtttatttt

SEQ ID NO: 442699 - DNA, 493 bp, Homo Sapiens
gtgaattcctggagagtctgggttatggaccaccctaaggaaggtgtagaaatatgggtaaagcgtgatgaaaatgttatttgaaaatgacatagtgtctcctccatcaaagaatggtatcaagtccattcagccctttgagggctttgtaacatttcataagggttgttaattccttacctttaaaatgtgcatcagtgtcattcctgaatagcccttaaaagagtcagggtttagatgcttccaaaatacagtaacactacttctcagctactctacagaatttggatactgaggtgacccaccatctttgagatttgctttagtgcctccctccaaaaacacaacagatggaacctgagtgagttaacctcaggttctaacctgagttagagctgagagtcaattgagagtgggcaggatggagattataatgaagctggaatagacacacatgagggagccctaactggatcccagtggagacaactaa

SEQ ID NO: 442700 - DNA, 671 bp, Homo Sapiens
  misc_feature (192)..(205): n is a, c, g, or t
  misc_feature (536)..(536): n is a, c, g, or t
  misc_feature (570)..(570): n is a, c, g, or t
  misc_feature (624)..(624): n is a, c, g, or t
tcccccgggctgcaggaattcggctgtaaatcctgaggaaaatgtatatcttttcctttaaagttctaattcaagacatggatgtgagagttctgaagggactttgggactgcggtaaaatttcgttgtcatagtaacagaaagggaaataggcctagctcacctgggactttaacactgcaaaagctggannnnnnnnnnnnnnaagggaaaggactctgcaagtgaaataaatgaaaaacttactgtattttgaaacaaattttcaaacattaactaggtgagttgctgaaaaggccacttctgccatttttcttggttaacgtagttgcctgatgaaagatgcccaattttaaaattgcacagataggccatttaagagagaatattggcttcaagaaatatatatgacaaatgctaacctcagaccatgattctgtgctttcatgtttctctgaataatctatacatgaactgagaggatattcacacttcttattaatcatactctggcatatacctgcacagatggactntgtctttggaagataacatatcattttctgattntgtcattagttgaatatatcaggccaccttcacgtatgagcatgggtgtctggngccagtggagagccacacagacgagacgccctgggttcttgggccgg

SEQ ID NO: 442701 - DNA, 781 bp, Homo Sapiens
agaggattgccccccccggagggaaaaaaccaaacctgtgaaggggcaaaccagtggaatccaggctaggagttttgtgtttttggggccctttggtttttatcccagttaagggaacgggcagggaatgggcttggacttttcttccggtaaaagtcacccagccttgggatggttgtttaaacaggttcaggcttaaagaccaaaagttgtggtactgcaaatctcccagtagaagtctgcccaagttacagagttaccaataagccattctctcccccctaaatatgtgtccaagtcttgcataagatgaggcgcattatacgtgagcagctcattgaacatctgctctttcacatcttgctttttctctgcccaaggaaaacatgacatgaaatcatccagagtgtccacaatagcatcaacatgacattgttccatttctgtgtttccagccaaatctgtgtttttggtcaaatatcttgctattgctaggctctggtgaagagtaagtccatcaacttccaaaatggggatttttccaaatgggagagttgatttgatttcaggccagtcagcttgttctattctgtggtcttcatactgtatgtccaaataagcaaatatgtaacgaataatttctgctctccccctcatattaaaataagtgagtttgtagtttggcatggtgcaattctgtgttatgtctctcgggagtctgcagtgtcttgtatccctgggtatgtgactgtgccttgggtttatatgacgagtaagtccc

SEQ ID NO: 442702 - DNA, 461 bp, Homo Sapiens
  misc_feature (15)..(15): n is a, c, g, or t
  misc_feature (115)..(116): n is a, c, g, or t
  misc_feature (133)..(133): n is a, c, g, or t
  misc_feature (140)..(140): n is a, c, g, or t
gggcgataaatcacncatgtcacagtcaagggaagtagaattgttgattcttcgcagatgagaaattattacacccattatagccacaaaccagtgaacatgtcttacgcacttnntgagactctttctactnggggtcntatgtattagtttaccatacatggactatttactttacacaagtactaagtcagataggtgctattgtgccttgaatttataaatgaggacacacaaggtaatctacaaagtcacacaattggtaagaagaactggaatttgaactcaatactccacttgtagaatccatgtttgggaaactgagcctcagagatgttgtacaatatgcacaaaattatctttcttgtcttgatttctgggtccagagtctagatatgtttaactatagtcttattcagttattggtgtttgttttgttgaggagacactcgtcatcctag

SEQ ID NO: 442703 - DNA, 707 bp, Homo Sapiens
  misc_feature (30)..(30): n is a, c, g, or t
  misc_feature (39)..(39): n is a, c, g, or t
  misc_feature (88)..(88): n is a, c, g, or t
  misc_feature (118)..(118): n is a, c, g, or t
  misc_feature (138)..(138): n is a, c, g, or t
  misc_feature (195)..(195): n is a, c, g, or t
ctgaacacctctgggaccgtctcactgatntgctagacnactggaaaggatcccactgcgccccatatggctgctgagaggtcagacnccagatcctctatgcgcaacttgattttcntctcttgaaacttttaagantgcgtttctgtttctattccctgagttctgagcttttaggacctccatcctgcctgngggtgtcttctcacaccagggccctttcaactgggaatcacatccatctgctcagtggctttgtcttggatgatctctttgtttatttctccctcattattcagatgctgaacctacaagatgactcctccaattctacctgattccagggctctcttccgcctccttgtgttcatctccaacattactgctatgccatttgcaatcattattgatcttcaagagtttctcaaatgctccctgtttcacagatgctattatattctcttactgcactgaggatattaggtacagtatctcctttggaaattcccttctgttccccaaattgtcttggtttctgcccggactatttagttctgcttgtttcatatctgcctttgagatgacagctttcctttaatgacaggtgattatcagctgcccatctccatcttctacttgaggcacttatgcaggggatggaaattgtgtatgggcggcctcgtgccgaatcctgcagcccgggggat

SEQ ID NO: 442704 - DNA, 703 bp, Homo Sapiens
  misc_feature (652)..(662): n is a, c, g, or t
ggctcggccccattattggaaaaggcaacattgcagctgctcttctgaaaatcaactgcagtgcttccagtgaatacctattggctgttttgtgatttttctgttcatggactgtgattatttgaaaatgttgcctcgttggcctccatgactgtacgatggctgtcaaagtgttctactggattgttctgcaacaaccacaaccattggtcacggggtgcttattatgtctcaggaatgaggccaactattttcaaaatataatctcatttaattattataacatttctataagataggtattattatgtccattttgtagatgaagacactgaagtacagggtagttaagtaaagggaccgtaatcgaataatcggcaagtaagtagcggaacttggtttggaacccaaagtgtctgtattcagaacctgtgttttgattcatttttctttggactttctgtaacgcatgctttcaaaatgctctttttcttttcttatatcctcataatccaaaaattataagacacatagaacttccactccttcaaaaaagctgtgaacactagagataggatgtattaaagtgttatcttaataaagagaatctgggtaatttttatacattgcagctttgttcttgtcggttggnnnnnnnnnnnaggacctttcatgtcccattttagggccttggtctcactgt

SEQ ID NO: 442705 - DNA, 696 bp, Homo Sapiens
cacgacgttcgtatacatggtgcgcttgaaagtctcagtatgcaacgaagctatcaaccagagttgaggacttactgtatatcatctatggtagtcatgttgtaatttgagtctcctctaacctagaaatgctccctttccgcccctgttattctatatctcatgacacatgtgtttgaagagtccagactagaagaagaaaagtgactcagaacaagcggcttccagcaggcaacccacaggctaggtacagatgtctgtgtttggtctgtattgaacatgaaaatttaaatttattgccagtgtttaacctaggagatttctggcaaacactgggctcacattccagtcagtgtgggtaacaacgtcagttgcaagccatcctttttagtatttgttagcttatacagtattcaacgcacgtggaactaaatacactttttggtgatactcaattatcttggtagtacagtcactctgatagaacataaaatcacatggaattatgcagtcataaaattattctcttttcaggtcttcagtctacatttctccagagagaaagtctctttttttaattgaacctggtattctttagtgacttcctaataattactgatctccctgacagggatgctggccccagattgagaccattgtttcattagaatttaatagtattattttctaaatcat

SEQ ID NO: 442706 - DNA, 703 bp, Homo Sapiens
  misc_feature (573)..(573): n is a, c, g, or t
  misc_feature (580)..(581): n is a, c, g, or t
  misc_feature (615)..(615): n is a, c, g, or t
  misc_feature (622)..(622): n is a, c, g, or t
ttcggcacgagaacattttatcattatgttaatactttactttgaaaggtatcattattttcaagacgtatcatttaactggtctactttatctagttacccacacctatgacttccataagtgaaatgtctttatcagtgaaaacaaaactagcctggataaatggggttggattggagacctaaaccaaaagctttttttgggctggccaggttgtgtcctggccacagtggccttcaagatcacctgggtgggaggtgaaatccagcctggtctttcctttaccaagttggttaccttggcacgggctgtattagcctggaggacaggctggcttttccaagtggttctgccataatggctgaaattttgtgatcattactgggtgaagcagaatggaattttttacctttgtagtgggcgttttatttattacaattaaaagagaaaatgatggcagataaaatggagagtatagcagaagctagaggtcatacagctcttaattgtaaagccaagaccctcagtggagggtctgtcaaggcacctcagtactaatagccacttgcggnctgtgcnntaactcccttacttgtcactacctcatagctaanggcatcnatactgctcttttcattgcttcacccagttcatgagtgacatggtatcagactgtgcttgagtcagacatgatgctagttg

SEQ ID NO: 442707 - DNA, 729 bp, Homo Sapiens
  misc_feature (17)..(17): n is a, c, g, or t
  misc_feature (36)..(36): n is a, c, g, or t
  misc_feature (38)..(38): n is a, c, g, or t
  misc_feature (41)..(41): n is a, c, g, or t
aggcccgggacccttcnttcatcaatcatgggtccntntanccctttaaggtctgcacttattcataaggaatatgtcccttaaccatttcctttaaagctgaagtaggcacaagcgaaagcatggcatggctcctgcttcaaggagcttacttgtctagcgggggaattgagacagggttacctgaatattccagtctagcaggatatgtcctccagtgggtcctggtgctatgccaaagaagcgggatcaaagggagagtaggaaatctgccccatcttaattgcaaagtatcagcagaagtcaggtgggcaaggaggtgggagaccaggaaggagtaggcataagaattggcaaccgtgaggatgagtgggaaacaaggctggagagggaagttggagcacatgattactttgagatattctcgtcacaccaaagccatgtccttaaaggctcctaaacaaggatgccatgatcaaacctgcctatttacaagatttccctggctagcatggaatgaacaggaaagaagcaagagaagatgtagctgacaggaggtggctacagtgattagtggagaaatgttggtggctttaagtagaagtagtcaaagagaaaaagtaaacagaattgagagctacccggagagtcacaggaacaggcccaggttggatgcaggagatgagagaggaaaaaagaaagtccagtcatgtggcccaggccctgcag

SEQ ID NO: 442708 - DNA, 698 bp, Homo Sapiens
  misc_feature (528)..(528): n is a, c, g, or t
  misc_feature (620)..(620): n is a, c, g, or t
ctgcaggaattcggcacgagcagccagtaacaagtttcttgatcaaaagggcaagggggaggatgagtctagtgctaattcttgcctatgggaaggtggttaaaattattgaggaacaggcttatctgcttttcaatatggaattttcgtatgtcacattgaccacacagaaagaagtgaatcttatcacatgttatatctcacttacccttaatttaaagggggcaggatgcttcttaaacaggaaacaaactaaagtatagcaaagtttagttgagaaataaatgactatttcttttaccctagaaaaaggaatagcaacattgcattggctgttttgtcttatttactgctatattcttaatgcctggcacagagccctgcgcagatttagtttctcaatatgtatgagatgaagagctgactgaattcattaatggagattcacggagatttacgtataaattttgtgcctaatagtagaggaaacaatcccattcatgtaaatataaatcatgtctttctttntcttattctcagtattttctatacaagtttcccaaagacgtggactcagttatcattaaagtggtgtctgaaatggcttatccatgttctgntgtctcagtccagaatatcatggtgagtgctgataacttgccaacctctactatagagcattatattatttcagactg

SEQ ID NO: 442709 - DNA, 624 bp, Homo Sapiens
  misc_feature (551)..(568): n is a, c, g, or t
gagaagttatctctaggtaagatcatgatggaaattttcatcttactttatacctttcactgttgaaattattttacagttgaagtaaaggaaattttacaatatccaacaagagccgatgtcatttatttaatatcaaaattaatattggaaaaatgtctatactttaggctaccacccatctgcctgaattaatcagcattaatacttaattttaaatattacctgtcaacgcaggtcactgaatgtgatctcctttaaggtattatcatgtaataaactgctacaaaaagtctaattctctcaagagttttatagtcatccacttcattttcaggtcaacattttaacatattttcccatttttttttctgaagctttaatctctgcaaagcccatctttaaatttgaaggaaaaggtagaagagtgaggagcagcagtaattaacttgaatttggaacttggatataactaaagacacattttgcttcttcatttttatgtcagtttgcaaaggaaacagttatgattttagctaaatacacgaaannnnnnnnnnnnnnnnnnatctactggatcacatttcctactctgaattttcacttagttccacaatattacct

SEQ ID NO: 442710 - DNA, 419 bp, Homo Sapiens
cagaggacaggagaaggggcgggcagggtctctgcccctgccctctggaggcactcacatcacactggtggctagggatgctggggtcaggaggggcagcgaaacaggcttgcacctccatgggtgcctctgccctcatccagcaccctatgcacaggccgcctgccactctggtcatgcctaccatggctggcaggtgctatttatcactgggtctaccgtaaatgtagcagggagagaggataaggaggggaaactcttcacagaaaaatgttctttctctctagatccacgggctccttattcttcacacgtctgacttgatcctttgcttcttccagattcagacctttcttgtaagtggtcccttcccgagtcccagtgtgctcattcttccaggggctcgtagttacctcgtg

SEQ ID NO: 442711 - DNA, 652 bp, Homo Sapiens
gggtgttgtgggaggcagacattaagggaagatgagggatggagctgcacaggaaaaagattgttttacaatgcacataaagccccccaggtaatctcttggtgctactctctgaagaatagataaaaagtctgtatgggtgaagtgatgactatcagttgcttctctcctctggtggttgatcttttctggtaacttgatgagatcctgagggagggtgtttaagacaattgcatttcttttggaagaaaacattttggtcaggtaaggaaatttcagagagagtcctttcttaaacttggttggggtcggaaagaccaggttagagagaccttgattctgaggcaacttctaaggcatctcagcatgtgccaatctttggggtatcactttctgagcctcagtagtacactagggtaagtgataatgtttcaatagcttgagtgtattaaatgcaatttcaacttatgatattttcaattgatgatgtgttcattgggatgtaaccccatcattagacaagaaacatctgtattagagaagttctgattccttgcatccttaatgcatttggctatgagaaataaaaatacagtactaagcccttcaattgacttgacggaccccctcttgccaaggaccccagaggctc

SEQ ID NO: 442712 - DNA, 690 bp, Homo Sapiens
  misc_feature (457)..(457): n is a, c, g, or t
gggcacatgggtcctgtgggacaatttagcttctcctttggccacatagagccaaagattcagagacatgcctgtgtcagtatggcatggggccctgatgattgtacaaaacacatgccagtggatccactgggtgcagccaccatccagccaggggatggcatcttttgactgacactgaacatggtcattctgcccaatgggacaaactacatgaaatgatagtagccatgcaggctgcccccaacactatattttgctccatttccactaaatcatgggccattgccaacagcccagctgtctggtcaggaaaatagcaactgagtgactgaactattaaaggatctcatgagtggagggactatggctagcttgcttcctggacagcttatatgtcactctattagatgctgcggctaccatggccacccttgagaggaatttatgtcatgtntttggatattccatgagacttcactctgaccaagaaacagcctcactgcccaatcaacataacaatgggcacactctcatggaaacaaatggactttccatgcatttaccaacacccaacactggctgctgtacctggataaacacctcagatatcctagtacaagtaggggtgatcatatagcaggcttactgccttgagacaataggacatcgatcccccttcaccttttc

SEQ ID NO: 442713 - DNA, 635 bp, Homo Sapiens
  misc_feature (467)..(479): n is a, c, g, or t
tacaaacttagtggcttaaaagaacaagtctataaatcagaaatccattacaaatcttacaaggctaaaaccaagatgtctggagaactgtgttccttactggaagctctagggaagaatctgttctcatgctttaaaaggacatacatgttccttggttcatgggcctattcctccgtcttcaaagtctgaaacagaagttaagtacttatcatgtctcattactcacctctccttttttctccctcttctacttctaagctcacttgtaattactttgtgcccacttggataattcaggggtagctacccattttgtcagctggttagtaaccttaatttcatctgcaacctcgatttccttcttcaatgtaccctcgtatctaccagttttgttaggatatgtgcatctttgagggggtcattattcttcctatcacaagtatgttttaatctttttctaaagnnnnnnnnnnnnncaaaaatagatgaaacactaaagtgtttgctacctatttcagtatttattactctaaatgtcaagacagttattgcctaactcagtaacgtcccttttcactaataattcatcttatttgactctccttgaatatgctgatgtgaatgtcgcttct

SEQ ID NO: 442714 - DNA, 679 bp, Homo Sapiens
  misc_feature (529)..(529): n is a, c, g, or t
  misc_feature (636)..(636): n is a, c, g, or t
agacccaggctctttctggcttattgtaattcatttccttagcatgttgggttttatcttcattctgttcccttcacagttgtggaattcctgttgcagcttcattttttaaggacacaaggcaggaaaggggaagggcaactccacacgtgtctgtcttcttatcttgaattgcaaagctgtcccagtaccttaccacctacttgcttctctagcagattctcttccatattatttaagccactgggtcactccaggttacaaaggtagcggtatattgaaactttgaaatttcagcctccatagtaaagaagggcaagggagaaacggtgtttgtttagtcagtctaaattgtcaaaggagatagccagatatctctttttgagagataaacagacactcttcatttaaacatggtataacttggctttaaggcatatttctttaaaaatatattgtcaaggactgcgaagagcctgaagctactttgccatactttcagggctagcagaagacaggagaatatttnggtcggggtgaaccatttattagtcacagagggacagcattaggcatggggtcatcacttgtgccaggtcaccaaccccttcagtttctataggacagtatgggcanggagacacctgcatgtgcagtggcttggattacagatgatccc

SEQ ID NO: 442715 - DNA, 696 bp, Homo Sapiens
  misc_feature (13)..(13): n is a, c, g, or t
  misc_feature (35)..(35): n is a, c, g, or t
  misc_feature (37)..(37): n is a, c, g, or t
ccactagccaatnagaattaagaagagctttttantntgtctgtaaagatagcctacatttttcaaaagtaggactgttttttaaacagatttttatcagaaggaaagaaataatatgtggacactgtgaaatggctgtgtttataaaaaataagttttagccaacgaaaatatacctatagaattgctgatattaccaacgaacttttgtcttcatctctctggcttcctgtctctgtgccatctggtctcttagactgtttcactccttataaactgattggcctgaccttcctgctcttgttgaagttacattcaattgatattttcttattttaaataagcatattccttagggtctattctatgaggaccaggattgtgatttagaggaaaaatcttgttctctgtgtatttatgcagtgctatataattgatataccttgtacccaacaaaggcacagtgtcttcctatttttgcttctcccttgcactgctatctgaataattcttcagacaaatctgccccttcattctgggggcttttcatttagagactacaggaatttggtaattgctgcaatgtagaaaggtatcaccttccaaaatattggaaggtatcctgatatttcatgttctacctaataacacctttcaggactcatgttcttaggcaaatgctttggggaatgtggc

SEQ ID NO: 442716 - DNA, 792 bp, Homo Sapiens
agcggagttgaaggatttgagacaggatcactaatagtttttgtgaagcactggcatagttgagcaagtcagcttttagtgaaatgtgaaaatttaagcaaaccccagctaccaaaactgaactgtgaagggaaagctaaaggagagatagacgcgaaagtgtgctgctatgagatggccacttctatggttccacagttgtggtttcatccggttgagggcttatggctgctcagtctgcagtgtggaaaatgaaccagatgcaaatctgagtacaataaaggtaaactggatgtatttaactgttttgtatctatacatgaatgtatctgcccacatccaccttctgatattaatgcagctgttgcattttcgttttccaaatctcatgccaatttctcttgttgttaatcctaatctgggaccatacaagactcgggattctaggatacatagtttcattttagctcagtttccacctaaccaaattgacctggaaacatccagcacatatataagaatgcttcattaaataagtagtcactgtttaccttggtatgatattgcaggtacttctcagtgcaaatcagagctttctatgagctatacctgaccttttatattgcaatcattatttctctttccaaattctatacggtatcttcagaatctattggttgcgtttttatttttctggagagctccagctcgtagatatctagtctcctaccacacaggttgcattttttatgcactgtggctggtggagtgtatttttggttcttttgccct

SEQ ID NO: 442717 - DNA, 715 bp, Homo Sapiens
cccccggtctgcaggaattcggcacgaggcaatattgggttcaccttttgtgcacaagttgaaagctcaatgtgaaagtgagaggagaagatataaaatgtctttattatattctataatgtctcgtgaactcttcaatgcatttctgataaaaattttctatttagatggatgtgtgtgtcagcaagaattaaaaatgtatattctttgaatttcaaagcattgcattattcctagactagtaattggaacaaattattatttacatggcaatagctagcacattcaccatctttacagactagaaccagcccctctctgggcagacgtagccctgaaaatgcactgcttggtatacctagaggaatgctttcatgaaaattagagaactgaggaaaatgttcacctttcttcatgctgaacctaccgctcatttgctatcagaagacctgtacaacattaagaaacagcctcgtgtgtttctttaacagctcctaatagttagcaggcttttacaactgccaaagataagcttcaggaattaaaaaatggcaattggttagctggcaaaaattacagatattagagtcaatatcatttttctcatgctttattatgccagtgagtcacaagttcccccattttaaaactactatggactaatttaattccatgacacagtggctggctttattttcaggatggccatacttcg

SEQ ID NO: 442718 - DNA, 724 bp, Homo Sapiens
  misc_feature (139)..(139): n is a, c, g, or t
  misc_feature (229)..(229): n is a, c, g, or t
  misc_feature (231)..(231): n is a, c, g, or t
  misc_feature (233)..(233): n is a, c, g, or t
aacaaaaggctggaacgtcgggttgaggcctaagcaatggtctcaatataaagcccgagtcgattgtgaaccgtgccggcaaggaatgactcgtttaagaagggccggaatcagttgtggttgcacgtgtacgtaaagnagatctgcagggacacgtcaaaagtactttcccgtgagcaggacttcacgctcatcttccagaccaggtgggtgggtagatgatgggcanancnatgcctcaggtgggacagtatgtctcatgctcttcctcatgtccttcctcctatcctgctgtgcctctgcagggatggaaacttcctgaggctgcacccgggctgtggtccccacaccaccttccgttggcaggtgaagctcaggtgggtggtgcccggccccaccactgtgcctgtcctacaccgtgggctccatctccctggctcatctatcctgatgctcattcctcctaagtccctgagttcagcccccacaggaatctgattgagccagagcagtgcaccttctgtttcacggcttctcgcatcgacatctgccttcgtaagaggcagagtcagcgctgggggggcctggaggccccggctgcacgaggtctgcacacgagctcccttcattgcccagttccacgtgaccaggacccaaacccctgtcacatgctgctaaccaccagccctctcattccccctttttaaggtgcagtgggtggtgc

SEQ ID NO: 442719 - DNA, 497 bp, Homo Sapiens
cgcgatgctggaactgactccagctgaaatgtgggcgtggatggacgagtagctgggacacgacaggagagtccctgaggactggtgaagacatgagagagagtggttagtaattgagtgaaattggtgagtttggtggtgattcctgggtgcctggaactgactcccgctgaagtgtgggcgtggttggagagtagctgggacacacaggagagtccctgagggttggagagaaagacgtgctagagactgaggagtaactgagtgaaattggtgagtttggtggtgaacgaaggaggcaggagtgggcagatgctggtgtgatgggcaggatggcaggggagggagagtgctggggagagtgactgaagggagatccaagcgcagagcccagagactctggcttagtagttacgggtgggaacagttcacctttaatttgtgccccaggaggctctgatgccaccagcctcctggcatttgggatcctggggcct

SEQ ID NO: 442720 - DNA, 141 bp, Homo Sapiens
gttatgttcatgctggaatattccctccaaagcaaacgataaattgctgcatcttatatctcatacctcaaaaaagaagtgcctggtaggcctctttgggttctgaaggcaactcatgccacacttaagactgcagttcca

SEQ ID NO: 442721 - DNA, 518 bp, Homo Sapiens
atgagccaccacgcccggccaatatattggtttctttatgaaaattatactggatctgttacaggtatgattgatgtattttatttttaagttgtcaagcattcagttaatgatgtgtgttgtaacttttcggggagggacatttgcagagactgacagatggtatggcattctgaaaagcggttacagattaaaaaaattttaattctgcagatgatagtgttgaaccaagtggaacaaagaaagaagatctggatgacagagagaaaaaagatgaaactcctgcacctgtatatggggccaagtcaattctggagagctgggtatggagtaagcaaccaggtaatctttgatcagagatagaaattagtgtagacattttgcctccagatcctcaagtggttttagaaattggttctctaattctgtgggagaaggttgatactggtatagtcttacacgtcattgaaactggaaaagatagctagatattctcctactcatgttttggataatga

SEQ ID NO: 442722 - DNA, 639 bp, Homo Sapiens; identical to SEQ ID NO: 310956

SEQ ID NO: 442723 - DNA, 817 bp, Homo Sapiens
  misc_feature (405)..(483): n is a, c, g, or t
ccggaatccccttggggagcccttccacaccttgcccgcaggccggggacttttgtggcccacaggagccagagaaataccgctgcttgtcccactaactgtggacattctcctggaaaacggttctattcaaggcaatgaaatagcgctccaagatcaccagcctctgcttgagtcgcagggctgagagggtgtggtggctgactggacggccagggcctgctgctctttaaccagcacagaaagacactccttcagttcattcacatctggttgcttgccccatacccaggtgtccagaattgacttggccctatatataggtgcaggagtttcttcttcatcgttttttctctttgtcattcagatcttctttctttgttccacttggttcgacactatcannnnnnnnnnnnnnnnnnnnnnnnnnnnnnnnnnnnnnnnnnnnnnnnnnnnnnnnnnnnnnnnnnnnnnnnnnnnnnnaccatcctggctaacacggtgaaaccctgtctctacttttctaggagggagctctccgttctgggttgattctgttccagtgtatacaatttctccatctttaaccatttcattccacagaccacagagcccatctcttgtgaatgcaagctgtatatctgttttcaaccatttggagtcgaggcgagcctgggcagccaaacagaaagattcagagggcatcttttctccagcttcctcccaggtctcaggcctgacgcgcagggcccggccgcctcgcctcgccggcgcgcggacgcagcctcccaagagccgctggctcagccggcccgct

SEQ ID NO: 442724 - DNA, 1542 bp, Homo Sapiens
ttggtttctttatgaaaattatactggatctgttacagatgatagtgtcgaaccaagtgggacaaagaaagatctgaatgacaaagagaaaaaagatgaagaagaaactcctgcacctatatatagggccaagtcaattctggacagctgggtatggggcaagcaaccagcttttgtgtggtcctctgagccccagtgagagtttcctgaggtacctcacccttccacaagacaacaggcttgccattgatctgcaacaaacggcggttgttgtcatggcccatttagaccgtctggctacaccctgtagatgcctcctctgtgtagctctccgacgtctcataagagtcattttttacaggtcagaactgtagaaataatgagaaagtgacacttgtacgcatagctgatttggagaaccataataacgatggaggcttctggactgtgattgacgggaaagtgtatgatataaaggacttccagacacagtcgttaacagaaaatagtattcttgctcagtttgcaggggaagacccagtggtagctttggaagctgctttgcagtttgaagacacccgggaatccatgcacgcattttgtgttggccagtatttggagcctgaccaagaaggcgtcaccataccagatctggggagtctctcctcacctctgatagacacagagaggaatctgggcctgcttctcggattacacgcttcctatttagcaatgagcacaccgctgtctcctgtcgagattgaatgtgccaaatggcttcagtcatccatcttctctggaggcctgcagaccagccagatccactacagctacaacgaggagaaagacgaggaccactgcagctccccagggggcacacctgccagcaaatctcgactctgctcccacagacgggccctgggggaccattcccaggcatttctgcaagccattgcagacaacaacattcaggatcacaacgtgaaggactttttgtgtcaaatagaaaggtactgtaggcagtgccatttgaccacaccgatcatgtttccccccgagcatcccgtggaagaggtcggtcgcttgctgttatgttgcctcttaaaacatgaagatttaggtcatgtggcattatctttagttcatgcaggtgcacttgatattgagcgagtaaagcacagaacgttgcctaagtcagtggtggatgtttgtagagttgtctaccaagcaaaatgttcgctcattaagactcatcaagaacagggccgttcttaccaggaggtctgcgctcctgtcatcaaacgtttgagattcctctttaatgaattgagacctgctgtttgtaatgacctctctataatgtctaagttttaattgttaagttgtttgccccattggaggaggatagctcagaagataattcgagaaccaaggaaaaagagagttcctaagaagccagaatctacggatgatgaagaaaaaattggaaacgaagagagtgatttagaagaagcttgcattttgcctcatagtccaataaat

SEQ ID NO: 442725 - DNA, 360 bp, Homo Sapiens
  misc_feature (231)..(279): n is a, c, g, or t
gtcggagagctacacagaggaggcatctacagggtgtagccagacggtctaaatgggccatgacaacaaccgccgtttgttgcagatcattggcaagcctgttgtcttgtggaagggtgaggtacctcaggaaactctcactggggctcagaggaccagacaaaagctgtaacagatccagtataattttcataaagaaaccaatatattggccgggcgtggtggctcatnnnnnnnnnnnnnnnnnnnnnnnnnnnnnnnnnnnnnnnnnnnnnnnnncagatatcgacaccatcctggctaacacggtgaaacctcgtctctactttccaggagggagctatccgttctggtgcgatt

SEQ ID NO: 442726 - DNA, 1085 bp, Homo Sapiens
  misc_feature (17)..(17): n is a, c, g, or t
ggattttttttaattanttgaaaaaaaattatatttttggaagaactcactacataaggtgacagaattccaaaatcaaattacatgaaaatatacatcgcaatttctttgtacaataggtgagaaaaatctgcagtatagaagaatagaggcagagaaatatgaaggactaaggagaagggtatgagagtaaataggatttgtaatagcaaacccagaagttaagtagaaagcctgtagctgtgcatgcttcatttatccaaccttaataccaggcaactgaagagggaaaagtcagatttgctattgtttggggaaattttcagtaagttgaattaagaaccatctatttttagttctcaggggtaatgactgggatcaagagctcacaacggccaataaatgttattgctatatccaatccaagaggtgggtgcaactagaatacaaaaaggacaaagcacctagtgatgactccttcgaagtcatcattaaaaatcaagtaattgctcattaagtatttcagtatttgaactaaatcatttgagaacattctggcaggtaagagataaaagcaaaggggagtgtgtcaaaacaaagaagatacaaaagtttagtaagtgaaaagagtttaatgaagcctcaagggtttaagggaaattaaatggaaacttttaatcctaattgcttttcatctgacatgcttaaaggaatccttttaaactgataagaaacaatgaataggaaagaaaacctgctaaaatctcttagaatttacacgattcttattctactacaagaaagcattatttggtacaaggtgtatttgtggatgtacatgaacagtatatatattatccggatcatgttgtgctatgtacaggtctttacaattcttcctgaaggttaaaacagttcattagaattcaaaatgcgtaatcatctgtaagttggcacttgttaggctcttgtcagcattgataactggcatgttttattgcagcccagttccagccagtgtttgccaacttgtacaacagaagtccagcaataggtggatagagtgcaggaaaaacagtgccatg

SEQ ID NO: 442727 - DNA, 858 bp, Homo Sapiens
  misc_feature (179)..(179): n is a, c, g, or t
  misc_feature (186)..(186): n is a, c, g, or t
  misc_feature (412)..(521): n is a, c, g, or t
  misc_feature (556)..(604): n is a, c, g, or t
  misc_feature (622)..(635): n is a, c, g, or t
gagaacataaattttgtgttcatttattatcccactgaataacaaacttgtaaatcataaatatatattacatagtaaaacaaagattagaccaaaatagaccatagtaccttaaacacttcctatgaattaacatatggactctatcatatgttcctttagagaattcaggatttttntcttttntgaatttggaagccaacttaaaagctaacaataattatttacattttggtgtgtcattactacttgtataactccaaatgacagaatatgtagataaagaaatgtaggtattctgaagaccagcttttgagcatccttaagaagtcatgaagatattaactatgtctttgaataatgatttactgattaagaattattaaccggctgggcatggtggctcatgctnnnnnnnnnnnnnnnnnnnnnnnnnnnnnnnnnnnnnnnnnnnnnnnnnnnnnnnnnnnnnnnnnnnnnnnnnnnnnnnnnnnnnnnnnnnnnnnnnnnnnnnnnnnnnnttagcggggcatggtgaagcacgcctgcagtcccnnnnnnnnnnnnnnnnnnnnnnnnnnnnnnnnnnnnnnnnnnnnnnnnngagtgagactctgtctcnnnnnnnnnnnnnnttataaacgaagcttttagttcaattctgttctcacatttgggtaactatttacatattcctaggtgctttgaagacatatatttaaaatgcatgaaaattctaagactctcaggactcctgatttaccaaatattacaaatacccagaggtgagaagaactgaaatccatcattaaaaatttccaatgtttggccgggtgcagtggctcacgcctgaaatcc

SEQ ID NO: 442728 - DNA, 712 bp, Homo Sapiens
ccccgggctgcaggaattcggctttaggttttgtttaacatttaatgtcacttgaccatacaaatgtgattatgtggatgtcactagtttcatgtgctctcttccctgaaaatacccttagacatgataataaattgaaccattacagttttgtgacctcgtgatgcagttacttacgtgattcttaagaactctccgtatagtggtaaaagcaagcaagaaggaaaaaattaaccatgtaattaatgtaatacacatacagtgtaatacaaacagtattacagcatacaattagtacccctgaacccaggtgttatcctctcggacctctagtaagtgactgtgctttgcgcagtgaatctcctgtgaatagcaagcagaaagtcactgccttatgggagtagtagggccagctgtcagcctcgggaggtagaatataatcaaggaaggaaaatcttaaaagttctccgaagctatgcttatattcaataggatgtaacttacacatggcaaacaatttaaaaaatcttttaatttaatgtctgaaataatgtcacagggacatgctatccaaagagtgtaatatttgttataaaattagtgaaaatattagcacagagtttgttaatgtttttagttaattctgagttagtcttgaattaatgagttacagggcattgggcacttgtaatggcagtttgttttccttagt

SEQ ID NO: 442729 - DNA, 721 bp, Homo Sapiens
agctcacgcataataatcaaaggtcagaaccgccatctcataatactttcccaactaccatgagagacaggatccgtgcacatctcagctgtatgtgcatttctggtaccaagggaaacattagacgttttctagaatgtcctgaacaatgtgaaggttaataagcaagtatagaaagtaagttttgggttagaaccatgaatcccagatacatcccagatacataatattagggtaaattcagaggaagcctaaatataaagataaataggacaaccaattaaaatcacatgattaaggcaatttatgttgttctcagttaaaatttaccaagtctctacaaagtagaatcaataaccaaagaagcattcacattttgaacaacacttgaaattagacacaattttcaatttaattactttgtattatggactcatttgcacccctcaattcatatgttgaagttctaactcttgatgtaactgtattggagatacagcctttaggaaggtaattaagattaaatgaagtgataaaagtgggcccttaatagcctaatcctgtagagctcatgtccttataaaaacaggaggagacacccaagatttctgtctctctctgtgcacagcaaggcaaggtcatgcgagggcatcactagaaggcagctaactgcaagccaggaatagattcctccccagaaacctaatctgctgacagccta

SEQ ID NO: 442730 - DNA, 691 bp, Homo Sapiens
  misc_feature (632)..(633): n is a, c, g, or t
  misc_feature (677)..(677): n is a, c, g, or t
gaaatgcccttttccaaggtctacctatttgcaaattataatcctctgtgcctggtttttgaagagaataatttataaacattgcacaatcctgtgtcttacattgcagagctccagtgttgtaaggtttgatgaaattaagcatgtcttcctttttgaaagataccaattttaattattttttcattactaaatcaaattcagaacacctgtaataaattacaaacatgactgaaatactttacagtatcttccatcaagaggtagaatctctattcctcaacggcttgaatctgggcttgtcttgtgacttggtttgagcaaggaatctgatagaagtaatgttttgaatgttctcagctttggattcaagccctcttgaagcttctgttcttgcaggtaaagaagcataagctagcttgttggataatgagaaacatgtagcccagttgcccctgtcagtccaatttacaacaagtcaacccctagaagcagagctaggtgacctgcaaacaagcagatatgtgagtgagtgagtgagtcccagttgaaaccagcagagaaaccatatagctttacgaagccatgtaggccaagcagtcatcccccagaacattgagctaattaaaggnntgtgttttcagtcttttaaagttctgggtgattctattatacangcacatactgtgcc

SEQ ID NO: 442731 - DNA, 726 bp, Homo Sapiens
cgggtacacatgctccacccgggccggatgttgctataggcaagactacaggttggtctccccaaaggtctccgaaggtccccaattgccaatccaggtccaaccctgtgccttggggatcgggtcttatgccatccagggtcagacccccaccctgactctactttgacccccttatttcctgtgcttactcaccagcccccgacaccagaccttttgaagacatcttggatttcctgatgcctccccctccagtgtccaccttgcaccccaatgctttctacctaaatgcaagtgcaatacctgctcctctctcaaagcctagctcaaatgccacctcccactcgaagcctcccaccatccccagttaagaattcatcactccctcagtgctgcagctgtactcttctcagtctcccttgacttccaaggaattgaactttgcctgtgtccctcacaaggcatcaagttactctagggtgtggagggactgggtttcctagccatctttccttgcagtcccctcccctcagcatctgagcaggtcctctgtcacttggtgaagtggaaaatgacaggaggttccacagtggaagagtgggtgggaagggacatatgtcagggggtcccctccctacagcagtgaccacccagcatccagtgggggagtgaagggcaatgaagggtacatcctggggtccaggccaacctggctctctgctcggc

SEQ ID NO: 442732 - DNA, 679 bp, Homo Sapiens
  misc_feature (497)..(497): n is a, c, g, or t
  misc_feature (501)..(501): n is a, c, g, or t
  misc_feature (508)..(508): n is a, c, g, or t
  misc_feature (510)..(511): n is a, c, g, or t
  misc_feature (517)..(517): n is a, c, g, or t
gggtttgggggcaaaaccctgaatccagccagtcgtgcacagagacacacccacactagcccagtggcagtgggggatgtgggatggcagcagccaggtatgtagccctgtcacaggacagctcactgtggttttgcacactgcctaagggttaaattgtgttgttgccttcagtagaaggcatttgtgggctgcagagttgagagttgggtgaggttagtctctcctgaagaaaaagcctataaaaagtggctaatcttatcccttttctctgtatgcagttggactcgtcagagatagtaaaatcatcttttagtgtttttttgttgctgatgtcttgtacccatttgttttttacatggggttgtagatcgagttctcaaaggtgaaaccagatgatcattctgataaaggaaatttaaatttgatacatatgctttgtatattttgattacttgttttcgtttttgactataaaggagctttttttatttggnaggngaggagngnnattggncctggggggttgtaggtgattgtacaacttaaagctccttttttcttggctgagtgacaggtggcttgtcaaggtggaccaaagcaccttgacacagggactccacactgtgctctcttacagcacgagggatgtggaccttgggtgtgccttgcgggctct

SEQ ID NO: 442733 - DNA, 337 bp, Homo Sapiens
  misc_feature (285)..(285): n is a, c, g, or t
aacaggacaagtaacagattacatcaaacttcagaacttctcaaatacctagttattatacacattcccatctgtcttgcagggagggatcttggtcggcttaacagtttcaggtaaaataagctgcataatagtatatattacaataataaatgtacaatgtttacatgaaatatgttttagaagcaagaaaaagatgcatctgcatcaaaggcgaccttttaaaatgccacaactattttttacattcactcttgcaacaggttacaagatgggggtcactanggctcaggataaatcactatgatgcacataaaatacaggaagactggttact

SEQ ID NO: 442734 - DNA, 672 bp, Homo Sapiens
  misc_feature (566)..(566): n is a, c, g, or t
  misc_feature (618)..(618): n is a, c, g, or t
  misc_feature (638)..(638): n is a, c, g, or t
gaaacatagagctgcatctctaatggaagttttagtacaagtttatatatttctttggtgtggcttcataacaaataatatgaagcaatcagactaatttaggctgctttttgacccacattctttgactttacaagatagttcttatactttactcaagttttttccttttaccacaaaactgttttgttggttattaccaaggaatgacctgtgttgaataattatgatttaagggttctgctgagacatttttgcaattttaaattgctaaaatctgaacacctacttttataatccactcaccttcatgtggattctattctattttgctacatattgaaatagaccacattaaaaggttaagagtcttccctgtttctttgtggtggtcactgataaggacacctgtatttcatatggtcaatgaaagcagtaaatgaagttcagttctggaaaggccatctcactgatgatttatgatatctggaagcacggagtccctaatttaggtcaaaacattagtgaaatttttaccactgtaaccaaaaatttattttctaatnatcttttttagctttgaaagtcattacaaagatgcttacttgacagttgcangaggacatcattttatattntaagagaagattagttgcttaatatcttggagtg

SEQ ID NO: 442735 - DNA, 417 bp, Homo Sapiens
gatggaagtttgaggcaggcaatgatggaagccaggaaaccaggacagtgagagatgctcatggtgttctagtaagagaggatggggctcagactagcagaatagagagaagtgattgactttctatatttctgtacacatgacaccatgccacttatcttactttctagacttctgaataaatagactttctttctgaagtcaagaaagaaaggattgctcgcctcctgcatagaagtagttttccaagcattaggaaaacaacatatcagttgatctaatgaccagccttgtgctttgtgtccatttttatggcaagtcactggggtgagaaccatgatccacaacaaagaaacattttctgctacacacagtgacatgcctgcagcctgactttgcacctcggtatctgccccc

SEQ ID NO: 442736 - DNA, 397 bp, Homo Sapiens
aagaaagtttgtttgagatcctatgtgtagaatggacttgattcctcttgcactgaaaaatgccttaataaaaatgaatggttttgcccatactgtaactgtagtttaggtccatttgactaaagcttgagtccatcttcggacattttgaagaatttcttccttttaaagctgctatatttactgatatttccaccccctgggaatctgcttctcttgtttattagagctgctaaaatgaaagcttgccaactgattaattttaatagtttagccagaaacctgtggataatgtatattggctgccaagcttgagataaattctgttggctctgttgcaaagattttggcagaaatgtctgccctttgcgaagcacagaggaactggagggatgct

SEQ ID NO: 442737 - DNA, 540 bp, Homo Sapiens
  misc_feature (263)..(482): n is a, c, g, or t
ggttagtatcagaatgagtgacacagataaggtatactgtgggaactcagagacagaggagataaatatatccttcacctatgtaaagccaccaaaaaatctgagaatcgagctaagatttgttaaatttgtaccaaataattttcttaaattaaacaactttggatacaaaatcaacataaatcatcagttgcatttctatatgccaacaacaaataatctgaagaagaaatccagaaagtaatcccatttacaatagctannnnnnnnnnnnnnnnnnnnnnnnnnnnnnnnnnnnnnnnnnnnnnnnnnnnnnnnnnnnnnnnnnnnnnnnnnnnnnnnnnnnnnnnnnnnnnnnnnnnnnnnnnnnnnnnnnnnnnnnnnnnnnnnnnnnnnnnnnnnnnnnnnnnnnnnnnnnnnnnnnnnnnnnnnnnnnnnnnnnnnnnnnnnnnnnnnnnnnnnnnnnnnnnnnnnnnnnnnnnttacattattcgtggaaatagaagaaaaatgctaaaacttatgtggaaccacataaaa

SEQ ID NO: 442738 - DNA, 585 bp, Homo Sapiens
cttgataacgactattttataaatatgtaactgtatttttcttcctgtccagaaactgttattgaataaaattcaggtatattcctccaaaacccacacagttcagagattttcaaacaccaggtttccatttgtattaaaatgggcaagataatgaaggcacaggctcactttgtatcaataaaggacatcaaacacagtcatgaggcactaatgacataagcaatcacaaaaagcaagtgttcaaagtcttcagtaactcttctccctttaacatttggcaaaactcagtccagatattttaatacctcagaaagaaaaaataaataagagtagctacattaaaatgtcagattacttataattagtctttagaaatataagggataaaatgaaaggaagagaacacagatttcctatattcttggattatccttcctttctgagggtctcagatgtctctatgcatctggccaaaatggccagctggtacctggaagatttaagagatttttgggtagttgctggcatggtccctcgacacttaaagtttatatcacaaaaacaaaactaggttggtttcag

SEQ ID NO: 442739 - DNA, 679 bp, Homo Sapiens
  misc_feature (507)..(507): n is a, c, g, or t
  misc_feature (526)..(526): n is a, c, g, or t
  misc_feature (608)..(608): n is a, c, g, or t
  misc_feature (634)..(634): n is a, c, g, or t
tgcaggttttactttttgatttgtttggtctgatccagaactttgaattctttacatcaaatttccataattatttgattacttctttagatagattttggtactgctggtagtgttttggaatacagtagtttgtgacaaaaaaattcagaaagtaacatgtttaattacaagtaagaagtttactttattggtctgctttttaatttagtttttaaaaattacatctttagaaataaatttacttaaaatggtcagttaaataaagcacaaaggattttggtgtgatttcagggcagatacatagatagtaaaggctgaacttttctagaatataatttcaatggaggccgtgatattttttaaaaaattaattaaataaatacccctctattcaggcccacctgaaagtgtaagagaatggctacttaccttgtgtttcaatacttcccaaaggctcactgtattccatttgggattagatatcttgtctttgaacagtctggngggccttttcctctgatgntctttctttgagaagatctttctttatcatcttggcatgtcctcctcaaactttgattgaaggattcttgttttcaagcagngtagatagtctgcttcatacttctcnctgggcatattctactctcaggtcaattattattattcatttcgc

SEQ ID NO: 442740 - DNA, 1176 bp, Homo Sapiens
tcccttttttcccccgttcctgccggtttcccaccccctgggttcagggaagggcccggggcccctgggtccaggaggaagagggttcccctcggagccccggttagtgggccagcttcttggcaaaaggaggccaccgttcttgatgaccggccttctggaccaagggggtccctgggctccttgatgatcttggtgccgaggctgaccgcccccgtcgtagctcccggtcagcgcgtagtcgatggtgagccgcagttgcttcagcagcgttgttgaccatctccagtactgtgggccccacagagccggtggcagcgatgacccgcggcttccgacaggacttcccacgatgcccgcgcgcaccgttcgcagcgctgcggctgtttggcgtccaggtggcccaggagctgctggatgaccaggtgtgagtgctgcggctgaattgagtacatgatgattttaaagcaacggatggcaaacaccttgggttcccaaagagaatggttatccagatggatgagaacaggcttgatggcgtttttgatgttgccaaaggcagcccggcccagcagctcccgaagacacctctcagccagctccgcggggctctctttctccttctcaggtgcttggaggggtgagggagaccggctctctgcctcctctacatgctgtagattgaaaagcagtgatggaacgatcttatccatgtgctgtgggtcccagatattggcctgcagttcatcattcaccgtcttcctcaccaccccttgcaggcctttgatgcctgacattcgaattttggtcttgatttctaagtcatcatggctcgagtggcacatttcactgaatcgggacacaaagaagtcatagctccggtgataggacggggtgtcctcctcgatgttggcaaacttcacaaactatcagggaggaaggagagaaacacgcgagagaggtgacccaccatgcttctcactgctgggcatccccagaccccctgccatggtcaagccatgggaaccacgcatcctggagccagcttggccggccttgcagagcacactggggagatgagttcccaatcccgctcgcctctcctgttgcacaataagattggaaaccatggcccttctcaggcctcccctgctgcgggagcagaggacagaagag

SEQ ID NO: 442741 - DNA, 668 bp, Homo Sapiens
  misc_feature (55)..(55): n is a, c, g, or t
  misc_feature (58)..(58): n is a, c, g, or t
ccctcaataggaaaagaacactgctgcccattgttctctcctcttgttcctcttnccnttatgcatcaaaccaatctactcggctttctctcagctgtgggattcaccactctgaggagaaatttggaatccagaagattacctctcctgcttctccagagagctgggaagggaagctcttctgcccctccatttctctgccattcctgtttattaagcaaaagtcccagataagatttactgccactttgcctttctcatatccaggcagctcgttaatatcacagacgaacacctttcctgaacacagacctgcagagttctattcctgctctgtgccctgtgattctgccgtatcgccttggcaaccaattaaaatactttaatgtgtacagcgatatcattcttaattctgcaaaaaccagggtgacctgctcagaaggctttggcatgccagtcagttggtgttctccctggtatctggctgcattctggtttgacttcttttttcacctcccaattacctccgaatcccctgcaagcacctacgtgtcattcctaacacacctggcctcaagtcaagcaacaccctcatcaacaaggcaggggctggaagagatcctgaggacaaaatggctgatatgtctcctttcgtttagcctcaaggg

SEQ ID NO: 442742 - DNA, 692 bp, Homo Sapiens
  misc_feature (557)..(557): n is a, c, g, or t
  misc_feature (616)..(616): n is a, c, g, or t
  misc_feature (627)..(627): n is a, c, g, or t
  misc_feature (672)..(672): n is a, c, g, or t
agaacaatcttgagatcaaattgctattggaaagattttagaaatgtaatctagaaactatgttttttcacttatatcacagttgtgtattcagaacaggcgatatctttcctttagatattctttctttcctagggtcacatatgataaaaatctaggagagtaataaagttaagtaaaacaaagaactacagttgtgttgaatgcttcttcttctaggcctgatttgaaatgtttgacaaagatgtagaggtagcctctcattgcagtattatttgaccttagttgaacatactttcttttctttgtgagttctctttaatgaattcacctttctaattagaaatgccactgtctcactgtcccttgctttattaaacttttacatcttcaaacgccttcctctgagactaatcattaattaactaatggatctttgtttcataaagactttaaagagatcatagaggaccagacggatgcatgtactttggaaaaatatttgtttaaagtctttaatatgtactaacagcttttgggtcataataaatgctctntcattaatagctagcagaaagaagaaatgaaatagtacttagaaaaaacccttataaanggatgatcttngagtgagaataaaatcttctgaaaaccaggaaagtttaaagcagnttttaatctgtttttcccct

SEQ ID NO: 442743 - DNA, 393 bp, Homo Sapiens
taacctgtgagaactttttaaaaaaattaacctggtaacattttaatctttctgctacttttattcgttcttatatttttaagtttgttcagaacttagtccagaaaaaaagcatgttatttattgggctcccataaaccactagcaaaccccattaatgcattttaaatgttttccaagtcacaaaatggtgaaggccaaagaaaagtttagtactatggttataaaaagaatttttgctaaaccaagtgtcttttgaaaacagacttttagatggaaattgatctaggctttttctgctctttgtaatttcccacagctttttcttggtctcttgatgatgctttccatcttttcttcttactccatcagcctgagcaaagttaaattgtg

SEQ ID NO: 442744 - DNA, 667 bp, Homo Sapiens
cctctacctcaggggtgccctaaggcaaaaatagagtagcttagttgccgctgtctgctcccctccctttacatactttcccatatacaggcatcccaagattcccaatctttgaagtaaagacagctggtgtagaagatataaatcttatttagcagacagagatacccattgaacatatatgaaaatgtaagtatgatattctgtcatataattgcaatctaattaaatgtaatgactagctgtgtttcctttgtaaacagtgatctaagccaaatgtgtgaatttcaccctgcctgcttgcgaagcagacccctattaagatgagcttgcatgattttggagtaagtaggtctgcatacaaacagctgctgcagaaatacatggcatctctcattagggttctttctggtagcaacagtgctcctagcgaaactttacttctagtcttgctgcaaatagctctttcctatatttaaatggagagattgggggagagggttcaatttgtctatttcttagaatgtaaggcagattattttatgtgttcttaatttctgtaagtactcaaaaagtggtgaaaatgaactctttagggctctgatctctttgatacatctattttattatttggtctataaagattcatttaaatattttcctgcag

SEQ ID NO: 442745 - DNA, 473 bp, Homo Sapiens
cattcagtggagaacaagtaaaaggatatcattccttttggagataaactttgagtgtctagaatttttttctattaatgctttgtatattagttttttaaataagatctatagatatgtatttatgtgtgttttatatatgaaacagtgctctgggtttgactcctatgttttgtaattttaaaaactacgatatgcttgcacgaaattcattgagaagctgttataatacatgcagtgaagcatgaccaaatagctaaaaatattactgaatctttacaaatatataatctttattgttgtactgtggagtgcaaggatactaaatattggctattgattactaacttgcatttcatggcaaatagatgttatatcgcttgattagtctagaacatttctaatattttgtgctttcatatatcaaaggagattatgtgaaactatttttatactgtgtgacatatagttat

SEQ ID NO: 442746 - DNA, 707 bp, Homo Sapiens
  misc_feature (127)..(135): n is a, c, g, or t
gggggggcgataccccactgaaaaagggatccaaaagcattaatttggtaccccaggtttttccaatcaccccgtttaaaccccgccagtaattgtaacccccccctataggcgaattgggtccggnnnnnnnnnaagatattttatttataagaagtggttagaataggtgggttgatctaacaagctttatttttattattgttaaaaattctcattttgaggaacacaaccacaaagtaaagaaagttttcattgatttaagtaaaaaaccaatatttaataacaattttaaaaacatagctccaggccatccacatgctttaactcatgctcaggctcctgatattgatgggttgtctttgtatttttctgatgcccttttatgtgaattcacctctataagacaaaaaattataatcaaaattattagtattacagtcacagatattgcgaagatgagtttgttcttatagtcatctcctgggaacttctttcatgagctcacttgacttctgctctttctgttcattctgttccatgttctcattaatataatttgttttttgttgggtccgtatcccattctacattcaatgcctttgcttcctgctggctcgctggggaagctttcatcagggagggcctgtttcggcaacatggaggcttgggcacagctcccttggcacaagtgttttccggaacat

SEQ ID NO: 442747 - DNA, 660 bp, Homo Sapiens
ccagtttgaagaatgggagcaaggcctggctagagcactgatcgacaaacttttcctgtaaagggctgggtagtagatattgcaggctttgcaggccatgaaatccacgctgcattgtagtggcatgcaagctgccatagccaatctgtaaatgaatgagtgtggctgggtcgcattagcattttatttccaaaaatagcaggtggccagatttggcccagggactgtaattttccaattcctgagatactagaaacagaagtgttttgttgttgttttaactaactctttattgaagtacagcaaacaaaagtatacacattatagcattgtatgaactatcacagagtgactacacgcatgtaaccaccaactgtgtgaagaaaacattgcctgcatcccagaaactatgtatgcacccttactagtcactaatctcacactcctccccaaaagtaactaaaactctgatttgtattgtcagtggtttctcctgttttggactttatataaatgaagtcatattgtatgtatttctactttctgtctaacttctttgtatgatattcttccagtggaattcatcttgattgtggtttgtaccaatggttcaatttctttttaatgggtatataatatttaatggaatactattaggtt

SEQ ID NO: 442748 - DNA, 691 bp, Homo Sapiens
  misc_feature (51)..(51): n is a, c, g, or t
  misc_feature (63)..(64): n is a, c, g, or t
  misc_feature (70)..(70): n is a, c, g, or t
  misc_feature (545)..(555): n is a, c, g, or t
acaatacgtgaagtaccctatcaagaataggaaataagtaacacgtgatanagacccacttannaattanttagtgagttaagaactagattggaaatgtcagaggggcagggaagagaatagggacatggcaagcagaaaagagaaagcaagaggtatagaaatggaattgccaatatcagcaggtaggagtatcaggaaagcgacaaaagaaaatggagaaggggacatattcacagaaatatgaacactctgtatggttaaagacaaaaggcctcaactagcaataactccaaaatggccaaataaatgccccaagctaaaattttgttaatgttgacaagattagggcaagaagaaatcatgatctgagagcaggataaagattctcttttttaggagaaagacagaggtttggtaattaaaaagcaatatgggtaagttaatgagtatgggtcttaagatgtgtgaaataagtcttcatataacatttataataaggtgatcatagtcgccaattagaaacagagattctcttaatgggnnnnnnnnnnngaaacaaattttttaaaagaaagcagcagttacgatagaaaatctctaataatcaagccacaaaatacattaaacattccagcaaacagatatacagcacagactacacaacaggcactgtgccgaattcctgcag

SEQ ID NO: 442749 - DNA, 715 bp, Homo Sapiens
  misc_feature (21)..(21): n is a, c, g, or t
  misc_feature (39)..(39): n is a, c, g, or t
cagaaagcagcctagaatccnaatcatagctctttctanaatccctggtgttgtctctacatgagattgctttttctttagaaggttttaagagcaagacagctagtaagccttgatgtctgctgcacttgacctgcagaaatcaatattatttataatattgtcacaattatgaccacaaattcatctctatacagaagaccctgaatatatgccaaagaaaaaatttaatccataattcagattgttcttatagctaggactttgaaattcttcaggtggtaataattccagtagaaatccaagatgttacatcttatgcatataatgcctaatcagatccagtaaaggctacatccttttgagaacatgttgggccaacagaaacttcaaaactgaaatccagaaactcaactaaatttgtctttagtgtttcaaaagctcatgggcagctgtcattttatatttgtgtggtatttgatgtctttctttctcctttgatttttctggaatataacaaatttagtaacctagcaatgaccactttctataagccatctctaccatccaaacaaaattgggatatctttacttcctggccaattccagatattggctacattctaatagaatttaccctcatttccttcaataccctcatcatttaaaggaaattctctaaaatgtgtcggttcaaacgtctcatagatccttc

SEQ ID NO: 442750 - DNA, 715 bp, Homo Sapiens
  misc_feature (111)..(111): n is a, c, g, or t
cacaagaaggtgctatgcgctctcctgctctgcttccagggaacagaagtagatatacaagaatttccccattgtagtcttgaatcagtgactcctgtatatatttgtacnccaaacttaacttagacttcctagagctaactcctattgtccctgctggcaagggtccacagactgctgttggacttttttgtgggggttccccaggcagaaggctcacaggttttgtgcagcataagtctactgtggcactaccagctgtggcgggggacagacattgtacaggggtgagggaatggcctgatctggaaatgccccagtttggaatgggtcctgggacgggcccctcatggcgtttcccgaaatgaggttcccatctttatcagacttagagtggcactgattagcccagtgttttccttttttacattttggacatatttcaggcttagtagttttcttttttcccctatctggtggcctgacttgctgattttttctacattcttttttagtatgaccatgcttcccacagttaaaacaagctccaggaaatggagtatttcctttatccactctcagtcctgccattgcctgtgctagcaaagtagccttatgcagattacctctgataccatcacaggccttgatataatcaactaaatgtgctttcccttctgtcgtcttctcgcagccgtatagtagtagtagccga

SEQ ID NO: 442751 - DNA, 693 bp, Homo Sapiens
  misc_feature (575)..(575): n is a, c, g, or t
  misc_feature (646)..(646): n is a, c, g, or t
attacatcagcatgtttgatgagtaatagtcacattttatagattaggaaaattaggtcataaagggttcagtccattggttcattcaccatatattttattctggatcatgtactctactagatattgagcagtcaaatagcaataataacaatagctaacattttattgagaacttactgtgtgccaaacactgttccaagcatttgacattcattgtcttgtttattccactgaacaaccttgtgaaggtggttatcatcatccctattttatgcatgaggaaattaaggcacagaaccatttagaaatgtgcttaagggcaggtggctgggaagtggtgaagacagagtggcttcaggggccaggactctgacatgataccatgctgccaagcttctctctggaagttcagggtagcttgcctcaggtcacacaacagcagtccaggctggttcacctgacccaaagcaagctctttcctcagcatcataatgcaattgcacatagtgaagttggagttctattttgaagaggattgggagccaacaaaaggttttgggaggaaaatgatngtgtcccatcaaaattatgcccatattcgagggatgggtccttcattggatttattctgactacgagacancacattcccattaacacttccaggccacacattagtgtggttatctg

SEQ ID NO: 442752 - DNA, 626 bp, Homo Sapiens
  misc_feature (409)..(409): n is a, c, g, or t
  misc_feature (420)..(420): n is a, c, g, or t
  misc_feature (466)..(466): n is a, c, g, or t
  misc_feature (475)..(475): n is a, c, g, or t
  misc_feature (484)..(484): n is a, c, g, or t
  misc_feature (516)..(516): n is a, c, g, or t
  misc_feature (532)..(532): n is a, c, g, or t
  misc_feature (553)..(553): n is a, c, g, or t
  misc_feature (601)..(601): n is a, c, g, or t
gttatttcaggtgaacatgcagatttattttctctgcctacggctacttcgttgtctattccttccctgcccatcattatccttccctctcttttatgacacttgtatgtctccatgtccatctggctggggtccctttgatgaccctgttctccctgctcttgaattagagaccggtggctattgctgagcctgtccccgccacagggccttcttcccatggtgccctctccttggactttcttcttccagtttttctcatgggtggctgctcagcattcaggtcatgtcagctcaaatgtcacttcccccaggaggcctgccctgatcacctccctgccgagggagcccgtccttgcccaggcacaacctccgtacctgggtatctccctcatagtgcagctaactntctaaatgatngctgtttcgtctttgccatccttcttccccccgcactggaatgcangctctgcanaactgaatncctgggtatccttaaagtgactggcacacaantgggcactcatatatnattgttgaagaaataaatcanaggcagagacaatgtgccacagggccttctgacccccagccactggcntgtgactacgcgatgtggttcctgg

SEQ ID NO: 442753 - DNA, 724 bp, Homo Sapiens
  misc_feature (56)..(308): n is a, c, g, or t
  misc_feature (312)..(341): n is a, c, g, or t
agaggcccactatgggtggtagaagaccacaaaactgtgcgcagtagctcatgctnnnnnnnnnnnnnnnnnnnnnnnnnnnnnnnnnnnnnnnnnnnnnnnnnnnnnnnnnnnnnnnnnnnnnnnnnnnnnnnnnnnnnnnnnnnnnnnnnnnnnnnnnnnnnnnnnnnnnnnnnnnnnnnnnnnnnnnnnnnnnnnnnnnnnnnnnnnnnnnnnnnnnnnnnnnnnnnnnnnnnnnnnnnnnnnnnnnnnnnnnnnnnnnnnnnnnnnnnnnnnnnnnnnnnnnnnnnnnnnnnnnnnnnnnnnnnctcnnnnnnnnnnnnnnnnnnnnnnnnnnnnnnttacccaccaacgactcagggaattaagtcttgaagctgggatcccttttaccatccaaatgccttgggaagaaggccggcagaaggcctccctgtgtcagctcattacccactgttgagcatgacagcttagagaaatgatgggaaaaggagggggaatatgaaatgagggcctgtgtggacttcacggggttggaggggagaaagagttggcaccaaagaggcaagaggaagaaaaggagaacagactggagtcacaaagaccaagtttgtgtaagagacagcgagagacaaagaagggagcccaggcagggaacagcgggacaggcggctcctgtgcttgaggagatcaaggaccagaggttcaggacagtgcgtttgga

SEQ ID NO: 442754 - DNA, 863 bp, Homo Sapiens
  misc_feature (852)..(852): n is a, c, g, or t
ccattgctctaaagaaaagcatacttggccgatcagtcccttgagaaagacttttgtttttgattttttgttcacttctgagcaatgactctacatcctgagtacacggaagccctctctcctcaacttgatagcagtgctctttagcacagccagttcccggctcaggctgttttctggagggatgtgtcctcctcttgcagccctgtgaactaactgaaggacagctgcagcggtgcatctgaacctgcagcggaggcagctcaggtcctgcctacagcatgcacatgtgatgccaggggctttccaccatgatttttcactgacatgatttcctttcattcaccggtagctctgccttacctgtagagctcaagctcctagcacagaacacaggggctgagtaaaggcttctaaatacatgcattcaacaataagcacattcattttgctataaaccataaatattacactcaaaatataacagtttctaacaaaataaaaagtttacccatttcttcatacttaagaactacaaaagtactatacaaacctttatttacattaaatcacaataggtacataaaaagttgaggcactggtatctgtggctaatggtagtaatcacagctcatatagtaaagtgtataacattaaccttttaattttgagctgttgcaaaattaccattttaatattatatataccatatattcagtaccaattatgacttttttctaaaataataatagaacatgatgcccagggaaaaagaaaatacttaataactttcccaagtgctagtaaaaaacacattggtatacacctgatttgaggggcagacatgattcngaccatgtgcg

SEQ ID NO: 442755 - DNA, 461 bp, Homo Sapiens
  misc_feature (265)..(265): n is a, c, g, or t
  misc_feature (327)..(327): n is a, c, g, or t
gagatttcagacagttttattaggagattgttgaaaaggaaaagaaaattaaatacaataacagtaaacgtggttctcacattgaaaccaggctcaaataactaggctaccatagaaaaatttccaattcttgcattatgatgtaaaaacagatttttgtacagattttgtacaacaaaattcgtaataaccttttatcatttttaggaaaactttaaatatataggataaaaataggacaattttcatagggtcctacatgganggatgaggtatgttctgttccaggggcttgcataggggcgccgggtgactctatgccggggngcagagcaatggctgattctactacatatgtaagttgtaggcttttttaaaaatctttcaaaaaatgtatgatgcaaaaagcttgacacaagtccattcaattttaagtgttgtatcctttaaagcctgcattt

SEQ ID NO: 442756 - DNA, 724 bp, Homo Sapiens
tttggagatttcagacagttttattaggagattgttgaaaaggaaaagaaaattaaatacaataacagtaaacgtggttctcacattgaaaccaggctcaaataactaggctaccatagaaaaatttccaattcttgcattatgatgtaaaaacagatttttgtacagattttgtacaacaaaattcgtaataaccttttatcatttttagaaaactttaaatatatagataaaaatagacaattttcataggtcctacatgaagatgagtatgttctgttccaagggcttgcatagagcgcaaatgtggttataatatagaacaactagacattaatatttttaggattacaaaagcatggaaaccataaaatgggcacattttacttgtttatgccaaaacacaaatttccaaaccaacctgtataactaaaacagggaaaaaattaagttacagacttacaataacatttcatgaattgtaatatttacaacatgttagtaagagtctctcttaacatacagctgatagcttttttctttaatccttgctaaaatttccttttatttcaaatcaaacactaaagcattctcaaaggtcttcaaatatgtattttaaaactatttaatccacataacaggtgactctatgccaggagcagagcaatggctgattctactacatatgtaagttgtaggcttttttaaaaatctttcaaaaaat

SEQ ID NO: 442757 - DNA, 701 bp, Homo Sapiens
  misc_feature (18)..(18): n is a, c, g, or t
  misc_feature (70)..(70): n is a, c, g, or t
  misc_feature (89)..(89): n is a, c, g, or t
  misc_feature (118)..(118): n is a, c, g, or t
  misc_feature (132)..(132): n is a, c, g, or t
gaaggtaaagagatattntatttaataataaaaaggtcacctgctgtcaatatggataaattgcatttanttaaacagtattttattanaaattcttgctggtatgagtctttgaagnaagagatattaagntccagaaaatcagcttaagatttctagcaatacaaaaatactcatattataataacaatataagggttttgaccatgggaagaagaaaatatgagattaaaggatgatcagaacaagagaataaatttcctgctatagtcaaattttgagattaaaaaagaagaaagaaaaatccaagaagcaccaaccagtatccaaaacatctgagtaaatgtgaggaggtacgtttgagcatcatctgcctcttactctattctctctggaacttgaggccctgaggcttttttgcttagtactactctcacataagcaaacatatgtagaaattattaaataataaatttttatgttaatatgctttactgttagtcagatacaaggactagaaactaaatccaattatataaaagaagttacacattatttcaattaaatcaagctacttcattgctatttatagtgaggcctgtgacaaagtactctttgcaaaatgtataattgacttacctgtgtatgcaataacaaggttacttgcccagctggagcagagagaactagttctctctctc

SEQ ID NO: 442758 - DNA, 701 bp, Homo Sapiens
  misc_feature (262)..(554): n is a, c, g, or t
  misc_feature (565)..(565): n is a, c, g, or t
ataaccttttgattttcgagtagttttatttattattgctatttcttctgtaggtaagtgactcccatgcagtgattgccaaatgggctttcttcccaggtcctctgaaagaatctggaggaaatgatgatgctcaggagacaattcatgatcactcggaatttctgacaaccatggcaagtatgatagcaacaaagagataagctttaagcaatttctaaatattgtacatttccgtttatttagattatcatcacaatgnnnnnnnnnnnnnnnnnnnnnnnnnnnnnnnnnnnnnnnnnnnnnnnnnnnnnnnnnnnnnnnnnnnnnnnnnnnnnnnnnnnnnnnnnnnnnnnnnnnnnnnnnnnnnnnnnnnnnnnnnnnnnnnnnnnnnnnnnnnnnnnnnnnnnnnnnnnnnnnnnnnnnnnnnnnnnnnnnnnnnnnnnnnnnnnnnnnnnnnnnnnnnnnnnnnnnnnnnnnnnnnnnnnnnnnnnnnnnnnnnnnnnnnnnnnnnnnnnnnnnnnnnnnnnnnnnnnnnnnnnnnnnnnnnnnnntgagccaccgngcccggcccaacacaatgggatattataaagtcaatttttttatggcgttgagaaagataacttttaaaaaataatgggtattcttgttgtacacagagataaagtacgtatgatgatctttgtgcctttgctatc

SEQ ID NO: 442759 - DNA, 625 bp, Homo Sapiens
  misc_feature (100)..(112): n is a, c, g, or t
ttttttttctggtttaaggatactttattattgaaccagtatgtacaaactctaacatgaaaataatgagtcacagaatatcaagactatttacaatacnnnnnnnnnnnnnacaaaacatttttacaagattacttctctctaaataatgtgacagacatacacaaaaatccaactttttttattacatacataaataaatattgactttaaatgaccactgtaagggacatgaattctacagaccacttggatgagaaggtagcagttttgttatctgcacactacaatataattaagtaaaggggaaaagtaactttatatagacctctgttaatcactccgtaaatcatataactcactagaatattcagtagaggtaagacagtcatgagaatcctctccgtacctgacaccgagtctgaccatgcaaaatcacaggtaagagtctacatctttatgtatctgtttatattttataataaactttaaagtacgtgcaacagatatttagccattgtgttctgcctataatatgaaagtttatataataagttttagagttatttgcaaccatagaaatgagtaaacttgaaaacccatggcataagaaagggcattaaat

SEQ ID NO: 442760 - DNA, 568 bp, Homo Sapiens
gagagggttcaaaactttcctaaccattacaaagcacagcacttcagtctgtggggcacagctgggcacagctggaagacagtagttaggcagaatctgcagcaaaggtgctgttgacttatgcgtttgagaacaaagagtctggactgatctaaagtgtttatgtgccataaatctgagagagcagcagacatggggagcaccagctactgaccacgtcaaaagcatctgttccctttctacagtatggcaaagggctgtccactcatagtggcctcttcagcctaagctaccacccaggtggtaaatgccatctgcagggtcatctttggatgaccaaaggcaggaccccaatttctgtgattctgtggggaaaatctggttgttctgttttcttatctgcctcccttcaggatgggaaagaaaataggcagggaaagcagagatagagaggtgcttcccaatagtgtccacaactcttcaggttccagagtagtgtttctcaaactttaatgtgtatgagaatcacctgcaggtgatgggttaaaataaaaatttaaatatatgg

SEQ ID NO: 442761 - DNA, 347 bp, Homo Sapiens
tggagagatctagttgacattttaaaatataggtctgaaacctacaggaaaatattggagtaaaaggagcacaggaaaagtgtgcagagcattgttacccaaagtgctgtaggaattttatacacatatgaatacaactcgcaaaactcacaaatatttttgcttccctggatcatttactggagtcttttacatacacattctgaagtataaggtatgcagaattttctaaacatatcatagaattccattccaagaatacatttcaggaaaactattgtcaatcagggaaacattggtgcagaatagtaagaaaataaatacccattaagactagtacttacgga

SEQ ID NO: 442762 - DNA, 693 bp, Homo Sapiens
  misc_feature (54)..(54): n is a, c, g, or t
  misc_feature (58)..(58): n is a, c, g, or t
  misc_feature (126)..(127): n is a, c, g, or t
  misc_feature (143)..(143): n is a, c, g, or t
agaagcatcacagccaaggcacttcagcttccttgctaacccactggctgagtntatntgtgaatctgcaactcagattcaagttatgtgtgctggacatgctgctaaatatctatatatatattnntaattttaggcccatnttaaggccaaccatgtattctttggctatgacaagaccagttgaccagaaggccttatcaatacttcagtaaccctgaggtctcaccttataatacctcatctcagaaactgtggaattgtaggtcaactgtgtattgaatcgataatttgctgctgtctagttcttaagagtgattcattgctttttttcatcatcctcgttgaattcagtttcctgcaaatatctgaactctgggttcttccagatcatctgttccgtggatgcttcccaatcaatggctttaagcacgtgaaaatctcaaccaaaaatacctgatgatagacagaaagagatgggagtggaacatggaagagaagaggaaagcaggaacgagaggaactgaggaaaaccagctgggtcatcaaattattaaaaagacaaacatttcttacctaccagattagtaaatatcagaatcttgctaatatactgtgttggtgagatgtaggagaaattgacatgctcatatatggctagtgagagtgcaaatcagtacaatctcctatgtt

SEQ ID NO: 442763 - DNA, 125 bp, Homo Sapiens
ggaagcccaaccaagatcagcagagctgtctatccaacccgaagttcactggaaattcactgcagagacaggaatgagcccacttgagactggaagagtcagatggttttatctgtagacttacg

SEQ ID NO: 442764 - DNA, 649 bp, Homo Sapiens
  misc_feature (541)..(541): n is a, c, g, or t
cttcatagtaatagtgaaaattatattttcttgttcttaatttacagctgaagagactaagattcctagaggttctaagtggaaaagctatgtttcttttctctagatgcctgctagtcaggagggaaacatctgaaagtccagttgcttctgagtcatgaaaaataatccaaaggtattagaaggcaagagagttaataaagagagttaagttactggattttaccttggcatttctctaaagctgttaaactggatacttagattaattcgggggactatgatgaccaagtcctgtgatgattgtggccgtgatgtagagtggataatagtttgaccttttcttgatcccagtattgcatcatcctcttgagaaatttatggatatccctgtactcacaggtaaaggacagtaagcgctaggaccaagggctttaaccagaaaaactgctgaataaacctggggtcatgggttttcagcgcgatgtactttagggaagatgagagggtgcaaggaaattttgggtattaagagagacangcttagtggtaaggagacttatgttgtcaactgcttagattggaatctcaccttcacatctatcttgcttggctatgcaagtgatttaatggctttgaaccctcagtt

SEQ ID NO: 442765 - DNA, 270 bp, Homo Sapiens
tttagaaaggacccagaaggtagtggttatagattgaggtcctatacttggacaaggacagagtcagaggggacacccacaggatgctggcttccaacctcttcatcctatttatgtttccattatatgatatctaaaggttcctcctgggctacagcttacagcttttgttttaagattctcctgtttgatttagaattgacaatttctcttattccttaccctccttagactgaggagccctcaggagaagatacacaggaattttgc

SEQ ID NO: 442766 - DNA, 1183 bp, Homo Sapiens
  misc_feature (249)..(249): n is a, c, g, or t
ttttcgggccggtttccggggtgggaagccgggtttttattcctggctggcttgggggcttttctccaggtgggccaggtggctttcccctccgaaaggccacttttttgttgcccactggctgggcccagggccaagggttcaggtctagaagcgccggatgccggggaagttggctgggcccggaccctcgcgggggctccgaggagatgggagggcgtccccgcttccactgttcttcttcccctntgggtccttcttttccggacgggatggatggacctggaggcgggagggaccttggccggggagacaagaaggagacgggcgggcaacctcacataagttggggttgctgcatagcttcttggtgcgctgaagggtaccacgatgtgtagctggggatataggagcccgcgtttcctcctgagcccttcccggatgaagagttagggttccagccgggcggcacgggtggggagccagcagacagggcccgaccgttggccaacgcactaccctccagagccgccccaccctgcttcatcagcttcttgaacttggatcgcttgttttggaaccagatcttgacctgagtctgtgtgagtcccaaagaggccgcgagctccgccctctccggcagagctaggtactgagtttgctggaacctccggttcaaagcctgcaactgcaaactggaataaatcgtcctgggtttacggatcttttttcccttgccattgaagcgcacttcaccgccttccaccaccgtgctcttctccgagtccgcccctggagggacagcagaagtagggcccgttgttaatacgaggggccgcctttagtgcgaacagccgagagcgagtggctaccgaagggtggcggaggcagcaccagggagagaacgttcaagaaactctgaaagccagggaagggtcccccaaaatccgagggcctgtcccgggacgctgcaggagggatagagccgttcccaggagctcagctcctgcctttgcagggaaagtttgctatttttgcaggcggtagttgaggtttaattacccttaattgcatacattgtttatacgcgctacagcaatcaataattaccgagactaactacgtgcacatgtgggtttctgttttccagccggggcattgtgtgctctgcacaccgagccgc

SEQ ID NO: 442767 - DNA, 1240 bp, Homo Sapiens
ggctggtacggcccggaagtagggatgacccgtgcagcctcgagctggagtggccagctgggcctggagcaatgcgagcgggccccaggagcgacagcggcgttggcgcagcggccgaaggagccccggccgggaagtgtggatgcgtctctccggaggccgggccgcctcgcccgctctagtccagcggagcccgagcgcctcggaccaatccccagtgattatgcaagacagcggaccaatcagctccgccagctcatgaatatttatgaccttcgctgagtcaaagctttgaaccgagtttggggagctcagcagcatcatgcttagacttttcaaagagacaaactccattttcttatgaatggaaagtgaaaacccctgttccgcttaaattgggttccttcctgtcctgagaaacatagagacccccaaaagggaagcagaggagagaaagtcccacacccagaccccgcgagaagagatgaccatgaccaccatgccagaaagtctcaacagccccgtgtcgggcaaggcggtgtttatggagtttgggccgcccaaccagcaaatgtctccttctcccatgtcccacgggcactactccatgcactgtttacactcggcgggccattcgcagcccgacggcgcctacagctcagcctcgtccttctcccgaccgctgggctacccctacgtcaactcggtcagcagccacgcatccagcccctacatcagttcggtgcagtcctacccgggcagcgccagcctcgcccagagccgcctggaggacccaggggcggactcggagaagagcacggtggtggaaggcggtgaagtgcgcttcaatggcaagggaaaaaagatccgtaaacccaggacgatttattccagtttgcagttgcaggctttgaaccggaggttccagcaaactcagtacctagctctgccggagagggcggagctcgcggcctctttgggactcacacagactcaggtcaagatctggttccaaaacaagcgatccaagttcaagaagctgatgaagcagggtggggcggctctggagggtagtgcgttggccaacggtcgggcctgtctgctggctccccacccgtgccgcccggctggaaccctaactcttcatccgggaagggctcaggaggaaacgcgggcctcctatatccccagttacacatcggggaacccttcagcgcaccaagaaagtatgcagaacacc

SEQ ID NO: 442768 - DNA, 649 bp, Homo Sapiens
  misc_feature (583)..(583): n is a, c, g, or t
  misc_feature (627)..(627): n is a, c, g, or t
cagaaacccataaacttgtctaagaccaccgaagttgtccaaaggcctgataagtcacaaagaacgtttttagagcgcctccaggaggcttatcggatttacaccccttttgacccggcagctcccgaaaatagccgtgctcttaatttagcatttgtggctcaggcagccccggatattgaaaagaaactccaaaaactagaaagatttgctagaataaatatcagtcagcttttagaaatagcccaaaaagtttttgacaatcaaaagtttaataaacaaaaacaagcaacacaggcagctgaaaaggccgctgataaagcattcaaaagacaaacaaaaatcttagtggcagctatccaagaagtacagaatgaaatagcccattaatttagcattaactgaagcccctgctttagccttccctaatatctccatgccaaggagttgctaaagacgtgcttactcagactcttagaccctaaagacgcccagtggcctatttatctaagaggctagatcctgtggcctgtagatggccaagttgtctgcgagccgtagccgctacagcaagcctggcccnaagagatgataagttactcttagctcaaatctacccttacagcntctcatgccgtagaccttagtc

SEQ ID NO: 442769 - DNA, 679 bp, Homo Sapiens
  misc_feature (612)..(612): n is a, c, g, or t
  misc_feature (637)..(637): n is a, c, g, or t
cgggctgcaggaattcggcacgaggagttatcatgctggctgccatgagaaaaacagacaaggctggggcaaagaggaaaataaactgcaggcatgtcttgcaggcatgtgtctcggatagatgcttggttcaaccaacctggtggtggtagaggaggttagcagtggtcagatgggattttcagagggctcaaactggtggcatcacagaagctgaagtgtgaggagtgaggcatgatcagaatgcaagcatagagttgtcccacgctggtggataccttgcctctcagacgctctgtgatgtgcatggcagaatccagccactgagtgatggactctgaattattaagcgaacatgagagcctctttgatccagagcgtatcttcacatcttacaattaggaaatagtggccaaaagatgccaaaaagtgtaatgtgtccagcaggtcaattatatttgggtttccaacaaacaagaagcaggtatattgctctcatttctccaggctggcagatatgtacagcagttctcccttatctgtggtttctctttccactggttcagttacccatggtcaaccaaggtccaaagatactaaatagtgacaganataaacatttcatgttcagaatggngtgccgtacttaatgtgatgctctagcgtcaccttgcttggt

SEQ ID NO: 442770 - DNA, 349 bp, Homo Sapiens
agttggaaaaagaaaagatttttggatatatattttatttgacagtgttttagaatatcatacagtaaacaagatttctgtaaaagttaatttatccatagtggtacgtttcataaaaatagttgctcacttacagtctttctgtgactattaatacatggaattatatttatagagatacagctgtacagggtaaattcacagctaacactacacaaatattatttggaatgggatttagatgatgtgctgtcttcacaggttatggattacagccgcataaagcaattactgcacaagtagtagctgtgaactgtacaaactaaagtttatgccagtgtaatctcaa

SEQ ID NO: 442771 - DNA, 530 bp, Homo Sapiens
gccaccatgcccagccttgtgttgcctcttggtaagaaataataaaaagaaattagtagcttgtttacctggtaccagatttggagggggctgagtataatttttactgagtggtatgtggttggaaaataggccacatttagccttgaattgtttagaaatcaaatgcgattcagaattgaagaggacattgctgggctatgaaatagggtactaacaaggctatttttgtagcaaaatggccaaaagctgaaataaatcttcttagtctgtgatgcttgtagcatcctttgttaagtaaagcacaacaccctgggacaagcgactagttatgacttccaaataggattgataatggccttgcatgttgtagttagagacactgtagctgtatctgtatacctgtaatatagcctgggaagttctgttgctgcagagttatcattaaagtcacttggaattgaaaagatacagagtgttgagacaaaggactaggctgcacagtcatgctgatgcgatgggtctcactt

SEQ ID NO: 442772 - DNA, 669 bp, Homo Sapiens
  misc_feature (128)..(152): n is a, c, g, or t
  misc_feature (454)..(454): n is a, c, g, or t
  misc_feature (513)..(514): n is a, c, g, or t
  misc_feature (549)..(549): n is a, c, g, or t
atcagtactgcatgtggcattttggaacctattttgttcatttagtgatgtctttccaagtcattagcaattgacttcaccactatttgcgatggcttcatgaaggttcataattaaatgtactatannnnnnnnnnnnnnnnnnnnnnnnnaagttccaggatacatgtgcaggatgtgcaagtttgttacataggtaaacatgtggtttgctgcacctatcaacccatcacctaggtattaagccctccatgcatagctatttatcctgatgctcttcctcccaccgcccttcccaccctgacaggcccaagtgtgtgttgttcccctcgctgtggaatttgaccattttatatacctcatatgagtggaatcatgcagtatttatctttctgtgattggctaatttcacttagcacaatgtcttcaaggttcattcatgttgacacatatnggcagaaatttcttcaattttaaggctgcatagtatttcactggacgtatacaccacannttattaaattaaactttaagttcagggtacatgtngcagattgtatataggtaaacttgttcataggggtgtgtgatagataatttgcacccagtagcgctactgccattagtattttctgatctttcctctccaccctcatcttcggcccaggg

SEQ ID NO: 442773 - DNA, 377 bp, Homo Sapiens
  misc_feature (111)..(120): n is a, c, g, or t
tatgtttctgacatgcgaagtggcaaatatatgacatatgttaagatctcaggaaaccagaattttagagtaataacatttccattttctcactcttcacgaaccacttannnnnnnnnnagtggcatcttgccctcagaactccactcaggaaagtaatacacgtataattattcttattttatatatgaagatgcaatcatggaatggatctgagacttaatccaaattacagagccagataacaccataccaggaataaacccatatattttcactcaatcttgcgaacacttctatggattattatcgcactcagaataacggttaccattattctatttccgccccacgtgtgttgacaggcagtcatcact

SEQ ID NO: 442774 - DNA, 675 bp, Homo Sapiens
ggaaactaagagaacatgtggaatgtgatggatggcaggggtttgaggggcttcttgggaatctctcttctcgctgaacccctgatcctgtaatgggtggaagtagaacaatgacaaaccactcctttgatgcctagctacagatcactaaaggattatttaggactttgactatcagcaggctgctgaggtctagacaagaacctgctcatgggcaccattaaatgagtcattttattaaataaaacaaagcccatgtaaaaattaaggacatgtgttatttgtgttagctcccgagacctaaagttataatgcattttgataggaaagtaatattttgcaatccaagataactgtttacctcttttgtgtgactcagcagtgcataaaatgatactacacacactaaacataccaacaaacaaagccagtaacaacaacatacaactgtaaccactgaagaatttcagtttagtacctgaagaagactttatacttccagaattagactattcttcttcctaaagctatacatgacacacagactgggcctaagctatatttatgcacacttacgcctaataatttaacggcttccttaattcggcttccattctaccacatcatatatcgcatcttcactcctccatcattaccttcatatctgaccagtct

SEQ ID NO: 442775 - DNA, 464 bp, Homo Sapiens
tcctagcctcgccagtgtcctagccttcgccagtgtcctagcctcgccagtgtcctagcctcgccagtgtcctagcctcgccagtgtcctagcctcgccagtgtcctagcctcgccagtgtcctagcctcgccagtgtcctagcctcgccagtgttccagaaggtaaagagaaaatgaaagggataacaaaacaaattaaatagtatctgaaaactttcccaagtctatcaacagatttagacatctagatatggaaagctcagagatctcaaacagatactatgctaaaagatcttctgcattacacattaaactcaaactgccaaaagtcaaggacaaagagataattctaaaaagagcaagagaaaagcatctagtcacttataaagatagtcccacagactagcagtgaatttttcagcagaaaccacaggagagaatagggtgatatatttaaactgtc

SEQ ID NO: 442776 - DNA, 499 bp, Homo Sapiens
tcctagcctcgccagtgtcctagcctcgccagtgtcctagcctcgccagtggtcctagctcgccagtggtcctagcctcaccagtgtgtctcgaaaatattcgtaaatcagcagcaatgaattttttttctaagttggagagatcacagaagcttcttttttgcccacttttctgtctcaatttctcttaaatgaaccttcactggttttgatttaagaaaagaggtttgtttaatgagaaacgtcctttcactctgtgaaaacctcgtgtggattatacataaagggcagagtcaggtgccgggggcgcattcaggaagtgctcagctggactctgtcctcggacaccgcgccactgttacatggagaagtcctcccggaggtgaatcccgctgatagctgacacatgttggaactgtgccggaaggccttcccacactcgctgcacttgtagggcttctccccggtgtggatcctccggtgctgaatcaagtacgtg

SEQ ID NO: 442777 - DNA, 979 bp, Homo Sapiens
  misc_feature (29)..(29): n is a, c, g, or t
  misc_feature (35)..(35): n is a, c, g, or t
  misc_feature (47)..(47): n is a, c, g, or t
  misc_feature (72)..(72): n is a, c, g, or t
  misc_feature (342)..(342): n is a, c, g, or t
ttaaaggccactgttggaacaaaaaacangatggncccttaaggaantggcgggcaaggcccccagttgccntctggtgggaaaaatcaggctgcaaaccaaagcggcccagcgaaaccgttccctcgaaggcaacaaagggctccctcctgagtcaggaaggctggcgacagctgtcgggctgggggcatgcagggccggcgacagtgagtgggcctagggggctgcggccagcagctgacccaggcagccctgagctggtgcagggaggtgctgggtttccagccgtgcctccctcaagaggatgccagtggagaagtaggactgtttctgtaaaggagngacgcggagcgggtggtcgcatactgccctcaattcagactgtgccctaattccctaattcagagtttcacaagcaagacttgcgggcagcaaactctaccctccggaactctcctggccacctatgtggctcaggcagggccaggcctgggctctacctctaaggagggtctgtttcctatccccagagctctggaagccacgcagctcatgacaacctagaagcaagactgctctgcaacccagccaacctagaggccaagtctgcagaaaagcaagaatctgtggggtctctgagttgaacaggacacaagaaggttccaagccacagcaagatgcggcctggctgcagcacactgcgcagaggaaggagccggggaggaggaggctgggcgtccatgcatcaggggaagggccgtggggctacctgctcctccactcagccttcggtccttcaagtacgcaactaagagagaagacagagccggagagggggcggggatgggggagacacaacacagtgaagagcgtggtccgctgagtcaagggcattgagatgagccagagagatgggacaaaggacaggcactggcgaggctaggacactggcgaggctaggacactggcgaggctagga

SEQ ID NO: 442778 - DNA, 728 bp, Homo Sapiens
acctctgatcctcacatctatccgcattctacccatctcctcctccctctcatattccctggacccccggaatttttgaaattgaaagatcaaatcataaagaaatgagtgttaaataggttctagccattttgacaaatgttgtggaaagtatttggggaaaaatagtattcctgatagaaatttttgagttgcaccgtgaagacgataggattttttaaagtcaataataataataatagttacctacttagagagcccttactatgtgtcaggtagctggtcatatctcctttataagaatattatgagactgtctatgaaaatagtgaaatctctgaaagtattgtcattaggcataaaactacaaaatgatattctttgaaagcattgtttttaacaaattgaacattcttggtatttttatgtagctttaatatgcctgtctgttggacatttaaagctctatgcaattaccaaaaagggtatatgttataaagaacacaattgggggactaacacacaatgggtggtaattctttcgtaaatattaactaggcataaaattggattataaaaaccataaatactttaagggcccaaaatatgcttcatttttttaaagtttgaaattacaaattctttactcccgcaaccgggcagccgaacatgggccttattacccatccgtcattacggcgggaggctctactcccagatgtctgggc

SEQ ID NO: 442779 - DNA, 692 bp, Homo Sapiens
  misc_feature (465)..(465): n is a, c, g, or t
  misc_feature (502)..(502): n is a, c, g, or t
  misc_feature (578)..(578): n is a, c, g, or t
  misc_feature (582)..(582): n is a, c, g, or t
  misc_feature (599)..(600): n is a, c, g, or t
  misc_feature (642)..(642): n is a, c, g, or t
  misc_feature (646)..(646): n is a, c, g, or t
attccatctatgagaaatctctctgttcagtcaccataagccagattgaagcaatgtagatagggtttgattgctaagaatggcagcttcaaactctatggaaatgaggaaatttgaaagagagttcagtttcagccaaatcatgcatgtgaggtaacgagacatcttttaaatgcagaacaaattgctacgcataggactgatcatcttattctccactgttgatggaaacttaggcagagggatttcattatgcaaaaacatcatgtgtttcttttttcctgtacaatttgagggcagaattgttggcagtaaatcaaataagtcatactggatgtaagttaaaatatagccatgtatccttagaaaatatttgcatatgtagaaagactggaaccttaagtagcagccatgatgaacacagtggaagaattaataggtgttggtaacagtagtaacactganatgaatcacagtggatttatgtaatacatgtgctatngaaggggcacagtgatacacttgaaaacattgtacatatagctaagtgtcttagtctggttcttggtacttagaantaanctaatctgggtgatttnnataataaatatgtcttatagaagctaagtcccaaggtgaggngctncttttgtgagggccctcttgtgtgggactctcttggtcctgggcgg

SEQ ID NO: 442780 - DNA, 1288 bp, Homo Sapiens
  misc_feature (1234)..(1244): n is a, c, g, or t
  misc_feature (1269)..(1269): n is a, c, g, or t
atttctcgtgtgttaatttcgtcgcgctgccgcatgtcttccgcccgtgttggtgtctctcctattctcctcgtcagtgtttcgctcttcatcgcgtctgtataactgcgcgcgtgtgcttctctttgtacgcacccccttttgtggcctgttgttacgcacgacattgggggtattgttattgttggctcccctggcggatcctttttgcggcgccccctcttttcttgtgttctactttgtgtgtgttttgttttttcttggcttgctaagaaaatttaattagaataggaagctaatacatgccagataaccccttaggatacacacacagcgaattgaaagataaaagtttgaaactgtgtcaagagtgaaacaaagtgcatatctcatggagatatatttgctagaaacaacatgaaacaatagagcaatcatcttgaaaatgaaaagtataggaacatataggaattactaaataataaaaaggtccaacttcattacatgtagcataaaatacaagtattggagaaagtggaaataacaatggtcatatgaaatctactagtcattcagattgtttcaatatatacagtatatgcggaccttatagagaaagttataaatatttattgtttttgtgtatgatgactttatcttaaatgtaatctctaaatgtaaaatagtgctttatggtgatatcagaatttccctaatttttaatctttcttgttatctgaactgttttctaattctgatattgttggaaatgtgaacaagtttctgcaaaatgtgaaattggtaggaaagaggtaaaaaactgattttgcaatgttgaaaactcaatctgctgattttaatttattctctatatattgctatgaagtcacgtcttcaacaattttttgaaaaccacatattgaaagactgagtcatacatatcaaagtcagcagcattgccttggttctattacaaatttaactcaggaactaaaaagcctgccagactcactcagatagatggtgggatttcattaaaaaaccatctctgccatccaaaaagagagggtcccttaatggaattggaaattgaaatgagggattatgtggattttgtttaatatttgggttgagattcaggtcattcctgattttttcctctaggttttaataaaacctgaaagcttattcatagctgtgaaggaaacaattccttttttaatttaaaaaaacnnnnnnnnnnngagaaagaataaaatgtgatcattnaattttggaatatagactg

SEQ ID NO: 442781 - DNA, 349 bp, Homo Sapiens
gtgcttttaataaacataataggaaaagccatgacttaaaatgcaaaatccatcaacaagattaaattatatgtatgtagtagcagaataaatagatgatcaatagagaaactcctacttaccaataggtgtaagtccgtgctttaaagactcttgtaaatccccagtatctgaattagaagacattcttagtgaaattataggcagttctttggcttaaagcagaaatcattgagcaaaagaaaagtgcagcttgtcaaatttcgtggccttgggaaggacacatcagactacagtaacccttagtgaaagttaagagcaaaggacattcccattagtgcctgctgtc

SEQ ID NO: 442782 - DNA, 556 bp, Homo Sapiens
  misc_feature (312)..(312): n is a, c, g, or t
ggaaaaatagtttttcagttgactaagttgtgttatctagaaatagcctcaaattataagtttactttttcctttctaatttttatgcttactattattttctcttgtaatagcattagctagtacagtaatccagaaacatgttaaataatttttcatgataatggtgatagtggacttctttgacttggttcctggtcattatagaaatagaaatgcttcttcactaagcatgatgctgggcttttggggttggtgtgggcatgagacacacccgttttatccacattaagaaaatacctatccctattnctttataatctatggagatttttctttgatctcatattgcatgatatattaaacagattttgaatatttaacttattttacattcttgaaatgatcctaacctggtgtggggtatacttaatttaaatatctaacatttacaatttttgcatagttagaaaaattgaccattatttaattctttatcataaatgaatagcatgtacagcattggttggaatggctccatggtctagagttcatt

SEQ ID NO: 442783 - DNA, 1066 bp, Homo Sapiens
  misc_feature (505)..(505): n is a, c, g, or t
  misc_feature (524)..(524): n is a, c, g, or t
  misc_feature (542)..(542): n is a, c, g, or t
  misc_feature (544)..(544): n is a, c, g, or t
aagggactaaatccagcaaaaacttaagtgaaaacaacctgaggaaaagctgtagactgtgagtcaagatggggaatggcaaatctatagctggtgatcagaaagcagttcctacacaagagacccatgtgtggtacagaacatttatgatggaatatccatccggcctgcaaacactacatgaatttaagacacttttgggtctgcaaggtctgaatcagaaggccaataaacatattgatcaagtttataatacctttgacacgaacaaggatggatttgttgactttttggagtttattgctgctgtaaatctaatcatgcaagaaaaaatggagcaaaaattaaaatggtattttaagctgtatgatgctgatggaaatggttctattgacatgaactactggacatgttcatggcggtacaagccctcaatggccagcaaactctgagtcctgaagaattcatcaacttggtgttccataagatcgatatcaatgatggngaattgactttagaagaanttatcaatggcatggcanangatcaggatctcctggagatggttacaagagcttcgacttctccaatgtgctgagagtaatctgtaatgggaagcagccagacatggagacagactcctccaaatctcctgacaaggctggtctagggaaggtgaaaatgaagtagctgtgagaatacctgtcccagctatcaatgagcacaacatttcagtagagaagaaatagaatcttctccatgtacatgctgttgatttcaggtctttgttataattcatataggcttgtgaatatagcacttattttaatccagtagagacttgcataaagatcctaaacagatgcattgttgcttttctgtgctgtctctgcagattaaaacataatgattacactaaaggattgtctccatacctatctgttcaaattagagctctcatatgtgtttccttgtgcacttaatctacaccttgaaatagatctgggattatccattggaaagtgtctccacagtttagcattcttaggttaaacatccatgtggt

SEQ ID NO: 442784 - DNA, 626 bp, Homo Sapiens
  misc_feature (351)..(351): n is a, c, g, or t
  misc_feature (355)..(355): n is a, c, g, or t
  misc_feature (398)..(398): n is a, c, g, or t
  misc_feature (531)..(531): n is a, c, g, or t
  misc_feature (537)..(537): n is a, c, g, or t
  misc_feature (542)..(542): n is a, c, g, or t
actggcatttatttattaaacatttgcatagcacttaatatgtagtaagcactgttttaagcactgtaaagtattaatttatttaattctaatagcaaccctatgagataggtattatttatatcatccacattttaaatctgagatggaaacattgacttaagaaacatgtccaaggccatggagcttgcatttggactcaggcatctggtcccagaatctgtgcttctcccactatgatattctgcttcttatttattctgctctccctgaagatgcacataatggaaatgaggtctcttcactgcatctctccatattgatttatgttctccagtttaaatttaattntggnggtgcttaccccagtgagttagcctgctttggtgcagagacanaccaacctcgaatctccgtagctgactgcgaaacacgtattcttggccacttacatgccagcagtcgtaaatcaccccgtgagggctctgtctaattctcttctcattctggcgggaatgtatacccagcttnacaagnaaggnagctaatacatggccatcatacaatttgcacgaccattactaagcccttgtacattggacagtccttctttgccgtacagtatc

SEQ ID NO: 442785 - DNA, 1144 bp, Homo Sapiens
  misc_feature (1066)..(1102): n is a, c, g, or t
tgtttcttattgtcccctttttcctggtctcttctgttcgtgtaccatccggcttccaagtgctctttggactcccccaggtcagcacatgagtcttctaaaatatgcctcccagagtcagtcaccgggattctacagttgtttctggtgatccaatgttctgtaattcactaactctccgccctctgagaaccacttgggaaattttggctgccatctcgacaaccattgctaccaattttttggagcatgggaaacccattcctgaagtgcttggtgcttcttcactgtcatcatctgaactctcagagttggacccttctgcagtctctagtccctccatgcccaaccagaagcatctcctctttcccgcactggctcctctgtctgtttgagatttagtaggcctttgcccgtttccgattcttcactgattttctgctgaaaccatcttgctggaggcagcctgcatacctttgaggacggaatcctccagacgctcagccatctcatggcactgctgctggtagtcggggctggtgaagcagtgcttgggttctacaagcttccgctgcagtcgctccagccgcttctgctccttttcagcctctcgctcggcttgttgttttacccattcagccattgctttttcatgattgacatcgcgtagtctccttccactgagatcccgacaagcttctcgattggttgtcttctcaatctgagcaccaagtgctcggagcatagatccaaaacctccttttccaccgcaaagtctgggttccaaactataaacagctccatgctgcactgtgtcactggtgttaatgagtgctccattgcatttcacaaagaagttttccactggaacattctgatcttggcagtgccggtggataaaatcccggacggtgcaccgacccgaggcacaccgcaccgccttgcacccgaagccagggccgcgaatccacaccagcgccgcggcctccgccatgtcaccgactacccgaacctcaagcctccctccgctctcgacgaattcgagctcggccgatttggcctgatnnnnnnnnnnnnnnnnnnnnnnnnnnnnnnnnnnnnncgccgccccgcggtgaatccagtgttccccatagtagtatca

SEQ ID NO: 442786 - DNA, 408 bp, Homo Sapiens
tacagaaacaatgtttccaaactgctcggtcaagaggaacgttgcactcggtgagttgaatgcacacatcacaaagtagtttctgagattgcttctgtctaccttttatggaaagatattcccttttctaccataggcctgaaagcgctctcaatgtacccttgcaaattctacaaaaagagtgtttccaaattgctctatcaagagaaatctttatctcggtgagttgaaagcacacatcacaaagaagactctgagaattcttctgtctgggtttataagatgcccgtttccaacgaaggcctcaaggaggtccaaatacaaacaagctgattctacagaaagagtgtttccctgctctctcaagaggaatgttccactcggtgagttgtgcagacatcacagagg

SEQ ID NO: 442787 - DNA, 677 bp, Homo Sapiens
  misc_feature (304)..(312): n is a, c, g, or t
  misc_feature (434)..(446): n is a, c, g, or t
gtttcatcctcaaattacagagatcttgtttttcatttttttaaactcttattattctcaatcacaatcataatacatgatgcaatgtaaaccttaaattatttatttaatcttactacactaatcagctaacaagatctctgtcttcttagatcttggagcctggaaaaacccagttattaatccccactatcccttcccaaaattctctggttagctgacatgttaataagattccaagaatgttctaaagaaagcaaaatcaccacaaaaaaggactgtgttctgaaagtaaaaactgtgnnnnnnnnnccttctctcataatttatttttaatttaaattctgtccttgaatgtgtatacataattatttggtcaggctgtgttcccttataatcaaatataaccactgcaagccgtacaagatattccnnnnnnnnnnnnngagacagctctgcacccacgctggagtgcagtcggattgacctcgcttaactgcaagctccgccttccggttcaccccattctcctgcttaccttctgatagctggaatacaggccccgccaccaacccggctaattttggatttttagtcacggtttcaccggcttaccaggaggtctcaacccctggactaaggatctcccccttggctcccaaggcctggttcagcct

SEQ ID NO: 442788 - DNA, 384 bp, Homo Sapiens
aaaagaaaggagggtatgtggaacaaggggactaggcaaaatagtacactgctgcttggctgcataatcagtaatgccaggcttcctgtggagtagaaatgaattaatgtatatgaaaatggtaagccacaaagagctacacagaagttaattacagttactaccataattaaacaactgtactcctatcaaaacatacagcgctaatgacgtttctcaaaagcaagatggcaagggactaaaactttcaaacactagaagttaaagtcagattccatttcttttaaaagctctggagggctaggaagtacgtcacaaataattgcattgataatgatgatcaaggccggtgtggtggctcacacctgtaatcctagcactttg

SEQ ID NO: 442789 - DNA, 517 bp, Homo Sapiens
caaaaacgcccatagtattttaaattttacaaaagggctacaaagcggtcacaaatataaaacaaacatgtaaatataaatccattgtgaaggatctcagaaactatgcagcagattttttacaatatatctttttgaatggaggtggtattttctgtcagtctacagtgttcaaatttttgttgtgaatttgatgcttttgtaattaaaaatgtattaaaacatttttaattaaaggacttgtcaggatataaattaattactggccatatgaagtatgatacaaatttttacttttctaaaacaagcacaagtcccctttttgcctctgaaatatcagctttattcaacaccttttggctgggactcagaaatgaaggggattacacattttttctttattctgacatgcatttccattaaatacatgttttcgcttgggttcatcaacagtaaccttcagggtaagtttttcctaccaatttcaggtctgcatggccaatttcaggtctgtcgt

SEQ ID NO: 442790 - DNA, 719 bp, Homo Sapiens
  misc_feature (126)..(137): n is a, c, g, or t
  misc_feature (457)..(458): n is a, c, g, or t
  misc_feature (466)..(466): n is a, c, g, or t
  misc_feature (521)..(521): n is a, c, g, or t
  misc_feature (536)..(536): n is a, c, g, or t
  misc_feature (562)..(562): n is a, c, g, or t
  misc_feature (564)..(565): n is a, c, g, or t
  misc_feature (576)..(576): n is a, c, g, or t
  misc_feature (581)..(581): n is a, c, g, or t
  misc_feature (585)..(585): n is a, c, g, or t
  misc_feature (614)..(614): n is a, c, g, or t
  misc_feature (626)..(626): n is a, c, g, or t
  misc_feature (634)..(634): n is a, c, g, or t
  misc_feature (636)..(636): n is a, c, g, or t
  misc_feature (660)..(660): n is a, c, g, or t
  misc_feature (678)..(678): n is a, c, g, or t
cacgaaccccctccagcatgaccctataaagcttccttccagcccctgcctttttggagacagtcccttttctgctgtgctgcccgttgcttccttgcaacatactttccttctaataaatctgcnnnnnnnnnnnnaaaacctatgactgccttggcaaattcctttagcactcatgatccccgctctagtcatcacacctgcaacaggccctgcatcaaaacaggtgactgagctgttccaagtacatcaagcccatccttcagtgccttcaatgcctcctatgactcagattgtgtgtggatccagccatgtgcaagaccctcagcccctgctcgggaagaccttttgactgagcaggcattttctcagctttcttatggtcttaatgtatattatcatgtgtaaattaacataattatgcacatctgtatctcctttagtgaaattcaatggnnataaatanaataagttgcttaaggcagcacatatttgcattacatttaaacttctgcatattngagaatatatctatngtgccatgggacataatggccacttngnntggtagagaantcatngtanattgcctgttctcctgggctgacatcttncagactggtggngaagtgtngnccagactggatattttcctccttngtggtgaagcaacttgantgtaatgatagtccccggttcttgggttgatccttcttctt

SEQ ID NO: 442791 - DNA, 750 bp, Homo Sapiens
ccaaatttcaacagccatttattttgtgcatcatttaattcatgtatgggttctatccactttcatcagttaacattcttgttgacaaaccaatttacatcaacttgctatagaacagatgaaaggtatacatgggggaaaaatcaagtagaaacctagagttattttatgttagctcagttattgaacataacagacacagaagtatacacaaagaactgtagtcagaataacaggacttcagaataaaaagcagaaaataaaataccggtctttattttacaatatgtataattatataatttattaaaattaatttaacacaatatacaaaatattaacagtagtcacttttagattcgataagcacttcaaatacagaaatgttaaaatggcaaaactatactatgcaactttcaattcaatgaatctagctcactagctcaggctgaacattcactctctgaagcacttcttcaggcatgcaaaagacaggattaacaggtttaatctgttcttctcccaaaagtgacaatccagcaattccaaataaggtatgaaaaggatccaccatatctcctggcctgtctgcaaatccccctgtttcttcatgcttgacatgctaaaatgaatattacgcagatttactcgtctatcaagtccaatgaagtcttccaattatctttagggaagccaggacccagcatgagtagcatacatctggtaacttctccggccttccattgagcc

SEQ ID NO: 442792 - DNA, 328 bp, Homo Sapiens
gtgtgaaccactgtgcctgcccagcatcctgtatttttgacaatgtagtttgaattgataacaacttagcttcaacaacatgcaaattctctgctcctatacagctgtgctccctctttatattgttattgctacagtttccatttgtagatactgtgtgttcattgacatagattcataattattgtttaatgcatttaaaaaaatcacatgtgaaagagaggagttacaaagcatacaacccaataacaatagcttttatattttgctatgtaactagcattgtttatttcttcctatggcttcgttgcatacagtgctctatctt

SEQ ID NO: 442793 - DNA, 1059 bp, Homo Sapiens
  misc_feature (881)..(990): n is a, c, g, or t
agcgggttgtcgggaaggggagaaagaaaggcggaaggggtcgttaatagctgaggcgaggtgcggagtcgtggagggggcttaggaagtgaccagcgggagacgattgcctcgagctggagagttccatggctgagagtaggctccgggccccggacctaggagtttccaggtgtctaggaaaatgccagaagaactcaccaggtgccaggaagcatcccttttccggaaagtccttttacttggatctgcctgctggcaagaatctccagtttttgacgggggccattcagcaactgggtggggtaattgagggttttctgagcaaagaagtaagttacatcgtgtccagccgcagagaagtaaaggcagagagcagtgggaaaagccatagaggctgccctagccctagccccagtgaggtcagagtggaaacatcggccatggttgatccaaaaggcagccaccccaggccttcacggaaacccgttgactcggtgcctctaagcagagggaaggagctgctgcagaaggctatcagaaaccaggtgagctggggcaaggtgggacagagccggtggtctccagcatagggagggatttcactcttcttcccaggttcttctgaagcacccacacaaaatgcacactctgcgatatgtagtattgtcattatttccttcttctacatcaggtagtggagggctcagacaagttatttagccattcacctagagagtaagtgttgaagccagagccacctccaactctggagcctaccaagagaactgtggggatgtgggatgtggcgggacagggttgctgggtacagaagccagacttcttttacaagtaactctaggctgggtgtggtggctcannnnnnnnnnnnnnnnnnnnnnnnnnnnnnnnnnnnnnnnnnnnnnnnnnnnnnnnnnnnnnnnnnnnnnnnnnnnnnnnnnnnnnnnnnnnnnnnnnnnnnnnnnnnnngcagggtgtggtggcacgcacctgtagtccccgctacgcaggtggctgaagcagaagaatcacttgaac

SEQ ID NO: 442794 - DNA, 374 bp, Homo Sapiens
  misc_feature (37)..(37): n is a, c, g, or t
  misc_feature (81)..(81): n is a, c, g, or t
  misc_feature (160)..(160): n is a, c, g, or t
  misc_feature (266)..(266): n is a, c, g, or t
aaagaaatttcagggaaaaggatttaaactgatgatnggaaaggacgaaacttcctgcttttcatcttcgatttttgaggnacgggggcctttcaagtctggccactttccgtgttcttgactctgctgctggacatgttccctctggcttcttttggcntgttgttttttcacacataaagacggcaatgagacagctgttgcacggtgcatcatcatttctggtttctgatagccttctgcagcagctccttccctctgcttangaggcaccgagtcaacgggtttccgtgaaggcctggggtggctgccttttggatcaaccatggccgatgtttccactctgacctcactggggctagggctagggcagc

SEQ ID NO: 442795 - DNA, 522 bp, Homo Sapiens
tttaatatttaaaatgtttaatagttaaaattttttaacaatttaactttaaaaaggtcacacattttctgatccagcaatgccccaatcagattgtttcattttattattattatcaacactgtcccctttttggcacctgtaaaatagttcctttcgggagtttggagccaggccaggcaccgtcggtgcatgggatgagatgggcaggtttggagctcctctgtctagtgaggatcacggtctgcagagaagggttggcctccccgtctcctatcaaggcttaaagcaaggagaaccatcccaaatttggttccttttcccctaagtatccttagaggcaatccaccctgtgactaggtgactaggtgaaggactgaggtccagaaaggagctatcttaaacctggaatcccatttcctagtctgcagccttaagcagttaccctctcagacaactagccctctccttcctccgcatgaaaacccatggcttacagggatggtgttgctttccctaaag

SEQ ID NO: 442796 - DNA, 883 bp, Homo Sapiens
gaagtctcttctttctggctctctttttctgagtgaggggttattccctgattccctgggctacaaattgttcttcctggctctctataaaaccactctgctctttctcttctctctattggatcctgcttctcccatgggagctctgtcacctgaaacccctcttctcaagtctctgctgactatttccatagctggtagtcacgacgaggagacaactgtgtagggtcaatatttgggccaaccaccctgaggaactgtgagggttagaactggaaattgtcaagggaatccgaacccagctaccatatgagagagttcaacttatgttcaatgtgaatgccatggcaatattaaaaggtaagaattcgctccatacgtgcttgaggtaaataggagaaacctagaatttatgtaaacagtgagaagattggatgcgttttatgtcacatatctcttaatactagcagcttattatatatgtcaatccatcaggcattcagaaatacatgcttatgaaaattttttgcaccatcagacaaaagacaagggtagaagacatttgtaaccctataaacactagcaaattaaaaacagaaggacctttatgtcctaacatatctgggttgtaaaaggctgccctgtgtaatacggcatttcttaaacatattttaaaaatcataggtgtcaatattttttagaaatccatttaaattttctcttgctattttacaatgcctatttatttatttaggggctctgctgattttaatgtatatcctaaactttacattttctttaaaggatgttttatacaactttatgtaaaatgtttcagtatcttcacattctctccctgtccttttgttttgctcttatatgg

SEQ ID NO: 442797 - DNA, 395 bp, Homo Sapiens
ccgcgcccagcctgtggttgtaatcttctaaagaacagagaccaagcattatttcctatattctccatctacttcccactcattacctagtagcacattgcactgattacataaaatattaactcaaggtttcttttttcccatagggaggcagaaaaggattcctgttattcaggacattcaactggattatttttcggtcgccaagggaaacaggttctcttagattccgtctgaccacactttcagaataaattacctacagttttcctctaaatgaagaatgaagctaaaccccattcactaatttccttaaccaaaagcaaaattaaggccacaagataaatacaaaggagtattcaaagaaggtcttaagggctgggcatggtggctca

SEQ ID NO: 442798 - DNA, 715 bp, Homo Sapiens
  misc_feature (553)..(553): n is a, c, g, or t
  misc_feature (557)..(557): n is a, c, g, or t
tagtggatcccccgggctgcaggtcaattctggacaaaacttttgaacttacagagaactggagttggagccctgattaaactctgcctgaagtcctccctatctctgaacttctgttaggtcatccaataactccctttaattattttttagttcaatgactctgttgcttgcaaacaaaattatctttactgatgcatgtggtaaactggagcagcttacagtgggagaaaatcaccaagtgcagctcaaatgtaacatctactttttaaaaagatttgttgtcctctagcctgtaaaatgacttaatctgtatttcataaagtacataaaagtcatactttccagttgttccctacagaatttattggagatattatattctgtcaaaattataatgaatttgatggttcatcttggttcatcttgactacaaatgtttagtgtttataaaattgcctgtacaaagtcatgataaacctgacagtggcagggatggtaaagctggcttcttgaatggtttcttcatggtgaatgatctctccttactttntttntaaaatctcatcctttatccctgtgtgtttccttttgttctttttcttgcagctacaatctttggtatcttgaaagtcagaatcttattgaataggaaataaatgcatgcttgtaactctgtgggttttatttcctaaattctgctattgctgctaac

SEQ ID NO: 442799 - DNA, 712 bp, Homo Sapiens
  misc_feature (477)..(477): n is a, c, g, or t
  misc_feature (526)..(526): n is a, c, g, or t
  misc_feature (533)..(533): n is a, c, g, or t
  misc_feature (538)..(538): n is a, c, g, or t
  misc_feature (550)..(550): n is a, c, g, or t
  misc_feature (560)..(560): n is a, c, g, or t
  misc_feature (594)..(594): n is a, c, g, or t
  misc_feature (643)..(644): n is a, c, g, or t
  misc_feature (662)..(662): n is a, c, g, or t
  misc_feature (677)..(677): n is a, c, g, or t
  misc_feature (690)..(690): n is a, c, g, or t
atagagttcagcctttggtgatgagtggcggatccattaacataaattttggacataacacaatccaactaatactctggttaaccataatagggaagaggttatttccccctttctttttagcctaaacttcctgctatatctgtgcttcccacatcaagatttgtactactatttattggctttctatcaggttctgactttgaagaactcttctcctaccaagtaaatagttagtggttagcaaaaactggtaaggggcattatctttcaagtaagacagagtaactatgccttacattcttcgacacaaagatggaacaatctcaaatttggatttctagcacagctgaataatgctctgtaaggaataaactaccagccatgcctaaaatattggtcttttgcttgaagttcttcatgttttaactggaaagttaaaaacaatttcccaactgcctatttgccccttgggtntatttaaatattttcatggttaattaaaaaacacttttactttaagcanacatttnccttntttccctttaantacctgacanacggtagcagagctgcataaattttgcctgaggntgctgagtaaagcctatcactagcttgagacattgtcttggcaagtaanngcagacgcatttattccnccgtgtttggacaantactaagcacttncattgaacctcttttccagtgt

SEQ ID NO: 442800 - DNA, 475 bp, Homo Sapiens
  misc_feature (21)..(21): n is a, c, g, or t
gcctgacacctggtgggaggngggccctctcctgccctgcttatgtccgcttaactacgtactgtaacagtatctcccttctactcaggccccaattatacattaccagagtactcagactaagctctttgcctgccctgtccatgcagcaaggtatttggcattcatatgcagtttgtggcccttgttcagatcattgccccccgggttgtataatccagagacccatgttttaactattcaccaggctgaggacacagtgctgtctccaccctgagcactctctttaccaagcatctttcttgttcctcaaatgcctttgctatgtgatctccacccttgcttttcagttcaacctgttttctgtgatcagccattcaaccctttaaaacccaatctgagactattcccaggtaacttaacttccaaatccaagtctaagcattgggttaagcctatggttggtgtatttctt

SEQ ID NO: 442801 - DNA, 215 bp, Homo Sapiens
acacagaaagtagaagaagacactaaaatcagtgaggtcttcctgcttcagaggttatgactttggtctttgtctctggtgtagtgataatctgttgtgtcgtcatgaccagcacctattacagtgcttggcttatataggcaatcaacaaatgtttgatgaataagaagagggagggggaaaaaggaagtcaaggaaactcccaggcttttctg

SEQ ID NO: 442802 - DNA, 479 bp, Homo Sapiens
  misc_feature (71)..(128): n is a, c, g, or t
  misc_feature (227)..(227): n is a, c, g, or t
ccccccttaaaccagacccccggccaagccattcttctccttcatcctttaaggttttggttaacttgcannnnnnnnnnnnnnnnnnnnnnnnnnnnnnnnnnnnnnnnnnnnnnnnnnnnnnnnnnaaaaagcccaaagggttttaccaagtaaggtgccctcttaagtcaaagtgattagtctaggaaagagtaaatatccaggctgggcctgccagcatctgnagttgttttcaggaaaagccaaataggaaggtccttttgccttgagaatttggagtcagagagctggaaggaggctggagcagcttgcagccatgtttcccactgctgcattcagtaggtgaaaatgtagccaaacaaaacgccaagaataagacaaatactgatgagaaagtttgagtctctggattaactcctgactgagactagttctaacgccctttggtatgtctcagccaatgcagtagtgttagg

SEQ ID NO: 442803 - DNA, 688 bp, Homo Sapiens
aacattttttaattaacatacttttaatacataattatatgtatccatatatacgcacacaatctgcaaagtcatatagaatgtcaaagaacagatttaaaaggagttagactataacacacaagataagcaaaggaatcaaacgtcattaatttctttaatgtcattaaattgtggttggcaatcatcatcttcatcaccttgggtagatatacattactttaaatgcactatcatagaattaaaaggaaatataattttattcttggggtcagttttatttccaataaaagaacaaaacattatattcaaagaaaaatcataaaatgaaacggtatcatcaatctattttctccatgtgctatgcaataccacatgggaaaaaatatatattttatttacaaaataatgttcctttgaaacaaattcaaactagataaaatgtgcatccacacaagtaggcaattaccaagagaataaagcccttaaggagctatccaatttattaacttcattcagccaaatcaaggtaaatcacagcagttcactttttcagaataaagaaaattttcaattatatttttaaagaatattccacacacatagcaaacgtgcacatttgcacagagttttaaacctcctacagttaatcttaggaatgattctgaaatccattcccaggaaattc

SEQ ID NO: 442804 - DNA, 760 bp, Homo Sapiens
aatactcatgaaatatctatttaggtgaatattcttaatgtttctaggaactatcttaaatttccaaaaacattgatgtagaatttggggcaaattaaaatatatttcaaagctttatcttcaagaacaagcagcaagagcttaccataggaaaactcaattttcgtgctatttctataaaatcttcatttctttctttgacttgtgactgccctgcagcaaagtggctacagacgaagcaaaggctggttgtatggaagagcattcggattgcaactgctcccttatttccagttgcacctcccattccagtcttcacagtatcaactgcaacatccctgataaaaggagcatgctgtggtctgataaaaacaaacaaacagacgcccaccaactgttcagaagccagcagcacatacttgttgtctctggagattgtcttctgaagttctacagcccagagcttctgatttgttgtgcttgcactcacaatgtttccagcattcaattctaccatttcttcaaaaccaattgcaaatatatcagttggcttacttcttttatcttgaaactcctggatgccagctaacttgggtgcatcaagaagccagtcagtgagtgtctgattcttaaaagctatgctgcgaaattgcttcccaccattcacattccaggttccgacacatactcgaattttcttaggctttgaatatttgtagaaattctcacacatgctctttagtacctgcccgggcggccg

SEQ ID NO: 442805 - DNA, 426 bp, Homo Sapiens
  misc_feature (29)..(29): n is a, c, g, or t
ccaggaacaggaaacaagtactccagtanaattaagcacaacataattaattcagctcagctgctggtatcacactgacctcaactgattatacaactaagtcatgaagattaacctgaaattagaaagccttaagggggagccagtattcagagtgatcctcaatatggccaattgttctatacatttataaataccatattgatatcctgaaggtcctctgtggagttgaagaaggtgagatttgaccagaaagcttttcccaactatgacttttttctcatctcttcatcccagtcacaatcaaatgcttcatcacctagttctggtaaagtgaagagggattctttggaaacaatcagtttctcggtggacccacggagctgaaaagatttccttttactgacacgcattggagctgtggtt

SEQ ID NO: 442806 - DNA, 794 bp, Homo Sapiens
  misc_feature (555)..(698): n is a, c, g, or t
gggaagaggaagagagagaaactacaggaatctgcatcaggtacaggtccaagaatgacagctgcctacatctgaaacatggtggaaaacgaagctcattcccaacgtgcaaagccaaggcagcgaccccaggacctcttctggagatggaagcttgttgaaaacccagactgtctccacggcctgcccagtcgaccccaaaggaacactgacatcaattttaccctgaggtcactgctagagacgctgatccataaagacaatcactgccaacccctctttcgtctactgcaagagccaagttccaaaataaagcataaaaaggttttttaaaaggaaatgtaaaagcacatgagaatgctagcaggctgtggggcagctgagcagcttttctccccccatatctgcgtgcacttcccagagcatcttgcatccaaacctgtaacctttcggcaaggacggtaacttggctgcatttgcctgtcatgcgcaactggagccagcaaccagcacatccatcagcaccccagtggaggagttcatggaagagttccnnnnnnnnnnnnnnnnnnnnnnnnnnnnnnnnnnnnnnnnnnnnnnnnnnnnnnnnnnnnnnnnnnnnnnnnnnnnnnnnnnnnnnnnnnnnnnnnnnnnnnnnnnnnnnnnnnnnnnnnnnnnnnnnnnnnnnnnnnnnnnnngctagctatgagcttttaaataaaattgaaagttctggaaaagtttgtaatgacatagaagccttctttttctgagacgcttgtctggtgtggctt

SEQ ID NO: 442807 - DNA, 718 bp, Homo Sapiens
cacattttggtcactttattaaatgacattaaatagtttaagtttcaactactaaacagcactttgaatggtgaaaacacagatagtatattgtcatacttgaatgcttttctttaaaaacacaattccagtccttatatatattacaaaacagccttaaaggaagaagtgacatcttttctacagtacttaagatactcaatacagaactgaaaagcagtctaacagaaacaaaggcaagtcttcacagctgtatgatttcagcagccaaagctggatgatggactgaaacattactatacaactgggacaaaacatatacaatatcacaatactaagcaaaaacgctttacaccccaagaaataaaacagggttacaaaatgtggagaatttagcaggcaaaactgtattacaagcaacattttaaatcatcatttttaatccattgcaactatttaaaacatctaaaacaaatataaaaatgagccttttagtattttactgacgtgatttttttgtctttaaatatttgttaaagcttgatgttatactcaaagtacatattatatagctaaaatgtcaagtgagaagagtgtatacaaagtggtccaagttttatttcaaactctgatttccaattaacccttctaagtattattctttaagttatagtttcatccatggtgaaaaagatttagaaggttgcctaaaattttc

SEQ ID NO: 442808 - DNA, 785 bp, Homo Sapiens
  misc_feature (21)..(21): n is a, c, g, or t
  misc_feature (24)..(24): n is a, c, g, or t
  misc_feature (669)..(669): n is a, c, g, or t
tggttgttgatggcttccatntcnggagacaaagaaactttatttatacaaaactccaccccttctgttccactctcctcagcaaacacagataacaggtgatgaaactaaaacacacagacgagcattactcaacccaaggttcccgccttccctagcacctgaggtctgggccaacatgcagggtaactggtgccttatgcctgctgtctggattgcccggcccacagggtggctgagcatatttattctgggggttccatgcatacgaggagcccccagccatacagctgggcatgggtgtttggcagcaaattgtccctgctttagtcatagcaatttttcatgtcctctgttgctccccttaactgaacaccccttgacagccgggattctgcctccagcatcaacctaaggaagctctgttaaatgaatgagcacctctaggcaatgaccaccctccctgaagttcaatttctcatcgatttcccaaggccgcccaagtcattcccttgatggctgtgttagtttctaggctcggcttctagttcagtgagacagaggcaggtgggcctccatgtgggccatgatctggtgggcaaaacatgccttgggcagttacaacagggacagtctgctgcagaagctgtggagggagcagccaacaantcgttcacaagtcgaggtgcccaagggcctcagttttcctgcaggggcctgcgtggggcacggcgacccagtgccctctactctcatgggatgtggcgagcccagcccaatgctgg

SEQ ID NO: 442809 - DNA, 942 bp, Homo Sapiens
tttggctttcctgttccagaagccccctggggggccaaccttttttggaagccctagtttaccaaccagttgggcaacataaggtgggggggaccaagggaggggcagcttcttgattccctgttggtttcccccagcacagaggagattaggtatgggctggggtgtgacagatccccacctgaccagattgaagcccactgagacttgggagagcaggtagggcttagtcccgagaccctagcctttcgctggtggctgccttctcattttcccagaggctttcagagtccctcagtccttgggttgcaccgtcctcccaccagactgacccaggggccagtccacttcggtggggaaccactaagataggtgtgctctccaagcataaactccagaataacccactttgaaaagctgatagctaagcgtaaagagagaatggggtagtgagctgcatcttcagtcaaatgcctgagtggtaatgcttaacccaaaggaacttgacagcaatggtgaaatttcaggcactaccgtggtgttggtgctggtgaccttcccgggcagaacctttctgccctcaggtcacaccagtgttgtttgaggatccaccggttgctttcctccaattgggcagaagagccagcagggggcagagtcaggatgaaagtatgtagactttttgcccttgattggcgtagggggcctttggaggaggagtctaatgactgagttccacctgcaatcctccaggagaggagctcccatctctctcacttgctagaaacgctccaggcaggctctagggctgcgttctctaggagtgtccggaccagagaccagggggcacgggggcagcactccgagccacagggccggggctggccgcgcccgggcaggcctctgtccccggcgatccagggaatccggaccggaccagcc

SEQ ID NO: 442810 - DNA, 1027 bp, Homo Sapiens
tttttttagtgtggaaaaatagtattatataaagcttaatattaaacattatgaaaaatacatatttacagaagaaactacaaaatacaactatgtacaataatatctgttacctttaaattatataaaattttaaacattctccagattaataaattatacatagtatcaacagaaatagctggcacctctgtagggcatgaagcaagtttttaaaaacaaatcacacagtgaataatttttatccaggagctcttcaggtacattctcaatgccttgaatagactggatctctgtgatactctggattcacattttcatagattggaaacaaggggttttcttgttcactccgtagctttcttgctctgaggacatctcttacacactgatgtaggtagacatactgacactcagtctggaccatgtgaaccctgtgaagtcttaggtcgtgcactgctccataaatgtccacagagtctttggagtctaactgctggaggattcggtccaatgcaataaaggttccagtcctacccacaccagcactgcagtgcaccacagtgggcccagcacccgggcttctgttgatgtagtccctgacagttctcacaaactggatcagagactgggtggtttctgggactcccatggtctggccacaccgtatagtgaaagtggcggatgagtctgtgtgcatcaagctgttcctcaccgcatatcttaaactcccggatggtccactcaggcaggacggactctgagagcatctgcaggatgaggtccccatagtagagggaatcctggtccgctggccagtaatggtcacactttactcggcccttctcaacacactgggtcaccatgacgatgttgtgaacgttttgttcccacaccattttccagaagtcatccttggtgccaggaagcggtccctgagtgacaatgtattctcttctgaagttgttgccagggatgtagctggcattgatgtagtcagagcaaggatcatcatctacattggaga

SEQ ID NO: 442811 - DNA, 859 bp, Homo Sapiens
  misc_feature (103)..(111): n is a, c, g, or t
aacaaaaaagataacttcattactcatctgtaggccttttaaaaactgaaaaaccagttcaactaaattttgacatgattgtctggaagctagtagtattaannnnnnnnncatagtaaaacagatgtaataattgattcatatagtctacaagagaagatattgggtgtttttttgtaggtggcaaatataaaatggttaattgtatccaggcttgcagcaagtttatccatgcattaaatggcaacatgagtagaatacatggttgaaaaatgaggatcagacacattcttctgcagacatcaaaagaggattgatatactcaaaaccttcaaattcagactgatcaatcttcctcacaatgtcatcgtcatctggagtgagctggacaggttcattagtaaactgagaatcaaagttgtgcaaaccaaattccccagaaatatttggtttaaagggaggtaccacctgtttttgctgcatcatatgccaatcaacattttggaagaacggttgttcctgaatatcagtaaatcctgttatgaggatgacaacccaatcgttccttagggtccttattaagaaaactcttcagaacacttgcagcttttacagacagagaacgtggtatgcgaatttgtttttccaaaataacttggaagagataatcctctgtgttctggtcagggttatcggagctcccaacaatatcaaatggagaccttcctggcatcatctcaaacatgagcactccaagagctcaccagtcaacactgaaaccttcagaaagaaattttatagcaatatattatacactttgcgttcttgagagtagtaactggggtaacacgtgcgggag

SEQ ID NO: 442812 - DNA, 1039 bp, Homo Sapiens
gggcttttttcttagccaaatcaccaaaatgtccagttagaacaagaatttagcattctgcaaaagaagttaacagctgagataacgaggaaatattctgaaatggatcccaagatatttcatcttaattttgttttgtggacacctgaacaatacatttttttcaaagacagagacaattgacaacagagaagcagtcacagcctaccttattcacatcatcaatgtcacaggtattggttaattctcaaaacacaacagggaatcctttgggtcaaccaacacaattcagcgacactttttctggacaatcaatatcacctgccaaagtcactgctggacaaccaacaccagctgtctatacctcttctgaaaaaccagaagcacatacttctgctggacaaccacttgcctacaacaccaaacaaccaacaccaatagccaacacctcctcccagcaagccgtgttcacctctgccagacaactaccatctgcccgtacttctaccagacaatcaccaaagtcatttgtctatacttttactcaacaatcatcatctgtccagatcccttctagaaaacaaataactgttcataatccatccacacaaccaacatcaactgtcaaaaattcacctaggagtacaccaggatttatcttagatactaccagtaacaaacaaacccacaaaaaaacaattataattcaatagctgccatactaattggtgtacttctgacttctatgttggtaagctataatcatcattgtactttgggaaatggcttaaggaaaccagttttaaatgatcacaattgggcaggtagatctccatttgttgatggcagaaaacccctgacatttgtatgggataaccatccgaggaccaatgtaaattatccacaaaaacggtacatcaatcactttcactttaccccgcggaaaacccaggatcaaagcccacttttggagaatgaacttcaaaaattaacgtaggtcggaatcacgggcaccacctgtgagcaccacacaaacaca

SEQ ID NO: 442813 - DNA, 821 bp, Homo Sapiens
  misc_feature (591)..(591): n is a, c, g, or t
caggtgggtgatggagccggcttccccacagtgcggccggaacaggaacgtgctcaggccgcgctccctgcggaggttgttgagcaccatgatgttggcgtacatgtagtacaggtagtagctgtagggtgggttctgctcactggtccagacgtccgggtttgggctcttgtcggaaaacatgtggtcgctgtgcttggactcatcatccacgctgtcaaaccccgtcacatatttaaggaagaggtgaagctctcgatgatcttgggggttgatagtggccttgaaaaggggcaggaagatgttctccagcatcttcccaaagtttggcagcagcttctttgacctaaatatgtcataaatccggggcacctggatgatccagcgcatgttgggagagtagaccttgtgctggatgaaccagtaggccaggttgggccactcctcaggactgcggccgtagatggagagccgtggctctgagtactggtacttgctctcctccagctcccgggcaacctccttgaccatccgagcaaagtactctcctcccagatagttttcagttttcaaatacaggtcacgcagctnactggcccccacagggttgtatttggagttgaacttgtcaaagcggtggaatgtctgccggcccgcgtggacatccagtgagtccacagtgaggtcgtaggggtccatgtgcaggccgtcaaacacctgccgcagggtgatcttccggccccgcttctctgccacagtcctgtcaggctccgtctggtatgtgtgcttgatgaagcgcaggcagatgcttttggttcatg

SEQ ID NO: 442814 - DNA, 822 bp, Homo Sapiens
gggagacccagaaggcgccaccatggcggcgcccccgcagcccgtcacccacctcatctttgacatggacggacttcttctggatactgaacggctgtattcagtggtgtttcaagaaatatgtaatcgctatgacaagaaatacagctgggatgtaaagtccctggttatgggtaagaaggcattagaggcggcacagattataatagacgtcttgcagctcccgatgtccaaagaggagctggtggaagaaagccaaacgaagttaaaggaagtgttccccatggctgcgctcatgccaggggcggagaaactcatcatccacctgcggaaacatggcatcccctttgcactagccaccagctcggggtccgcatcgttcgatatgaagacaagccgccacaaggagttcttcagcttgttttcccacattgtgctgggagatgaccccgaagtgcagcatggcaagccagacccagacatcttcctagcttgtgccaagaggttctctccccctcctgctatggagaagtgccttgtctttgaagatgctcccaatggggtggaggcggccctggcagctgggatgcaggtggtcatggttcctgacggaaacttgagccgagatctgacaacaaagggccaccctggtgctgaattccctgcagggactttcagcccgagctggtttggtttgccctcctatgagttagaggggagggcctccagtcttccgcccccagccccctttcatggtccacactggctgggggaaaggggaaaagaaaatcaggcaattccttcaatcccaaccggccgctg

SEQ ID NO: 442815 - DNA, 2841 bp, Homo Sapiens
  misc_feature (2658)..(2710): n is a, c, g, or t
tcaaaggctcagggtggtgatggagtagtacctgatacagagctggaaggcaggatgcagcaggctgagcaggcccttcaggacattctgagagatgcccagatttcagaaggtgctagcagatcccttggtctccagttggccaaggtgaggagccaagagaacagctaccagagccgcctggatgacctcaagatgactgtggaaagagttcgggctctgggaagtcagtaccagaaccgagttcgggatactcacaggctcatcactcagatgcagctgagcctggcagaaagtgaagcttccttgggaaacactaacattcctgcctcagaccactacgtggggccaaatggctttaaaagtctggctcaggaggccacaagattagcagaaagccacgttgagtcagccagtaacatggagcaactgacaagggaaactgaggactattccaaacaagccctctcactggtgcgcaaggccctgcatgaaggagtcggaagcggaagcggtagcccggacggtgctgtggtgcaagggcttgtggaaaaattggagaaaaccaagtccctggcccagcagttgacaagggaggccactcaagcggaaattgaagcagataggtcttatcagcacagtctccgcctcctggattcagtgtctcggcttcaaggagtcagtgatcagtcctttcaggtggaagaagcaagaggatcaaacaaaaagcggattcactctcaagcctggtaaccaggcatatggatgagttcaagcgtacacaaaagaatctgggaaactggaaagaagaagcacagcagctcttacagaatggaaaaagtgggagagagaaatcagatcagctgctttcccgtgccaatcttgctaaaagcagagcacaagaagcactgagtatgggcaatgccactttttatgaagttgagagcatccttaaaaacctcagagagtttgacctgcaggtggacaacagaaaagcagaagctgaagaagccatgaagagactctcctacatcagccagaaggtttcagatgccagtgacaagacccagcaagcagaaagagccctggggagcgctgctgctgatgcacagagggcaaagaatggggccggggaggccctggaaatctccagtgagattgaacaggagattgggagtctgaacttggaagccaatgtgacagcagatggagccttggccatggaaaagggactggcctctctgaagagtgagatgagggaagtggaaggagagctggaaaggaaggagctggagtttgacacgaatatggatgcagtacagatggtgattacagaagcccagaaggttgataccagagccaagaacgctggggttacaatccaagacacactcaacacattagacggcctcctgcatctgatggaccagcctctcagtgtagatgaagaggggctggtcttactggagcagaagcttttcccgagccaagacccagatcaacagccaactgcggcccatgatgtcagagctggaagagagggcacgtcagcagaggggccacctccatttgctggagacaagcatagatgggattctggctgatgtgaagaacttggagaacattagggacaacctgcccccaggctgctacaatacccaggctcttgagcaacagtgaagctgccataaatatttctcaactgaggttcttgggatacagatctcagggctcgggagccatgtcatgtgagtgggtgggatggggacatttgaacatgtttaatgggtatgctcaggtcaactgacctgaccccattcctgatcccatggccaggtggttgtcttattgcaccatactccttgcttcctgatgctgggcaatgaggcagatagcactgggtgtgagaatgatcaaggatctggaccccaaagaatagactggatggaaagacaaactgcacaggcagatgtttgcctcataatagtcgtaagtggagtcctggaatttggacaagtgctgttgggatatagtcaacttattctttgagtaatgtgactaaaggaaaaaactttgactttgcccaggcatgaaattcttcctaatgtcagaacagagtgcaacccagtcacactgtggccagtaaaatactattgcctcatattgtcctctgcaagcttcttgctgatcagagttcctcctacttacaacccagggtgtgaacatgttctccattttcaagctggaagaagtgagcagtgttggagtgaggacctgtaaggcaggcccattcagagctatggtgcttgctggtgcctgccaccttcaagttctggacctgggcatgacatcctttcttttaatgatgccatggcaacttagagattgcatttttattaaagcatttcctaccagcaaagcaaatgttgggaaagtatttactttttcggtttcaaagtgatagaaaagtgtggcttgggcattgaaagaggtaaaattctctagatttattagtcctaattcaatcctacttttcgaacaccaaaaatgatgcgcatcaatggattttatcttattttctcaatctcctctctctttcctccacccataataagagaatgttcctactcacacttcagctgggtcacatccatcccnnnnnnnnnnnnnnnnnnnnnnnnnnnnnnnnnnnnnnnnnnnnnnnnnnnnnacatatattttattgagtacctactgtgtgcccaggggctggtgggaacaatgggtggacttaatctcctgcccctcctaaaaattggattgtcctagggaggaagaaacagcattttttaaaaaaataac

SEQ ID NO: 442816 - DNA, 734 bp, Homo Sapiens
  misc_feature (14)..(14): n is a, c, g, or t
  misc_feature (33)..(33): n is a, c, g, or t
  misc_feature (41)..(41): n is a, c, g, or t
  misc_feature (79)..(79): n is a, c, g, or t
  misc_feature (118)..(118): n is a, c, g, or t
  misc_feature (173)..(173): n is a, c, g, or t
aattaaaacccctnaaaatcgccctgttcaatnctgcccangaattaacggtctgaaagggttcaaacctgcgcgcccncttaaaaaaattgtcaaaaattcctcgcgctgcggccanacagggcggggtctgaaaaggaggcgggatctcccaatcgttccagccgctcccnagtcaatccagcggaaaaagccatgtgcacggatggtaggttccccatcaggccctgaagcccaggcgcttccctgggtgcttggtcaggaaccccttgcagatggccacggcttcccgggaaagcgacttggggtaggtgacagtttgttccatgatggcctgaaacagctcctcctcgtcctccccatcgaagggaggctgtcctgccaacatctcatacagcagaactccaaaggaccaccaatcgacagacttcccatagggctggtaggcaatgatctccggggctatgtagtccggggtcccgcagaaggtgcgggttgtcgtcccggggaagacgttctccttacacatgccaaagtcagtgatcttgatgtgtccctcagcatccagcatcacattgtccagcttcaggtccctgtagatgatgccctgattgtgaaggaagaagaggccgatagcgatttctgccgcgtagaacgctgcatggggctccttaaacttgcccagctgttgaatgtggtacatcaagtctcccccggtgacgtactccatcacc

SEQ ID NO: 442817 - DNA, 582 bp, Homo Sapiens
  misc_feature (28)..(29): n is a, c, g, or t
  misc_feature (155)..(155): n is a, c, g, or t
gggtagtaacaaccagcggctgtactcnnccgatgtggtacccccctgccccatctcccactgccgtgctggggaagtaagtatagtgcgtctcagcagctgtcccctccgtgtcaactgcatcatcactggtgaaagcaccctggatcaccgcnctgggtcatggattgagtggcagggtagccactgatggcgccagttccctcagtttggccatccagctgcccctcagacacctggatcaccctgtacatcacctggcccccattctcagttcggaagacgtacttgacgttggggtcagggaaggtggcagctgactggatgctggcaatagccacactggttgggtcttccccagtagccactgcaccttcctgaatctgcactgtcccctcttccgtttcagctgttttctgctgccccttcatctctctgtgagggggcacatccgaggaactggtccttttttggaggtctttgtatctcctgattcacaggcctgagtgctaagtccggccaaggccgtctcagctgccgattttctccaactgtgttctccctctcccggcctaggtatat

SEQ ID NO: 442818 - DNA, 1185 bp, Homo Sapiens
  misc_feature (511)..(511): n is a, c, g, or t
gctctgggcccaaacaactgtacattgtttattgagaacacccgtagatgggaaggagggatgccctgtaccgcatcgtggccaccactgactgggagccaggcccagagagcactggcagagctgggggtgggcttcccatgacacactgaccatctcggagggtgggaggaatgagaggactaggcctaagaccctggtgccatgctacaaatggggactgattggcctttgcctttcaaaaacagagggtatgggtatgcggactaccagcaaaaaatagaaacttgatttttttaaaaggtcctcctgtacataacaagacagcatctgctctccagggcccgggactggcagcggggacctcaggcaggcaggcagggccgaaggcctccagggaagatcagtggtttggctgagacagtcagctgcacaaaactggccagtcacgagcacccagcgaaacttcatccatgctctggcaggacaggaaagcaccccggccccttgnggaatatacaaatatttgccatattctctttgcttgttacaaaaaacagttaagaaagcttacagcagattatttacaaacagtatcctgggatatgatgaaggcagaggtgggctggcttggaggataggatctgtgggggcagaggagccacagcagcccagagggtcccaggctgggccttctccccaggcttcaggctctgcaaggcactggactctgctactgagaaggaggcttaattcttcttgtggagaaacttcattttgttgcccaaacctcggagaaacttattcattccactctgctcagtgtctgggagttcttctaagtactgctccactcgctgctcaaaaaggccctttgcccgacactttcttagctccctgtcttggatgaagccagcaaacatctgagactccataaaaacctcaagaaagcggcggatgcttttggaggccacagatttgcggaaggcctctcgctgaaaggccctctctcccttctcactctgtgtcagaaagagggagtagtgcccaacggtctccacaaagaaccggataaacacctccgacaccagcccattgagggtattacattcatcgtcggagtcgctgtcagagtcctgggagatcagctcattcttccctcgtgccgaattcgccacccaggcc

SEQ ID NO: 442819 - DNA, 498 bp, Homo Sapiens
ttggtgtaattttttttaatggtgaagctataggaattgactgtggagataccatatcaggatgtgggtgacctgcctgtctgcatctttgcaggtcctggaacaacctgtactgtgtgctcaggaacagtgagctaaccttctacaaggatgccaagaacctggccctggggatgccctaccatggggaggaacccctggccctgagacatgccatctgtgagattgctgccaactacaagaagaagaagcacgtctttaagctgaggtgaggccttcctggcctttgaaagctcgggttgatggcttgatttggcattagtggcagggcagaggccctctgtaggggaccagtgccaggcctgagctgctcctcaggggtttttcaaatcaaagaggctgatggtccagactttgacctctcagaaagtgctgggctgcctgagaggggtctggatgttcggctcagggtattgtgggatcagagccagccctctg

SEQ ID NO: 442820 - DNA, 349 bp, Homo Sapiens; identical to SEQ ID NO: 324998

SEQ ID NO: 442821 - DNA, 1118 bp, Homo Sapiens
  misc_feature (936)..(936): n is a, c, g, or t
tcccccccagggggttgtttcccaacaatatttcgcgcccagtttatttctccccgacggtgggaccaccttccccaattaaaaacccgaaccccccggcgttgtgaaaccaccacgtggatggaatgttttaaccttaaggctcccacttgcagcccattccacaaaggcctccagttggaaagtcgtatgtggttcttttgaagggaaatttctaaattcggctcttgcttttaacagcaccaaaatgcccctgaatcataatcttaggcagatcttggctgagcaggatactacaaggggagggtgagtgacattgtcttaaatgggggcagagggagaaagaagagccaagaatacttgacttcgtggatgtggaataacactaaccttcggccactaaacctctcccttacagacatagtatctcctatgtcgatttcagtttcaatcagctaaggcaaccagccaatcaccaccactggtgtctccttctggtgattgatttggaaaaaatgattggtcaagagagacaaacttgaggaaagcacttggtaagagagtcacaacttccagctttcccacacatcctctgtcctcttctccattatatgctcctcttttttgttactgccgtttcagaaaatgtccgggcatgagctccagtcctgtttttctttacactcccagtattctcccctataaatatgggttaactccttggtaacagggtccttcttccgctcaaaccacagtgccttatagggatcatatggtgtgccatcctctgtggctttcatagcttccgcttctctcttctttctggaaagtctttgtttttcctccaggcgctgcttctccgcatttgcttcatcccagcgtccattttccatcagtctctggtcaggtcgtaaccggctgtctgtgggggcagtngccactttcccaagcattgagagtcagagcaagcctctgagaagtagtacatgtttttctgcatttctccggtaaaggattccttttccacagcatgacccctgctttcctctgcttcatggcctctctgtcgagcatcacccccatttttcccatggacctgctgaactttgaaacattcc

SEQ ID NO: 442822 - DNA, 502 bp, Homo Sapiens
gaagaacattttcctgaacaattccagcctgctccttttactctaggggcctctgtcagcaagaccatggggacttcaagagcctgtggtcaggaaatcaggtccagccttccctgtagccagacagtttatgagcccagagcctcctgccacacacatgcacacatatctagcattctttccagacagcatcctccccgccttccaccttggtagatgcaaggtctatctctcccatcagggctgccaaagctgggctttgtttttcccagcagaatgatgccattctcacaaaccaatgctctatattgcttgaagtctgcatctaaatattgatttcacgttttaaagaaattctcttaaattacaattgtgcccaatgcagggtggctctggggggcaagtaggtggtacaggggattggaaacatgctccgcgcctccagagaaaagttgctcccgaggtccatgcccctataggtggggtaccgagatcgaatgct

SEQ ID NO: 442823 - DNA, 961 bp, Homo Sapiens
  misc_feature (804)..(813): n is a, c, g, or t
gagcagtcaaatccgaagtgctcgagtgcttagaaaccccctctggtgcttggttgaacaagggaatcacaagaaaacgaaaatgcaaaaactgaacttcgggggtcgttctgtgccttccagcatcttgtacagcaaatcctgactcgtgtctttttacccccaagatatctgtcttcagtagcgactgaatctgccactctcagaataagttccttgcatttattccaaataatctcgtttactctcacctgtttatgcaaattgtataaggtttcttatgcccaagcttgaaaaatgatttcccagtagacaagaggcggctacctatcctacagttacggtatttatttacataagaagatcttacaggagttctttgcttgaatccgttctaacacccgcggcagctgcacgcgctcacagaaggtggaggttacttgcccaggtacagacgacctcggggcagtgacgagcaaagaccagagactgctgagccctcgcatctgggtggcggaattgcctgcggggttttgcccttggtttactgaggggggtcttggttgctgctgaagccccccaccccttctaaagtgcaatgcaaaagggacatcatgtatatgcagcgtttgtttggaattttctttgcttttgttttctttgcggttgttctgtgtgcatggattccacacctctgccgtaggtagatccgtcagcgggcattattaccgtgtcttgtaaagggtcggttttgttatgcaacacgcagaatgctggtttttagccttgttttaccagagttgnnnnnnnnnncagttatttcttcaaggggaaactaaatgatttagttgggagcaaagctttaagtgtgttgggcgtgcttctgtgtgggctgtcctgtgtcgccagggtcgaagatcacagtgaggtaggagggccctgcccccatccccaggggccg

SEQ ID NO: 442824 - DNA, 1207 bp, Homo Sapiens
atccgtgcgacccaaactcagcctctagaagacctgctcacccagggtaggtagaaccccccggccacttatttttttgaaccgccttctttcccaatgagtccctgccgggtcatatattttcccccacaacccgtttaaggttaacagcaaggcccaataaaatgcgcaacgctttagaactttcccattcaagaagaggcgggggcccccggaaaatgacttggctctttggggtccacggtactaaagacaattcgcaggctaagcggcaacagggaggggtgacccttgccgaaccccagtgaggaagcaggtcttctgcctgcggggcttccaggaccggtttgggaggacgaccacaataagaacgggttcaaaatgttcgactcctccaactatcatggccaagacctgcttttcaaggatgccaccgtccgggcggtgcctgtcggagagaaaaccacctaccgcggctggctggggctggactacgtggcggcgctggaagggatgtcgtctcagcagtgctcgggcgcaggtaggacaggcccgccctgccgcctcccctggtgctattcagaccccttcaccccagaaccctgagggagcggggggcgctgcgggtccggggaggtgggtggaggcccgtctcgcagcagtccaggtggggtgttcccgggaggatttttggcaattaggctccctgcccgcgaagggcggcgagtcccggtggcctctccccagacccaacctcggatccctggaatggtggaacaacttcacaaacgacggtcgactgcccgcagatatcctggggttctctacgataacgacgtcattggcttaagcgccctcccattttacccgcgcaattgcacctccacccttgcaatacgcggccaggcaaagtccctataacctgagcacccaaaacgagggtataaacatttaccccgacacaacacttgccacccgcataggctgcccgatttgaatgccgtccccagcggaacccacgcacactttatgtgtatctgccggattttacctccattcccacgcggagaacatggcttgtattgggcaagacaaatggcccgtcgcccccctaacaggtctttccaaaagaccccagatcatcgatatccgagataacgcacttgactaaacgtaccacgcttttcccccgtaatagcccaccgta

SEQ ID NO: 442825 - DNA, 719 bp, Homo Sapiens
  misc_feature (39)..(39): n is a, c, g, or t
  misc_feature (55)..(55): n is a, c, g, or t
  misc_feature (94)..(94): n is a, c, g, or t
tccattaaattgtccacttttccgtgtagacttttctcnccatgttactaaaacngggagatccacgaggcacatttttttaacctccgcaaanctcttaattctaacttaattactaaactctgccttcaaaccaaattttccaatatctttttgtaaaatacttttaaaaatcactcaggacattaacaaaacacaaaaacaaactcttcctctaaatcctgacctgtcctttaaactaatctaatttacggctgactcgtaactgacaaaaacattcaaatttctctaacacactcaaacaacagaaaacccagcatattttaggtggcagttagccgttacaagaagttttattaacatattctctaataatcacagacctatacagctatgttcagtattttcaaggagagtgacttcttacaaaacgtttatagccaatcatgggattttgctagaaaacgatggcatatgcaatgacagatttgacagtttaatcagaaaaatggaatgatagaaatgaagcagactccccacctactgtgctaactgggtatgcaacagtttaatgaaataccataagccttagttggagactgtgatggaacagcgtagaggccatccgtttccaggccattctgagatccaagatgccaactccttgtttctatgaaacttcacgagatgtgccagtcagaaatggcatgctgaacacc

SEQ ID NO: 442826 - DNA, 633 bp, Homo Sapiens
  misc_feature (431)..(431): n is a, c, g, or t
gaaaatcatggggagtgatttctatttttttattgtctaagtgggttgggacttttaagagtactgagcctggttgatgtgtttctgggattgtatagcagtaaacaacctttttgaaaaattagaggttggggatggggtgaaaaattggcccttgtatgggaggtgtttttgtttttgttttaaaccaaactacccagtattccttgcacttgtgaatgtgttgcactctgctggatgaaatggcagtggatttttaaactttaatttcccaaatgtctctctcagccctgatgttttctcacagtgcttccttgtccttctcttaacttctcattcctctataagaatgatttagactgacctgtccttttttatctgcgcatgcgagaacatcaccttcctctgtacacttgggaaatgcctctggntttgttgcagccctcctttaacccaaagggagggaaagggactggcttcagaaactcccaatttccaaaaagctggagtctgggggtccattattttggcaggaactcctaaggaatttatgggagcctatataaacatatctagcttttaaaaagttcttgagggaatagcaactttcccatggctgtgccctatttccta

SEQ ID NO: 442827 - DNA, 1123 bp, Homo Sapiens
agggagccaacattcttagggggtttagcatttgaggggcccgggtggtttttttccaagatagcccattattttggcctaaccaatttggccttcacaggctatggctgggggtcccttttcaggtttaccaattttcattctttttcccggaaaactcttaacggggttttaaggtacctgaaagggcacttccttcttttcccctatatccaaaatctttttccactttgggatcttagcgataaaattcacaaaggaccttcacagtgactcaatgagagtgttgagcaatactggacccccattaaataatgtacccaacgtatttaggttagaaactctggtattccagcatccagaactacaagtgatgaagacttttgttagtgcaataactcttatttatttttctgaaccctccccttctccacctcccaatactggaagcttacccatcaggcagaattcctaatctgcctcaaaatctacaggtccaagctctgcgaataccaagtgctcaaggcaactgcgacccttcagaaaactaaataccaacaacgaatggtgttactgtgtaaaaagtttctactgctgaatagtaagaagcaatgtaaattttttaatacaaacaatcccatagtatttattgccatcttgtagtaacacgagggtaatcaaaacaatatgaataaatgttcacattggacaaaggacatctaaaaacaaactgtatccttctcaacaatttctcacttcattgatcatttctagttggagacactttgtagcagagtaatattatctccttttagcatgatccgacccagttgttttcttgactttgttttagaatgaatctcttctgcatcatctaatacaaggttcatatactcatcaaaaccaatgatacagccttctatccgcatattcacttgctcatagagccacacctgaatccgcgatctattttgtaagtatctgaagatgaggttgatgggctgcaccataaccttctgcactttctgaccctggccacggtacgccatggtggaatttcacaaagagcacacccgcacgctgcctctgagagcaacttccggaataaagaaccggaagcctc

SEQ ID NO: 442828 - DNA, 465 bp, Homo Sapiens
  misc_feature (268)..(268): n is a, c, g, or t
  misc_feature (290)..(290): n is a, c, g, or t
  misc_feature (396)..(396): n is a, c, g, or t
  misc_feature (412)..(412): n is a, c, g, or t
  misc_feature (443)..(443): n is a, c, g, or t
agacaagtttgcagtttattgagtaatggctggcttcacagatgttatcactgggggcggttgatagggggaacaggaaaatgctctcagaggttcccactgaagccctttcatctgccctgccccacccaccactgaagccagaggtcatgggagttgggatctaactacactctgtgaacttaccaccacccattccatccccaagcccatattttatttggactagccactgatgcccgggcccttcctcttccagggggtgggnagggtgggaggtggggacaggnaccaaccctcaaggaaagaaaagaggttaaggtggggggttttgctgaatgtctaagaaatgttcagtgggaacagggctggggcacagtgggctcattgcttgtnaatcccagtgcttttnggggagggccaagggcaggttgggatcaacntgaggttcagggattttcgaga

SEQ ID NO: 442829 - DNA, 445 bp, Homo Sapiens
  misc_feature (14)..(14): n is a, c, g, or t
  misc_feature (71)..(83): n is a, c, g, or t
aaaattccctgaanaaaccttgtcccatgagcttccactggagactttgagctgctcttcagatttctttnnnnnnnnnnnnntaaatcactttgtaattcttcagtgcccctatgcacacagaatcaggccaccacggccccaagcctggagggagcctcgtgggagcggccaatttccagccatccctttggataaacccgcccgcggccacaccgggccccaaacgggaagtcactgtgagttgggcatccccacggtgcggggcagggcgagggaggtaaacggtgtggtgggctgggacacttctgggtaccacacggcctagacctggatgcccctcacagcctgcttgatgctctccaggaggtccttgttctccgggtcctggttggagtacatgtcggtgagggtgctcacataggcatcgaaattctgttcgcat

SEQ ID NO: 442830 - DNA, 519 bp, Homo Sapiens
  misc_feature (396)..(396): n is a, c, g, or t
ttttttctgttgacacaaaatctttttattccccatttgccatcttttccacaaacctctcaggtacagatcggaagaaagtgcatataaaccctgccttatttaaccaggcccaccgcctccgggacagcccctgggggagccccatcccgctaggtagaagggaaggccacaccaagtgctgagtgagccacccagacagcaggtgctctgggagggaggggcgacaaggggtaggggaaggcttcctggaggagggagaggcctggccctgagagacagggggcggtccctgaaaagggagagagaaggcacacttctccgggaaccaggccccagcacctgagcattggacccaggcggccaggaagaacacaggccaaggcgggggcctgnaagcagatgggactgtgggagcttcagggaagcagcccttctcgcctcaggtctggagtctcagaggaccctcctaggcctcctgctcggctggctccagaggatgcagagggcagaccatgc

SEQ ID NO: 442831 - DNA, 437 bp, Homo Sapiens
ttttttttctctactgttgacacaaaatctttttattccccatttgccatcttttccacaaacctctcaggtacagatcggaagaaagtgcatataaaccctgccttatttaaccaggcccaccgcctccgggacagcccctgggggagccccatcccgctaggtagaagggaaggccacaccaagtgctgagtgagccacccagacagcaggtgctctgggagggaggggcgacaaggggtaggggaaggcttcctgggaggagggagaggcctgggccctgaggagacagggggcggtccctgaaaagggagagagaagggcacactttttccggggaaccagggccccagcaccttgagcatttgggacccagggcgggccagggaagaacacagggccaaggcggggggcttgaaaggcagatggggattttt

SEQ ID NO: 442832 - DNA, 335 bp, Homo Sapiens
  misc_feature (311)..(311): n is a, c, g, or t
  misc_feature (315)..(315): n is a, c, g, or t
aaaaagcaaaaacaatattgattttaataaaatgtccgcccttttaaaatcaaacacatgtaatactttatctgtataatacattgaagtatgtcttgttctttaaaatatagtttctccaaatgattctgaggctcaatcatgattacaagatacatgaaattaggcacattaacatgacacaactattcagtaatctttacagtgcattatttataagacgccacaagtcacacagtttatacaagttaaaatgggctatatgaggtatctgcagtttttgtgtatttttccctgctaggtaaagtgantatncctttaacattgtaccttgg

SEQ ID NO: 442833 - DNA, 635 bp, Homo Sapiens
ttttttttattccaaaagcatttaattgaatttctcaatgtttttcaaaaacaaaaagatccaaattagaggtaaaaaggaacatggaaaattccactcaagtggtgtcacgatctcagggtcatgctccaggcatggcagaacccaagcaggcgcaatacctgccctgggcccagctaaaccttctgactaccacacgctgtagaccacggccagtgctccctgctccctgacccccaaacaccccagagatgggggcctgagcaggtaaaggccagccgtgaccctgccccagcctaggcctgtctgctggccttcagtgccatcccacccctgggcaaggcaggcttagcagctaagggaggctgggggtcacgaggccatgcagcatgaggctgagacgccgagctgctttgccaagtgagttgtgtggctcagcctgcaggaactgaaaaagcttttggcgcacctgggccataacggagcccatgtggtcccgagtgatggggtcactgtggtccaggtgcatcacggcctcttccaggtagctgagcttgaggtcagttcgagtgccaaggtcagatgccagctgctggatgagggaaaggagcacaggctgggagagcgggtcgggt

SEQ ID NO: 442834 - DNA, 418 bp, Homo Sapiens
  misc_feature (57)..(88): n is a, c, g, or t
attttatatatatgctgagaaagttccacatatatatacaattgcgtatgtatatannnnnnnnnnnnnnnnnnnnnnnnnnnnnnnnacaggtataaaaacttgacaggcagagtaatatttcactcagtgttaaatgaagtctttgaaaaatcaagtacagtcactcagttaacatagtacagccagtaaactaagttgaaaagagaaaaagtgaatggaaacacgatcctggaccatctgtctatggcattcacatcggttagatcaggtattttaattttgagctgtgaagacctcctccgtagatgggtcttcttgtgcgggaggcttctgtcccccaggaatcgcccatgcccttctcgaggcatgctctgtttcctgtcactggattcctgagttgtcaaaggatattgct

SEQ ID NO: 442835 - DNA, 527 bp, Homo Sapiens
  misc_feature (12)..(12): n is a, c, g, or t
  misc_feature (117)..(117): n is a, c, g, or t
  misc_feature (123)..(136): n is a, c, g, or t
  misc_feature (336)..(366): n is a, c, g, or t
aattttaaaacnaaaacacctaactatggataaatacaagacacatttggggatgatattgtgtttcacgccctcattcctcaaggcataatatttagatggatacttgtccctttncaattnnnnnnnnnnnnnnctatgactttctttaatatgcatcctgtggtaaattgtccatagctgcaaaatgtatatatgtatgtgtatttgtcttccatacacatgggcactgactcctgtgtgtataaacatatacacatacatcctcatatacacgtgtattttatatatatgctgagaaagttcacatatatatacaattgcgtatgtatatannnnnnnnnnnnnnnnnnnnnnnnnnnnnnnacaggtataaaaacttgacaggcagagtaatatttcactcagtgttaaatgaagtctttgaaaaatcaagtacagtcactcagttaacatagtacagccagtaaactaagttgaaaagagaaaaagtgaatggaaacacgatcctggaccatctgtctatg

SEQ ID NO: 442836 - DNA, 812 bp, Homo Sapiens
  misc_feature (183)..(195): n is a, c, g, or t
ttatcgttataaaatgtcacgtttattgctacagtgctgttatatacaggacaggtctctgaatccacctgaaagagggtcgttttaaagtcccaatcatccagccagctgtgttgacacgtatacaattattttctttaaaaaaatttttttgaaaaccatcttgaggcactcagatcacannnnnnnnnnnnnataattgtggttcccaggaactgctgtttcttcctcctcgcgctgggtgaatctcgtttgaattctatgcagaacgcacagttccagaggctatggggccactgcccacccagacctaggggcagggccaggagcaaaacaagagggagaggcaagttcccttaagagatcaaactcccagggcgtaggggaagccaccgagaagggagaggcagccggacagcccctcccctccgcctggcctggactgggggcagataccaggcattgagctggccttgaggtttcccttgcatctaccatggggcccaggctcccaagccagtctggggaggggagtcaggcagtccaggatctcctgggggtaacggtgggagtctcaggagtggcacggggggagacgcccgacctgcagcggggatgaacacagccagcccaggggtccacaaggcctcaatgcagggaggggcatgaagggcacatgaaggcccccagctagccaggcccacacctgggtgccacagtgaccactgccctagttcgtgtggaactggatgggatcccagggtaggagacttgcagttttaaacccaagacagtccccagccagctgggac

SEQ ID NO: 442837 - DNA, 399 bp, Homo Sapiens
  misc_feature (37)..(37): n is a, c, g, or t
  misc_feature (236)..(236): n is a, c, g, or t
agatggaggaaagtgatatcccccaagcctaaaaggncttatttcctcaacgttgctccccatcaagcccctttacttgaccctccctaacaagtagcaccctggattgatcggagcctcctctctcaaactggggcctccctggtcccttggagacaaaatcttaaatgccaggcctggcaagtgggtgaaagatggaacttgctgctgagtgcaccccttcaagtgaccaccangggagctatcgcaccactgtgtatttaactgccttgcgtacagttatttatgcctctgtatttaaaaaactaacacccagtctgttccccatggccacttgggtcttccctgtatgattccttgatggagatatttacatgaattgcattttactttaatcac

SEQ ID NO: 442838 - DNA, 1215 bp, Homo Sapiens
  misc_feature (38)..(38): n is a, c, g, or t
  misc_feature (535)..(594): n is a, c, g, or t
  misc_feature (710)..(744): n is a, c, g, or t
  misc_feature (900)..(927): n is a, c, g, or t
  misc_feature (1054)..(1081): n is a, c, g, or t
tttaaatttttggttccggctgacaaccccatactganggacttaaaagaaaaactgtcctttccaactcatctcccttgccttttgggttttgactgtggggaacctgtggtaccctggggtagaaccgaacattcctttccccctagtaattaataattgttttttaattattattacatgctatgaaaagatatgaagatcatctgtttatagcccatcgttcaaaaaaacagtctacgaatccagtttaaaaacacacatcttgatctctaaaaagttaccagtgcagtatgaacgcgacaaagttgtcaatttcccctaaattagccagtcaaaatatttttttctcaaatccagattctcttgtaaaaattctttatattttataaaaatagatttttcttgaaacccattttcagcaaagagaccacctctttggcaacaatgttaatgttattaaattgttaatgtcatcaggtatcccccttgcccccatcccctaacagaagactgttttagttcacatgatatnnnnnnnnnnnnnnnnnnnnnnnnnnnnnnnnnnnnnnnnnnnnnnnnnnnnnnnnnnnnattattcctctttaatttgtgtgggggtttttaccaatctgattggatcgatattttgacaaaaaagaaaaatctttttttcctttctttgaatcccattactttgtaaaaattgnnnnnnnnnnnnnnnnnnnnnnnnnnnnnnnnnnncttcttcaaatgagcgaatggtcatcttaaaaagatccaccttcaaggaaggtagtaaagttagctggctgggtaaaaatccctgcacatcgctatctatgtatattatattcaacaacgacagctatgaaagaacattcaatgcatcaaaggtannnnnnnnnnnnnnnnnnnnnnnnnnnnctaagcattataaaatcctttcctggtacacctcaggataatccaatgttttaatacttaggcaacactggcttataaagtccatggttgaatataagccttgaaaagtttgtttctctctctttcnnnnnnnnnnnnnnnnnnnnnnnnnnnntttgttcgtatatatttctatatatattttagtaagtaagaatgggaaattcaggacttgtgggctttgttggttttaaaggaaacttgcaacactctgtctcccaggcggtacccgttgaggctggcgatggc

SEQ ID NO: 442839 - DNA, 546 bp, Homo Sapiens
  misc_feature (407)..(407): n is a, c, g, or t
ctcagcacaaaatcaacactatacaatttcaggtcaggagacataaggaaaggtgttttaacttcacccagcctcaaattttcagacagtcctaaaagccttggagattcattccatttcttctataaatgttaccttagagaggcaacagagcaggggaacagccagaagggaaagggggtacatgtcaggggtgagggaagggaagggagaggaacttttattctgtttacagaaagatttgctttttaaaaacaaacagtgattttttctcccccaccccttatcctcaccccaatagttctattctgaaaaggggggaaacatagttagatcagggaattcttcattgttgtagctgttgctctgatctcccagcatggacagcatctcctggaagacctcangctggccaggttgctgtgctggcggttgttgaacatgttgctcactagaacttgaacgatgatgaggctgctggccctgccactgtggccagacacccacaccctctgttgtcgtgtctggaatgtcctgcatctgtcc

SEQ ID NO: 442840 - DNA, 817 bp, Homo Sapiens
ccccacactgctttacattccatagggtttctctccagtgtgaagtaagtttcatgatttcgaactgaactaggacaatcaaagcctttcccacatatcttacatttatgtggtccgtctccagtgtgccttatcatgtgtcttcgaaagcttgtgtgatgataaaacgttttcccacattgcttacatgcatagggttgttctcccgtgtgagtcctttcatgtagtcgagtgtaatagtaacagctgaaggctttcccacattgtttacatttatagggtttctctccagtgtgagttctttcatgtcttagataggaactgtaatcaggaaaggctttagaacactgcttacattcatacggtttctccccagtgtgtattttttcatgtcttagataggaactgtaaacagggaaggctttagaacactgcttacattcatatggtttctctccagtgtgagttctttcatgcatacgtaataaactgggccaaaaaaaggctttcccacacaattcacatttataaggtccatctccaccttttactaccatatgtcttcgaaggtttccaggagaactgaaggtttttccacattctttacaatcatatggtttctttccagtgtgaggcctttcatgtgtttgaaatgagttgtggtaacttaaggctttcccacactgcttatgtgtatatgacttctctgcatattcatgacactcccggtgtttgtgtccagtatcaactctgatgtagcaattcagggatgaatgacccattatgacttctccattcacactgcttccacatgcat

SEQ ID NO: 442841 - DNA, 2033 bp, Homo Sapiens
cgtcctcattgtcctcgtaagagatgctaaaaaccttgtacctatggaccccaatggcctgtcagatccctacgtaaaactgaaactgattcccgatcccaaaagtgagagcaaacagaagaccaaaaccatcaaatgctccctcaaccctgagtggaatgagacatttagatttcagctgaaagaatcggacaaagacagaagactgtcagtagagatttgggattgggatttgaccagcaggaatgacttcatgggatctttgtcctttgggatttctgaacttcagaaagccagtgttgatggctggtttaagttactgagccaggaggaaggcgagtacttcaatgtgcctgtgccaccagaaggaagtgaggccaatgaagaactgcggcagaaatttgagagggccaagatcagtcagggaaccaaggtcccggaagaaaagacgaccaacactgtctccaaatttgacaacaatggcaacagagaccggatgaaactgaccgattttaacttcctaatggtgctggggaaaggcagctttggcaaggtcatgctttcagaacgaaaaggcacagatgagctctatgctgtgaagatcctgaagaaggacgttgtgatccaagatgatgacgtggagtgcactatggtggagaagcgggtgttggccctgcccgggaagccgcccttcctgacccagctccactcctgcttccagaccatggaccgcctgtactttgtgatggagtacgtgaatgggggcgacctcatgtatcacatccagcaagtcggccggttcaaggagccccatgctgtattttacgctgcagaaattgccatcggtctgttcttcttacagagtaagggcatcatttaccgtgacctaaaacttgacaacgtgatgctcgattctgagggacacatcaagattgccgattttggcatgtgtaaggaaaacatctgggatggggtgacaaccaagacattctgtggcactccagactacatcgcccccgagataattgcttatcagccctatgggaagtccgtggattggtgggcatttggagtcctgctgtatgaaatgttggctgggcaggcacccttttgaaggggaggatgaagatgaactcttccaatccatcatggaacacaacgtaggctattccaagtctatgtccaaggaagctgtggccatctgcaaagggctgatgaccaaacacccagggcaaacgtctgggttgtggacctgaaggtgaacgtgatatcaaagagcatgcatttttccggtatatttgattggggagaaactttgaacgcaaagagatccagcccccttataagccaaaagcttgtgggcgaaatgctgaaaacttcgaccgatttttcacccgccatccaccagtcctaacacctcccgaccaggaagtcatcaggaatattgaccaatcagaattcgaaggattttcctttgttaactctgaatttttaaaacccgaagtcaagagctaagtagatgtgtagatctccgtccttcatttctgtcattcaagctcaacggctattgtggtgacatttttatgtttttcattgccaagttgcatccatgtttgattttctgatgagactagagtgacagtgtttcagaacccaaatgtcctcaggtagtttggagcatctctatgagatgggattatgcagatggcctatggaaaatgcagctgcataattcacacattatcatagtcctcttacaatttattttccgccgcatgtcagctaagtagaccccatgggggagagaaaaatgcctgcctttctttcccctcttttttctgcactgcccatatttcaccccccaaccattccaatctgggggataatttgaatgttagccggtaactccttccacttccggggccctggagccttggcctttgtatccaaaggtgtatggggttgccttttgccctaagaagggaatcccctctaatttcccccctgtttcttggaaggccaccacgaacctt

SEQ ID NO: 442842 - DNA, 975 bp, Homo Sapiens
gtctggtttattcaaagtggctgtcagaggcccgaccatggagcaggaaccaaatagttgggagctgtggggctgaacagggcagggatttccaggtatcagaaggtaaaaggaggtcagctgagcagccacagcagcattagggccaggctaagcaggaaaggccaggctgcccagggcccagccccactcatggctgcagcatagaacctcgccacctcctcattggggttgccctgggctgggtcgaaccacatctggatgcagcggccactccctcggctgtagttgctgaccttgtaggagtgagtccagatttcattgcacagaacagtgggtgtggggaagtagaaatggaaaggttggcaggcagctcccactgcgcacttgttaaaccctgaagtccagttccagcccttgtgccagttgctcttgcaggtgtaggaggtgcgacaatcttcccaccattgctcacagtcctctttgcacaggggcacgttcagtacccgctctttgcgccagctctgatccacctgctggatccagggccccaagttgggggagcactcgtagaggcaggtgtcctggatgaaatgccgtttgcaggcaggtgccatctctccacagtggttccagttgaatctatataggtaggaaacatccttatgggcttcctggctggtgttggtagaacagcaggcattcttcctccagggtcgacactgctcatgcaacttgtcctcggggcctggcttttccttgtggtgcttggcgttcatgcagacattgagaagctcagtcctggcccatgcaatccttgtctgagcctcccctactacagccacccacactagaaggagcagcagctgtgttgtcatccgctgagccatgtctgtccctgggagaggaggtggctctccgtctggctcaggcttctgctctgctctacactccccatcccgggaattccggacc

SEQ ID NO: 442843 - DNA, 954 bp, Homo Sapiens
gtatcagaaggtaaagaggtcagctgaccacgctcagcagcatagggcccagctaaccaggaaaggccagcctgccccaggccccacccccactcatggctgcagcattagatccttctccacctcttcatttgggttgccctgggcttggtcggaccacaatctggatgcagcgccacttccctcggctgtagttgctgaccttgtaggagtgagtccagatttcattgcacagaacagtgggtttgggaagtagaaatggaaaggttggcaggcagctcccactgcgcacttgttaaaccctgaagtccagttccagcccttgtgccagttgctcttgcaggtgtaggaggtgcgacaatcttccccaccatttgctcacagtcctctttgcacaggggcacgttcagtacccgctctttgcgccagctctgatccacctgctggatccagggccccaagttgggggagcactcgtagaggcaggtgtcctggatgaaatgccgtttgcaggcaggtgccatctctccacagtggttccagttgaatctatataggtaggaaacatccttatgggcttcctggctggtgttggtagaacagcaggcattcttcctccagggtcgacactgctcatgcaacttgtcctcggggcctggcttttccttgtggtgcttggcgttcatgcagacattgagaagctcagtcctggcccatgcaatccttgtctgagcctcccctactacagccacccacactagaaggagcagcagctgtgttgtcatccgctgagccatgtctgtcccttgagggccacgccggagaaatctgtactctcagggaataccaggtgatcctttgggttcagttcctgggagaggaggtggctctccgtctggctcaggcttctgctctgctctacactcccccttgccttattccaggggacagctg

SEQ ID NO: 442844 - DNA, 1106 bp, Homo Sapiens
gacattcaagaccttttataatctgattccttctcaagctaaccctcccgtacaaacacatgggcaccacaggcaggccatagcgaactgctgcacacagtcccccagccacctgctgaataccttctccccctgacccatctcaggcctcctcccataagcccacaagctatccagtacccagcctttatcacagcacctgtaacacattactgcccttaaatgggacctgggtctttttggaacagaagagagtagaaggcaaacatcacagatgtaccagggtgctacactttattgcaggtgtcttaggagagaaaaaaaggtagaaaaaggagaaagcatgaataagaagagggccaggaccctagtggtgccagagccatagtcacagggccaaacgccctataccacccaggcctggacaaaggtagtggctctgggggaggaatcctagggcctggggcctcagactcaagtctgctgggcctgcaaagggctggggaggggcaggttgtccttgctcattaagggagaggctgtgaggactgtggggagggaaggccatgggaggagatggggcagttctttgcccctgtgtccctgatgctgcctcccaaaggcacagtcccatgctccccactgccctcaaaggagaaagcttagtgggaatggcacccggaatatagaagagaacacctgaatgagatggggtcgggcagggggctgctgagtgtgttcactgccttccacttccctttctccagcctcctcagttccagattttgaggaagctgtcccaggaacctgtggccacagccatcccgtcagctgtgactctcaggcagctcaccctgttatcgtggccagagaggatgcccacacgctcagacttcatggagtcccagacattgcagttgaagtcgtcgtagccagcgaatagtaggcggccactgagggagaaggccacggacgtgatgctgcagatgatgctctcgtgggagaagcagatcagctcctggtctgcccgcaggtcaaacaagcggcaggaagcgtcatccgagcccgtgcagatggcctctccattggggaagaaacagatggcg

SEQ ID NO: 442845 - DNA, 1414 bp, Homo Sapiens
ttttttttcaagtccaagagtctttatttcatgaacaaaactacttctgtaaagagacgaggctgaatgggcccctttctaggtggccacagttcaaggctggtgagagagggcgaggttgggccggggcaggagtgcattacagggaggggggaccccaggtccagccggaggaagcgggaggggaaatgatgccggggagggggagtcggagtgggtcccagaaccccctgccccaaactgctccagcccatcatcgcgacccctgccgccaggcagggaggaggcggggaggggctggccccagaagtgcgtgtctgaagcggccaatgtgtgcaaatcagcaaggaggaggggtgcggggccgctgcccccacctcaccgcccccctccccaaacaggcagcagaagcagggtgggggcagcggcagtattgctttacccatcatgcatggcggtgcgcggccggcggggcaggagctggaggaggcgaaagtgggggtgcgagccaagccccctgccccctcccaccccagtggctccgtcggcaggactctgaggctttctggggcccaggagtggccacccccacgctgggggcagcggtgcctggagagtccccattacggctggctcttccttgaggcggggcccagggccagggctattcggccacctggacgcccgtgcagttctctttgctttcagaggtgatggccaggtattccgaggcattctcctgtgcagcagtctccgtggcggcagcgatcttcttgtagcagtaaatcatctctgccacgagccatatggtcaacaccacaatgagcacatacatcatgatctcagacacgatggatgccatgtctctgttggctttgtccactacctcaatgtggatcttcttgacgacgctggtgttgtgctcgtagttttcgaagaagagcaggcggtagacgtggcactcgtagtcgcccgagtggttgtaggtgacattggtgatgaagatagacagatcctgcaggtctttggtgccccggctgccattccacaccacgcggccctcgaagcgctcatcctcctccagctgcaacacctcattctcatagcgcaggatcttgacaaactcctcagtgcccttctggcggaaggtccactcggtgaaggtctcagcgttggtctcgctgcggcgcttgcaggagatgcaaagaattttgaaggtcatcccatacacggcctcggtctccgagtccacctccacgcagcccccgcaggctgaggacaccagtgccgcgccgaccactaaggccagcagcctccccatggctgcgcggcgcgtgctgcgcccccctcccgggccgccggtattaatagcggggcgagaggcggcgggacctggcggcggttagaatccgct

SEQ ID NO: 442846 - DNA, 1324 bp, Homo Sapiens
  misc_feature (204)..(220): n is a, c, g, or t
  misc_feature (1153)..(1162): n is a, c, g, or t
  misc_feature (1253)..(1265): n is a, c, g, or t
agcggagtgcgcaggagaccgcggtccgcgcccgagcgcgcccgagccggagcgggacaggtgtcggtgcacctagcggatgtgcccggctgcgcgcgccagcgcagcagcccgagcagcggccgccgcccgcgcggcggggatgcccggacgccgggccccggggctgggcccccggcggtaaccggagcgggggggccgcgnnnnnnnnnnnnnnnnntcgccggtcccagagccgcagctgctgcgcccgcgcgctcccggggacattctaaccgccgccaggtcccgccgcctctcgccccgctattaataccggcggcccgggaggggggcgcagcacgcgccgcgcagccatggggaggctgctggccttagtggtcggcgcggcactggtgtcctcagcctgcgggggctgcgtggaggtggactcggagaccgaggccgtgtatgggatgaccttcaaaattctttgcatctcctgcaagcgccgcagcgagaccaacgctgagaccttcaccgagtggaccttccgccagaagggcactgaggagtttgtcaagatcctgcgctatgagaatgaggtgttgcagctggaggaggatgagcgcttcgagggccgcgtggtgtggaatggcagccggggcaccaaagacctgcaggatctgtctatcttcatcaccaatgtcacctacaaccactcgggcgactacgagtgccacgtctaccgcctgctcttcttcgaaaactacgagcacaacaccagcgtcgtcaagaagatccacattgaggtagtggacaaagccaacagagacatggcatccatcgtgtctgagatcatgatgtatgtgctcattgtggtgttgaccatatggctcgtggcagagatgatttactgctacaagaagatcgctgccgccacggagactgctgcacaggagaatgcctcggaatacctggccatcaccctctgaaagcaaagagaactgcacgggccgtccaggtggcccgaatagccctggccctgggccccgccctcaaggaagagccggccgtaatgggggactctccaggcaccgtctgcccccaattttgggggtgccccactcctggggccccccaaagcctccgaatccctccccacgaacccttnnnnnnnnnnaagggccccccacttcctttccctctacacctctttttctctctatttaccaccccccactctcatccttgtcgttccacgtacttccctnnnnnnnnnnnnntttaaccgcggcgtccttctatcactcgacgccctttatccttcttccctactcttata

SEQ ID NO: 442847 - DNA, 937 bp, Homo Sapiens
tgggccccttcaaggttcccccttttaggaggaggacccctggctcctagcgctgggtttggggggctagggcctgctgaacttgggaaggccggggaagtagaacccggaatggggtgattctgggtttcttgcagccatttcctcctttgttggtgtagggggaggagagaagaggtcaaagaaagcaagaccctgcaagaggcatcccagtgaccccccagaagtgactggggtaaggggagcgctatcctagaaggaggggtgggacggagggggcagtgaagcagggcggtgagcatggccagtggtgggcttcggccgcggttctacctgtggccactcactctcggacgtagaccctggtgcacacaacgtcatccgccgtcatggtcaggatcagttccccatcgttggtcagttctctggtccacgaggtcttggggccctctcccttcaggagcttctgctcacagaccattttattctcactctcccatttcaccaggctcttacagggcctcccatccacagtctgctcctcaaactcctccccaaccttgaagttaatctctgtggtgcgcacggtggtggaggttttgatgtagaaagtgtctccctcctgtttgatctccactgctggcttggacgctgcagccacagcaatcttcctcagcatcacattcacccccagcactttgagcaattcctcgaagttttccgatcggatgattttccagttgccagagaagttgggcatggtggcggcgcgggaggcggtccccgtagactcctaggctggagcactggacactgtcttttagtcaaaagagacgtcgccgtcgccgggtcgtcaggttctggaaccaagacaagtccagggcaaccctcgtgcctgaattaaccacccgggcctcgctacctagcctatagctat

SEQ ID NO: 442848 - DNA, 547 bp, Homo Sapiens
atttttttaaagcattttaataaaattaacaaataaatattctaaactgtataggctacagggacaaagggtagaagctagagggccagtctttcctgctcaggccctcaagtcccctttagagagaccctgctctgggctggtttggggctaggactgctgacttggggaggcggggagtgaacccggaatgggtgatctgggctcttgcagccattcctctttgttggtgtaggggaggagagaagaggtcaaagaaagcaagaccctgcaagaggcatcccagtgacccccaaaagtgactggggtaaggggagcgctatcctagaaggagggggtgggacggaaggggcagtgaaacatggcggtgagcatggccagtggtgggctatcggccccggttctacctgtggccacttactctttgacgtatacccttgtgcacacaacgtcatcccgcgtcatgggcaggatcagttcccatcggttgcagttctcttgtcccagaggtctggggccctctccctcaagagcttcttctacagac

SEQ ID NO: 442849 - DNA, 1502 bp, Homo Sapiens
  misc_feature (19)..(19): n is a, c, g, or t
  misc_feature (317)..(387): n is a, c, g, or t
  misc_feature (435)..(473): n is a, c, g, or t
  misc_feature (482)..(500): n is a, c, g, or t
gccgtgtgttggtgaggcngcgggtgttgtggcggtgtgctaccaatgtctttgaaggcgggggcgcatcatgcgggtttcctgtgagagaaccccgtatttggatttggctctttggcgaagcccggttaccttcggaaaaaagagctggtgagcttttatcccgcaaaacaaaaccccccttgggtaggggtggtttttttgtttgcaaagcggcagattatccgcagaaaaaaagggtttccaggaagatccctttggatcacaaaaaaaagcccggctcattgggcgggttaatttcccgggtactgcagcgnnnnnnnnnnnnnnnnnnnnnnnnnnnnnnnnnnnnnnnnnnnnnnnnnnnnnnnnnnnnnnnnnnnnnnntcccctttgtacaagaaaggtgggtccaggaaacagctatgaccatgnnnnnnnnnnnnnnnnnnnnnnnnnnnnnnnnnnnnnnngcctcgagnnnnnnnnnnnnnnnnnnnatttttttaaagcattttaataaaattaacaaataaatattctaaactgtataggctacagggacaaagggtagaagctagagggccagtctttcctgctcaggccctcaagtcccctttagagagaccctgctctgggctggtttggggctaggactgctgacttggggaggcggggagtgaacccggaatgggtgatctgggctcttgcagccattcctctttgttggtgtaggggaggagagaagaggtcaaagaaagcaagaccctgcaagaggcatcccagtgacccccagaagtgactggggtaaggggagcgctatcctagaaggagggggtgggacggagggggcagtgaagcagggcggtgagcatggccagtggtgggcttcggccgcggttctacctgtggccactcactctcggacgtagaccctggtgcacacaacgtcatccgccgtcatggtcaggatcagttccccatcgttggtcagttctctggtccacgaggtcttggggccctctcccttcaggagcttctgctcacagaccattttattctcactctcccatttcaccaggctcttacagggcctcccatccacagtctgctcctcaaactcctccccaaccttgaagttaatctctgtggtgcgcacggtggtggaggttttgatgtagaaagtgtctccctcctgtttgatctccactgctggcttggacgctgcagccacagcaatcttcctcagcatcacattcacccccagcactttgagcaattcctcgaagttttccgatcggatgattttccagttgccagagaagttgggcatggtggcggcgcgggaggcggtccccgtagactcctaggctggagcactggacactgtcttttagtcaaaagagacgtcgccgtcgccgggtcgtcaggttctggaaccaagacaagtccagcctcgtgccgaattcgccacccagcctcgtacctagccgtattgtttt

SEQ ID NO: 442850 - DNA, 649 bp, Homo Sapiens
ttttagttcattggaaaaggattttatttcaccataaaaatgcaaactggaataaacaccatctttcctaacgcgaacgttacagctatttttaggtatttctgagcttcacttggagaagcaaacgattataaaacaagtttgcagcctgaaatctgtttgaaacattccaagtaaaaataatttagcaaaacagcttcttaaaaaaaccacacacactaacctttactagaaaccaaagcttttaaccaatcttttttatgcttaattccttgacgttgtaaaaagtgaatgtttttgaaggagcatcagaccattttgtaccactccccacataccgacaccttagaaagaacggcccgtttgagttttgatcttaaaggacttgtaccttcctcatccgtgactcaatgtcagcacgacgattcggcatcccacccaaactgcacttcctgatcagttaacattacaaacgggggggaaagaatcaccagggcaacgctttcttttcagtgccagtgtgactatggtggcccgtgcacctcctaggccgtgcacgcagtgaggtcgccaagcagacacagaaatccccgtgtgggtgaatgcagcagctctgccatcctcacgactgtcggtctgtgcaattttc

SEQ ID NO: 442851 - DNA, 545 bp, Homo Sapiens
ttttttaggcaaaataaatactttattgttttaatatatatatattttagaaatcagcctttgtgtgatatttcaaacatttataagccttttagagattctttcaaagaacactgttaacaactcaaccacttttgattaaaatatcacacacaaagaaacacaataggagttgaaaaaattataaatgctagaagaaaaattctaataacatttggtggttactttacacatttatttaacacatataaaaccaaatgggaaaccattttccttttttttcataaaaacaaagttttcactggttaaaactgaactaaaatcattttatgtatgaggagaacaaatctaaattacttccattttgaaaaaacaaacaccagcttattcatttctattcattcaagtcataggccccattatttggatgatactctatttagtctagaagacagaaaaagaaacatctccatctaataaagaagtctggacaatgcaaaaggtaaagtacatagtggtttacataaggcacatttccacagaaa

SEQ ID NO: 442852 - DNA, 476 bp, Homo Sapiens
ggaggtacatgtctttattattatgtcttgtgtgctttgacgttagttccaggtcacaagaaacagttatttcctggctaaaatggcatcataaatggctcctgttttcttaaactggaagtctctgaagccagcagaagagaggagaatgtggtagtgggtgggggtcctctcctgcccttccgtctgcacaagcatgttcagagagtagagctgcgtgacaaaggaccctcgcctgtcttcatccaggaggctttcaattaccagaatgccaccacctggcttgcaagtgtggtagatcctctccagcaggtgtgagcactttccgtctgcccagtcatggaggaccctggccaggatgtacagatcagcttccggaagagggtctttgaagaaatccccttcctggaagtcaatctgttcttcctcctggaatgagaagtgctgctttgccgtccacaccacttctgggatgt

SEQ ID NO: 442853 - DNA, 1200 bp, Homo Sapiens
  misc_feature (1132)..(1132): n is a, c, g, or t
gctgttatttgacggctacgtatttttactttattcacacagtttacattcaaagtcagaggtggatgtgaaatttgaaaggttttatttcctaactacaggcagctttaagaggctgattatctgccacgaccccccaggctgggaggcggcagcagggcaggggagagcaaggggctttggggtcgacctcctgggggagggtagccctggggccccgctgtgccctcactcgcccttcttgtaggcgttcttgatgatggcgtttttgaacagcgtcaccaggggcgtctggctcttctcggaggtcatgaaaccgccgtagcgcttgtccttgggcgggctgccccagcggaagtgctccatcctgtaggggccctcgtccttcttctcggccgccaccagcaggctgtgctccaggtcggcctgggcccctgcgccgtcatcggcagggccgtcggggccatctccctcccggagtcgctggccagtcagctccctcttgaactccagggggaaggcctcggccgactcgtcctcggcgccgttagggtacaccttcactgggcgccgcttcttgcccaccggcttgccccagcggaagtgctccatggagtaggagcgcttgccctcgcgcgggcccggcttggcaccatcgctgcggggctcggggccgccctcaggcagcgggccgcagtcttcgcccgctgagacgtcctcgcgcttctgccctgcgccgctgctgccgctgctgctgctgttgcggcggccgaatcggtcccagcggaagtggcccatgacgtacttccgggggttctcggtcagaggctgctcgtcgccatttcccgggaacatgggagtctcggccgagaggtcgggcttgcaggcccggatgcactccagcaggttgctttccgtggtgaggtcctgacactggctgctctccaggcaccagccacgcacttccatggaggcctgaagcagcaaggccagcaacagggcccccgagcggctgcagcacgatctcggcatcttccaggcaggctgaggctctgtctcgggaggctgctctctgagggcggggacgctcggcggcctctgtcggtcgcggctcttcttccccattttgagnatcccggaccggataccagcttgctttattaaaaacgagataaaagaccaaagcaaaagcgatgagga

SEQ ID NO: 442854 - DNA, 1056 bp, Homo Sapiens
gaggattttttggaagtgttctcattaaagggaattacaaggtttttaatttttttcaaagaggggagaccccttgttttaccaccccaaggcatggaattccaaaaaggggggattccaaattaaaaaggaaaggctttgccaatgggaaccggattcattttaaggggacctttttcagggaaatatggttgaaaatgggatgtgggggcttaagccagttgtttgtttgtgggatggattcggccactttccagggagcttggagattaattgttcgattttttatgtgaatccccgtccgtaggccagtggaggcaggtttatattaagcagaaagggcgagactttttcatcagccatttgcagggatggaagtcccgaccagccaggggtagatctcattttctttgttttcaggatgaacctggctgactatcagctccatgccctttagaagccgtttggtttgctcctcaatctctacagctttggataggatagcctccggggcttcttgcataccacgtacttccgtgaccagatgatacagaggctcattccaggatcgcaatatgctgactatcaggctcagaaagtctttttgattcatctgttgggcttgctccttgtcttcgggggtggcaagggaagaagtgtggcagctgttgatggccttggtaatgaacccccggccatgggtataccgtttatcgaattcgctgaacatttctgaggagaggttatggatgtagtgggacaggacgacggcgcggtcaaacaggtctcgaagggtcacctggcatcgggcagccccgccgggacagatgggcaagggggccacgctctggcacaggagcaggtttgacaccagcagcagcaggagggaccctttcacatggcgatcctttgatgttcatgttcgtgatcgttgcaggaaacacacttcaccagagaagatctggaagtctcacggttttctctttcccagatattggctttataaacctttgatatcaaagcctgtatgttccgattcttcttggtgtctctccc

SEQ ID NO: 442855 - DNA, 907 bp, Homo Sapiens
gaagggagggtcccaggtttttataattgtttttaaaggaagggaggacccctgttttacacccccaaagccaggggtttccaaaaggggaatccaatttaaaagaaggccttgccaatggaaacggaatcatttaaggacctttttcagaaaatggatgaaatggatgtggggtttagcagttgttgttgtggatgattcggcacttcaggagcttgagataattgtcgattttatgtgaatccctgcgtaggcagtggagcaggttataataagcagaaaggcgagactcttcatcagccatctgcagggatggaagtcccgaccagacagggtagatctcattttctttggtttcaggatgaacctggctgactatcagctccatgccctctagaagccgtttggtttgctcctcaatctctacagctttggataggatagcctccggggcttcttgcataccacgtacttccgtgaccagatgatacagaggctcattccaggatcgcaatatgctgactatcaggctcagaaagtctttttgattcatctgttgggcttgctccttgtcttcgggggtggcaagggaagaagtgtggcagctgttgatggccttggtaatgaacccccggccatgggtataccgtttatcgaattcgctgaacatttctgaggagaggttatggatgtagtgggacaggacgacggcgcggtcaaacaggtctcgaagggtcacctggcatcgggcagccccgccgggacagatgggcaagggggccacgctctggcacaggagcaggtttgacaccagcagcagcaggagggaccctttccatggcgatcctttgatgttcatgttcgtgatcgtcgcaggtccggaagaattcccggacccggtaccagc

SEQ ID NO: 442856 - DNA, 884 bp, Homo Sapiens
aaaagaggggaggaaacctggttaaccacccccaaggcctggggttttcaaaaagggggttcccacctttaaaaggaaggctttgccaattggaacgggatccatttaagggccctttcttcagaaaatagatgaaatgggatggtgggctatagcagttgtttgttgttggatgatttcggcacttcaggagcttgagataattgtcgattttatgtgaatccctgcgtaggcagtggagcagggttataataagcagaaaggcgagactcttcatcagccatctgcagggatggaagtcccgaccagacagggtagatctcattttctttggtttcaggatgaacctggctgactatcagctccatgccctctagaagccgtttggtttgctcctcaatctctacagctttggataggatagcctccggggcttcttgcataccacgtacttccgtgaccagatgatacagaggctcattccaggatcgcaatatgctgactatcaggctcagaaagtctttttgattcatctgttgggcttgctccttgtcttcgggggtggcaagggaagaagtgtggcagctgttgatggccttggtaatgaacccccggccatgggtataccgtttatcgaattcgctgaacatttctgaggagaggttatggatgtagtgggacaggacgacggcgcggtcaaacaggtctcgaagggtcacctggcatcgggcagccccgccgggacagatgggcaagggggccacgctctggcacaggagcaggtttgacaccagcagcagcaggagggaccctttccatggcgatcctttgatgttcatgttcgtgatcgttgcaggaaacacacttcaccagagaagatctgg

SEQ ID NO: 442857 - DNA, 840 bp, Homo Sapiens
aagattttgatgtctctaaggagtcagttttattttttaagaggagacctgttacacccaagcatggattcaaaagagatacaactaaaagaagcttgcaatggaacggatcattaaggaccttctcagaaatagatgaaatggatgtgggcttagcagttgttgttgtggatgattcggcacttcaggagcttgagataattgtcgattttatgtgaatccctgcgtaggcagtggagcaggttataataagcagaaaggcgagactcttcatcagccatctgcagggatggaagtcccgaccagacagggtagatctcattttctttggtttcaggatgaacctggctgactatcagctccatgccctctagaagccgtttggtttgctcctcaatctctacagctttggataggatagcctccggggcttcttgcataccacgtacttccgtgaccagatgatacagaggctcattccaggatcgcaatatgctgactatcaggctcagaaagtctttttgattcatctgttgggcttgctccttgtcttcgggggtggcaagggaagaagtgtggcagctgttgatggccttggtaatgaacccccggccatgggtataccgtttatcgaattcgctgaacatttctgaggagaggttatggatgtagtgggacaggacgacggcgcggtcaaacaggtctcgaagggtcacctggcatcgggcagccccgccgggacagatgggcaagggggccacgctctggcacaggagcaggtttgacaccagcagcagcaggagggaccctttccatggcgatcctttgatgttcatgttc

SEQ ID NO: 442858 - DNA, 1253 bp, Homo Sapiens
  misc_feature (352)..(352): n is a, c, g, or t
cgtttaaatgtgattttcgcttaagagggagggatgtacacgctgtaatttcatactattttcctcgaaagaggagggggagtttcccaatgtggttttaccacgctctccaaatattccactgggtgtatttctctcacaaaaggtggtagagaagaataccacaccgccaaagaaaactgggaaatggcttttgcggaacaaaagttgggtggaaaagcgggggatatctcacaactttaaaaaggggtgagcccccttttcgtttctctgcgataaaatatagatgtaaatgggacaaaatttgagggtattttcgattgtagcggatattgtaagggccacaggggtntgggtaagtggtatttagagcggggaaaagaggattttctcggggacccaagcctttatcagagggggagaggggcgttttagtaaggtactatagatcctgggtgccggaattcttcgtaattggtagagaatttccccctgggtgataagggccaatgtgggaagcccagggttgtattaagtaaaggcaagaaaatgggcggagaacttttttcattcaagccattttgccaggggatggaaagttcccgacccagacaggggtaggatttcattttccttggttttcaggatgaactgggttgactatcagctccatgccctctagaagcccgtttggtttgctcctcaatctgtacagctttggataggatagcctccggggcttcttgcataccacgtacttccgtgaccagatgatacagaggctcattccaggatcgcaatatgctgactatcaggctcagaaagtctttttgattcatctgttgggcttgctccttgtcttcgggggtggcaagggaagaagtgtggcagctgttgatggccttggtaatgaacccccggccatgggtataccgtttatcgaattcgctgaacatttctgaggagaggttatggatgtagtgggacaggacgacggcgcggtcaaacaggtctcgaagggtcacctggcatcgggcagccccgccgggacagatgggcaagggggccacgctctggcacaggagcaggtttgacaccagcagcagcaggagggaccctttccatggcgatcctttgatgttcatgttcgtgatcgttgcaggaaacacacttcaccagatccggaaaatccggaccggtaccccagcctgtttttactttggtggaaaccatgtaagccgagctgacgcgcc

SEQ ID NO: 442859 - DNA, 1248 bp, Homo Sapiens
  misc_feature (304)..(364): n is a, c, g, or t
cccccacccggtgctccaacggagaacgtgattggtaaaaaaaacgtgagactggggctcccaagattgcccctccaagagctttgaattaatataaggaggagcctcccacatttttcaggggggcgggccccacccttttttgtatcccccgtaggaaaataggctttggggggttatggggcggtgtaaaagccgcctgggggaggccgccccgttccggaggggggaaaacaacttattagagagcccggaccccgccccccctcattcaattgttatttactccctactctcttgttgnnnnnnnnnnnnnnnnnnnnnnnnnnnnnnnnnnnnnnnnnnnnnnnnnnnnnnnnnnnnnaaggagggaggacctgttaccaccccaaggcatgggattcaaaaaggagataccaactaaaaagaaggcttgcaatggaacgggatcattaagggaccttctcagaaatagatgaaatggatgtgggcttagcagttgttgttgtggatgattcggcacttcaggagcttgagataattgtcgattttatgtgaatccctgcgtaggcagtggagcaggttataataagcagaaaggcgagactcttcatcagccatctgcagggatggaagtcccgaccagacagggtagatctcattttctttggtttcaggatgaacctggctgactatcagctccatgccctctagaagccgtttggtttgctcctcaatctctacagctttggataggatagcctccggggcttcttgcataccacgtacttccgtgaccagatgatacagaggctcattccaggatcgcaatatgctgactatcaggctcagaaagtctttttgattcatctgttgggcttgctccttgtcttcgggggtggcaagggaagaagtgtggcagctgttgatggccttggtaatgaacccccggccatgggtataccgtttatcgaattcgctgaacatttctgaggagaggttatggatgtagtgggacaggacgacggcgcggtcaaacaggtctcgaagggtcacctggcatcgggcagccccgccgggacagatgggcaagggggccacgctctggcacaggagcaggtttgacaccagcagcagcaggagggaccctttccatggcgatcctttgatgttcatgttcgtgatcgttgcaggaaacacacttcaccagagaagatctggaatcccgagaattccggaccggaccag

SEQ ID NO: 442860 - DNA, 968 bp, Homo Sapiens
ggcgggattgaagaaagccttttatttgtgggaagggattgggggttttccgagagggccccccgggagttcgggaaatggcctttggaaaggctggggggaaggggcccttttaggaagaaggagggcctggaaagcgggggtcatcacaggtcaaggggggggtcctggggaccccccgcagttcaagtgtgctgcggcggcagggtgcacattgacagctgagagccacggggtaggagaccacgggttccacgccgcgcgggcagccagggagccggatggactcgaagcgcacatcgcggtagttgcacaccacctgaggcaggggcggcaggaccgcctgcagcacgcgcgatcatggtggggcagtagccggcacagatggtggtgttgacggtgatgcacacggggcagccctccttctccacagccaggatggcattgatggggtggcaccatggccgaagcggctccctggatgcccatgccccgcccatgctcagcagcagcaacagcagcagcccctggaacatctccatccttggtgcgtcccctgcctggtgtacctggctttatacctcggggttgtgggggcggcaaggccaccaggaggttgtaggatgctggagtgagctcgacactaacccttcggggggcgagaagtagacaaggccagggaggcacaggagtggctcagcggagcaccccagtcctctcccctcagtggtctagcgccaaggatgaggcggagaccacggtgaagtgacctctgagactcagtcgtcgagtgttagggactagtcgaggctggaggcacagagagtagggtgtaggaaggcctgcctctgcctatggtggggtcttgggaaccaggaggaggccgtgacccgagaaaagtgctggactgaagcctcaactctcctctacttgagccattccctcgtgccgaattcgccacccaggcc

SEQ ID NO: 442861 - DNA, 496 bp, Homo Sapiens
gtgttttttactgactttattgtcgaatgagtgttaaaattgcaaagaggcgagcatctgaacctgagtactaggttaatcaaatctcaaatccaatccaatactgaaaaggaactagaaatctagagggggaaaagctaaatacaaagcaattccttcaaggcaaaaaccactatcactatcatggggttggggggcaggatacaacagcatctctgagactgtaggattagaattatgtcagaaggaggccaagaagggtctaggatttatctctggaatgacaatgcattatactgatttaagatttgatccttacttacatcctcaattattagaaatataactactagaagttagtctgactatactcctaagaacaaagaaaggcctggtggctcaagcctgtaatcccagcacctggaaggccaaggcgtgagccaccgcgcgcagcacagctttgactatttttatactccacagccaaatatggggt

SEQ ID NO: 442862 - DNA, 499 bp, Homo Sapiens
ttttttttggataggaaatacttttattgcaaaaagtactgaaggtaccctaaaaccttaagcaggattctggacatggaagcctacagaatagacaaaaataaatatgtcaacctgcccgaccctctggggtgaactggatgtggacactggagggagggcgtcctttattacatacgcgtctctgaagtcatataaatatagaataccttatagtagatcagcattaaataccagtcactgtgtttatataacttaatttgtgctgtagacaaagttctgtacatgtaacatgtggccatgcccaggcatcccagcatctatcctgaagtcagtgtaaagacatccttaagtggtggagacatgacagcccaaaacccacagcagagggaaactggggagaggagggggcctgaccctggatcccccagctggtgtccacaggctaaagggacccattgctgcaaaggctggtgcctggttttccccatacttggtc

SEQ ID NO: 442863 - DNA, 433 bp, Homo Sapiens
  misc_feature (60)..(69): n is a, c, g, or t
ttttttttgctcatggatgtgtattttaataaaaataattctgtcaaaatacaacagagnnnnnnnnnngtctctcaagtacaattttaataagatgttttgtgttagagttctctctccatcctcccacacccacaagtttcatgctaatgccaagtatcaactcttgaggacaaaggcaaaaccagtgtgcacaatgtggaggatgtctgttgcagctgtagttactaatgcaggaaaacccaatgcaaagaggaaaatgcctgaggcagccagaggccacaatctggccacaggtctgggtgcatgagactggcagtctagtagggctccgctgcctggctgccacatgggtgcatacctgagttgtgagcaaccaaaggaactttcagctctaacaattctctgcctcatcttctttgtgcttgcttaa

SEQ ID NO: 442864 - DNA, 1064 bp, Homo Sapiens
ggaatatttgggaaagcgcctcggttttatgacgcgctcgtacccacgaaaatttccaaggtgtaggggtttttttccaaaagaatttttttcttctaaccgtttcgttcccaaaatggggaattgcccctttgtcattcaggtccagtgaggatattttcccattttccatcttgggctttttacggatcttttttaaccttccatagaattttttggcaaaaaaaggccttgttgacggggaattcgcaattattcttaggggggggctttgggattctgtgaggataaaggagaaggcttagtctggttgaaaggttgttgtcgccagggtaaagaaccaaatgtgggaaacgcccggtgttttctcaaccaactaaatagtctgtacaaagaaagagcaaacatatgtacaaaattctagaggctacatacattgtgaaaagatcaatcactgtccaggaaagagatgccataaaaagttttatctgtaaggtgctcaagatccaaagatgaacagttcttatgcaaagtcataagaaatacaaagctagttttcggagcaggtgtaattcaggcactgtgaactatattaaaccttccaggtcccaatatcattttttaaatttctgcttcagggcagaaaataaaacctgaatgatttaacattgcttctaaaaagtgcctaatttattcctaggaaatattttacacacaccaggaaaatcaggctcaacatattcctgtcctcaaatgtagccaggattctgagttccatagaaggaaaataattattatagtaaaaataattgtagtaatcctaatccttgctaaaaccaactttaatacttgtgatgcttctgtactctatttctataaaataatgtgtgagattctattacatttccataaaatgtacaacatatcatatggattatatgttctcatacaatctcaaatgtgtatgtgtacacacagtgaaatcttacctactagtattgcttacagatactttcaggtgtctgttagaataattctttgcacctctcactaacactgctttt

SEQ ID NO: 442865 - DNA, 388 bp, Homo Sapiens
tggtggagcagaaaggaggaatgatccagaatagggttttggtaccagactgtttggttcacactctggctgggccacttggtagcacattacttctcctcttagggccatcctgcactgttggtggcagtggggatgaagtaagcaaatccgaaatgtttacatggcaaaatcaacaggacctctaactccatggagtgaggaaggggagaggtcaagaagactggttttctggcttccatgatgggatggcaagtggaaacagcctccaggaaagggatcagggaagcagagactagtctgggtggaaaatgagttttgtttggggtaggctgggtttggggagctttcggcacacctcggggagttgcccagtagcacacagcag

SEQ ID NO: 442866 - DNA, 700 bp, Homo Sapiens
  misc_feature (591)..(647): n is a, c, g, or t
  misc_feature (669)..(669): n is a, c, g, or t
  misc_feature (684)..(684): n is a, c, g, or t
gaaattaactcgttaaacacatttattgagctggtaacaataaccaaacacaatgtatgacctttggaaaacaagaaacagcaaatggttcatttctgatcttggcaaatcctactacagatatgtgacaaagagggaaataattccatttccttatagtctgtggtgatatatatacaatgtgtagctcttcaatgtctgtcctttttttctttgtaaattgttgagtaaacagaagaatcataatctagaaataagtgtccttggtcaactttgtcctgctcacctgctaccagcaccctcaaaggatcctaggacactatctgaaattacttgatgcaaagtccgtttgatgccatcagagctgtattttctcctctctcttttggaagaattttgtatgtacaaaggctgaaaagtctcattgggtagatttattagttcaggaaaacggtatcaaaattgaaatcaggttaactggttattttcttctaaggacctcttatgaatgaggacttttgtttctgaaacttggacttcccatggatgggaggttgtaaggaggagtgtgtgtgtgtagggtatgtttgnnnnnnnnnnnnnnnnnnnnnnnnnnnnnnnnnnnnnnnnnnnnnnnnnnnnnnnnnaggagaagtattcccccgccanggttttgcagacacntttccaagaaggaagg

SEQ ID NO: 442867 - DNA, 1297 bp, Homo Sapiens
  misc_feature (15)..(15): n is a, c, g, or t
  misc_feature (866)..(943): n is a, c, g, or t
tggaagacacgtatnccttcgcctggacaaggagcacttggtcaacatatctggagggcccatgacatacagccaccggctgaaggagatccgactacactttgggagtgaggacagccaagggtcggagcacctcctcaatggacaggccttctctggggaggtgcagctcatccactataaccatgagctatatacgaatgtcacagaagctgcaaagagtccaaatggattggtggtagtttctatatttataaaagtttctgattcatcaaacccatttcttaatcgaatgctcaacagagatactatcacaagaataacatataaaaatgatgcatatttactacaggggcttaatatagaggaactatatccagagacctctagtttcatcacttacgatgggtcgatgactatcccaccctgctatgagacagcaagttggatcataatgaacaaacctgtctatataaccaggatgcagatgcattccttgcgcctgctcagccagaaccagccatctcagatctttctgagcatgagtgacaacttcaggcctgtccagccactcaacaaccgctgcatccgcaccaatatcaacttcagtttacaggggaaggactgtccaaacaaccgagcccagaagcttcagtatagagtaaatgaatggctcctcaagtagggaacaaagccaagaagaatcccacctcagtgaaatgctacaactgtgaattgacgtaacctagaatgtcccccttcttgcttctctctccttctttcccccaagcctcattcattcttgggattggccctttcttcatgaaaagtgtctgcaaaaccatggcagaggaatacatctctcnnnnnnnnnnnnnnnnnnnnnnnnnnnnnnnnnnnnnnnnnnnnnnnnnnnnnnnnnnnnnnnnnnnnnnnnnnnnnntcttacaacctccatcatgggaagtcaagtttcagaaacaaaagtctcattcataagaggtcttagaagaaaataaccagttaacctgatttcaattttgataccgttttcctgaactaataaatctacccaatgagacttttcagcctttgtacatacaaaattcttccaaaagagagaggagaaaatacagctctgatggcatcaaacggactttgcatcaagtaatttcagatagtgtcctaggatcctttgagggtgctggtagcaggtgagcaggacaaagttgaccaaggacacttatttctagattatgattcttctgtttactcaacaatttacaaagaaaaaaaa

SEQ ID NO: 442868 - DNA, 504 bp, Homo Sapiens
  misc_feature (15)..(15): n is a, c, g, or t
  misc_feature (27)..(27): n is a, c, g, or t
  misc_feature (34)..(34): n is a, c, g, or t
  misc_feature (419)..(419): n is a, c, g, or t
accccggttaaaaanaacgggtttgtnccaatanggaccccaactgctgtccccatagcagggtgggaatagtccatcgaaccccaccgtaaagtgatgaaaactaagaggtcccctggataatagttccctcctatattaaagccccctgtagtaaatatgccatcatttttaatatgttattccttgtgatagtatctctgttgagcattcgattaagaaatgggtttgatgaatcagaaacttttataaatatagaaactaccaccaatccatttggactctttgcagcttctgtgacattcgtatatagctcatggttatagtggatgagctgcacctccccagagaaggcctgtccattgaggaggtgctccgacccttggctgtcctcactcccaaagtgtagtcggatctcncttcagcggtggctgtatgtcatgggccctccagatatgttgaccaagtgctccttgtccaggcgaagggatacgtgtcttccag

SEQ ID NO: 442869 - DNA, 562 bp, Homo Sapiens
  misc_feature (32)..(32): n is a, c, g, or t
  misc_feature (54)..(54): n is a, c, g, or t
  misc_feature (70)..(70): n is a, c, g, or t
  misc_feature (81)..(81): n is a, c, g, or t
  misc_feature (86)..(86): n is a, c, g, or t
  misc_feature (165)..(165): n is a, c, g, or t
  misc_feature (468)..(469): n is a, c, g, or t
  misc_feature (515)..(515): n is a, c, g, or t
aaccggttggtttaattttccccgccaccagnaaggaaaacccaggccaccggnaaggcagccacacctnagtaatgaagnataantaacaccctaaaactttgcccgaaactgtatattgtagccatacttaaaccccatgcaaggaaaaaattggcaaattgnaaaattcctccccattaaagattgatatttttgcaaactaacaaatttaacgatttcggtacccctccccaaaaatgcagtcacataaaatatatcaatactattttgaattagctctagaaatcacactgaaactatgttacatttacaaatattaaatttattataactaaaatgaatttaattgttctcagatttggccaccttatagctccgtttaaggaggggatttgttaaaaacaaaaatgcattataacttggtcaaattactttcacattaaggaaaaaaacttctaaaaaggnnaacaagaaaagcaactcttcagtttcacataattaaaagaacaggngaaagcacgcaagcttacatatagctaaatttacggaaaccaaccaa

SEQ ID NO: 442870 - DNA, 357 bp, Homo Sapiens
  misc_feature (252)..(282): n is a, c, g, or t
gcagcaggaacgagcgccgctttccaagtttggagactagactgaaacttttttgggggagggggcaaaggggactttttacagtgatggaatgtaacattatatacatgtgtatataagacagtggacctttttatgacacataatcagaagagaaatccccctggctttggttggtttcgtaaatttagctatatgtagccttgcgtgctttctcctgttcttttaattatgtgaaactgaagagttgcnnnnnnnnnnnnnnnnnnnnnnnnnnnnnnncacttaatgtgaaagtaattgaccaagttataatgcatttttgttttaacaaatcggggacctctagagcgatcg

SEQ ID NO: 442871 - DNA, 473 bp, Homo Sapiens
  misc_feature (164)..(217): n is a, c, g, or t
cttttataaagtttgggtggggaggtgaaagtggggagaaggggagtgtcccaccgggtctcggtcgctgctgtcgggtagatagatacggtatacatttctttcctttcgtggcccgagtcctccccacgcgcgggtgtcagcagcctgggccgtgatcccgnnnnnnnnnnnnnnnnnnnnnnnnnnnnnnnnnnnnnnnnnnnnnnnnnnnnnnccggccgccctcactgataccccagcgccgaggcggtggtcagtctctgtccgtagagggcgtagggggagtagtacggtccggtggcggcgggcaccggcacgggggcgccaggcgtgggaagcgggctcttggagtaggggtggtagcggctgctgagtcccagcgcgtggtgggggctgcgcagcgccagcgtcccagggctgcccggtgcgcccgaggtggggatgtgcatgtggcaagccatggcggccgc

SEQ ID NO: 442872 - DNA, 476 bp, Homo Sapiens
  misc_feature (190)..(251): n is a, c, g, or t
ttctatagaaagtcaaatgatattttttcaacttttataaagtttgggtggggaggtgaaagtggggagaaggggagtgtcccaccgggtctcggtcgctgctgtcgggtagatagatacggtatacatttctttcctttcgtggcccgagtcctccccacgcgcgggtgtcagcagcctgggccgtgannnnnnnnnnnnnnnnnnnnnnnnnnnnnnnnnnnnnnnnnnnnnnnnnnnnnnnnnnnnnngccgccctcactgataccccagcgccgaggcggtggtcagtctctgtccgtagagggcgtagggggagtagtacggtccggtggcggcgggcaccggcacgggggcgccaggcgtgggaagcgggctcttggagtaggggtggtagcggctgctgagtcccagcgcgtggtgggggctgcgcagcgccagcgtcccagggctgcccggtgcgcccgaggtgggga

SEQ ID NO: 442873 - DNA, 810 bp, Homo Sapiens
  misc_feature (23)..(23): n is a, c, g, or t
  misc_feature (39)..(39): n is a, c, g, or t
  misc_feature (45)..(45): n is a, c, g, or t
  misc_feature (53)..(53): n is a, c, g, or t
  misc_feature (60)..(60): n is a, c, g, or t
ttcaatcctaattggtcaaatgncttggaaccctggttnaacagnagggaatntgtgggnagctggcaaacaataatggtccacaatgcaagctggactggccctggacccaggcccaggggacctggggtggtgagatgctagctcttcccactagagcccttcctttctcgggtctgtggagttgcttgctggaaatgcctcacttcaggtgctgatttggcacacgtggaagggggagggtgggcccttgtccctaggctccctaaagactggcccagggaaacagttgagggagatgtttgccaccatctgcccttcagcaaggaacctgctctctgccccagaggaggacatgcctgcaagtgcaccaaaggcctactttattgctaggtgagtgcagtcacctcactgccttggtttccccagatacagaaagaggctggtgagtgatacacactaggttccctgtatagggtcatatgtaccaaagccaaatgaagaccttgctcaccagggcgggaacctggggatgtcaggctccatcggatgacgtcttccttcctgtggctcctgcctgctgcagttggtgtcaccctgacatatagtgtcagggcacagggtggaactgatttctgccggcactggtcagcactcagggttcctcagggggcctcattctggatgcctgcccctgtggcttctacctgaacctcacccacttcatctccatggaactaaggtccttctcacggggaaggtgatagaaacttgactgcaggccctggggactttcatggtttccttggg

SEQ ID NO: 442874 - DNA, 486 bp, Homo Sapiens
  misc_feature (15)..(15): n is a, c, g, or t
  misc_feature (49)..(49): n is a, c, g, or t
  misc_feature (57)..(57): n is a, c, g, or t
  misc_feature (69)..(69): n is a, c, g, or t
aaagtcctctaaggntccaaaaagctggccctgccggaaaaggaacccnggcatgcncccatcatcacnttggaaatcagaagaatcaacggaaatcccctctatcagtgcaccctggcgtttctgaagaggcctgtttaatggcccctgacatttgaacgctctggccttggcctcggccctggccctggccgctggagcagtagtggttgtccgcaatggtgatctgttcgttctcttcggcctctagctggctctggttaaaacgcagggaaccttttagaatgtctttgatctgttttaatcctgccagggaaaccagaatttgatcttctttttccaaattttcttgtaatatcacatcttgaatatttacaagatgagtgtccatcacctttgcacagtatttgcacatggcatccaggtcattcaactgcccttgaaggaaggaaatttgggcttctaattcttcttcagattcttttc

SEQ ID NO: 442875 - DNA, 291 bp, Homo Sapiens
gtttagtaaggtatgtatgaccttgtttattatctatcatagacatcaagatgatcatagttaataccaatttaagctttacagaatactgttttaggcccaatattgatatattaaatgaaggtatcagagaatcttgtatttatggcatcaggttataaagatctattcaaaaccatttttgtcaaagtttaaacactggaacaaaagtcaaattgtttctaaatgagacacaaaatgattcttgctaatagtacaaattttgtcccatgggtaatactattgtctttt

SEQ ID NO: 442876 - DNA, 538 bp, Homo Sapiens
  misc_feature (430)..(430): n is a, c, g, or t
  misc_feature (442)..(442): n is a, c, g, or t
  misc_feature (497)..(497): n is a, c, g, or t
  misc_feature (512)..(512): n is a, c, g, or t
ttttttttgacgttttctggaaaggccagtcctttaattcagctcacaggcacacttccctgacattcccttcagggacagtgggcctagtatccaagcaggtgttggaggaaatccaggggaggggccctccaagctcacaccccaccccctgctgtttaccctgtccccttgcactgtgataagctgcccctcaggcgtccaggcagcagccctagctgaggcttggcccaaatgaccattacacactctcaggttcaaacaaccttattgggctcagttctgggctatggtttcttaccagcagagagtgtgtgtctatggggcttgaccttcaactgaatgattattaatgatgcaagcattgctaatacctttgcggcttaaacatgtgggcaaatgttgctttaataaagtcacggaaggacanagccctgggctngcccaggccccctggcttgcagccggagaggtcaaatcggaggctgtcccaatgnagctgatccattctngggatcagcttaccctcttaaaacta

SEQ ID NO: 442877 - DNA, 1765 bp, Homo Sapiens
  misc_feature (333)..(333): n is a, c, g, or t
  misc_feature (364)..(406): n is a, c, g, or t
  misc_feature (787)..(787): n is a, c, g, or t
  misc_feature (835)..(835): n is a, c, g, or t
  misc_feature (1231)..(1245): n is a, c, g, or t
caccgtaggtatacacatgtgcaccagggcattgctacgacagaggtagagggaaaggggtggtgaccgcgcgcaccccgaactctcatgagtggggcgggcgcgataccacacaccacctctggatccgccgcgtattaaacgccggagtaacaccatgtctgcttgacacgcttgcccgattagaaggcattgcaacaacgacagaggacggaccgcgatatgatatagggcggccgccttgcggtcagcacagcacggagagcaatatcaattgtccagaaacaggcgcgcggcccgacagcatcgatgacggaggatcttctagttgtntttgtgaatggtgtgaagtagtggcccggtnnnnnnnnnnnnnnnnnnnnnnnnnnnnnnnnnnnnnnnnnnnaaaacacggaacgcggcggcgctcctagctgtctggggcgagtgaggacacccacggcatgcgcggtgaaagaaggagggagtggcgcgagaccctggtatgaaggcggatggccgaactgggtaggttgggagattgcgccaaagcacttcttggttccagaaagaggtgcttcggagtgccaggcgcctgggggtgcggtgttgatacggaaagcttgcgctttttaaacccccccggagttggggaccatgactgagtttgctaggatgcgcggttgggttcctcctgaaggccggcccgggagccaccgggtgccagaaaatggggtccccggatcttgcaagaaaatccggcttgctgttggcaggttggcctgangaatcccaggggcagcttcagacattgtggggactcagacccaccctnctcagtctgcaagctgtggcagtcagaggtttggcaatgtagccatggtcagcctggccatggcccaggggcagggtccaaacaagaaccctggtgcctcccgcccctcctgctgagccatggtgccacctaagccatctagaaaggctcaactttttgggagacatctgcggcagggccactggaggcaggagagtggggtgctggccctgcgaggcaggtgcagctctgggagaacagaattctccctctcctcctcctctcacacactgtggctccaggttggaacctcaagcataaaggaccaaaataaagaggatttataatctaatactccctcctcttcagaaggcaatgtgaccagcaaaggctcaaactctctagagataatctgcnnnnnnnnnnnnnnnatgtacttggcctctctcctgacgcctcacaccattaagcatggagaaaagggaaaaagggcaaaggaagtcaaaaaactgaactaggattcgggcaacagcctcaggctgcccaacagaacaggcttttagggaactggacacacagaccagctgtgaccctgactttcacattgatgggtgaatggcaagtaggaggtaatgaaatctggaaatgacaggggagagaaggcaaagctgcctgggagtgtcagtcccggaggcatttgcccctctcccccgggggccagccaggggactttcccagtttcagggaaggccacaacacttgtggcacattaattccgagcttggcccggcttctttcctgtgccctctgcctctgtgggcaggggaaggaggaagggtgtggtcccttaggatctccaagtgctcttccagcttcccagggagcagggttgagattcccagagttcagtgcaatgaattgtccattccattgaggaaaagggaagttttt

SEQ ID NO: 442878 - DNA, 1375 bp, Homo Sapiens
aagatttattaaaactagctaaagacaacagactggatagcttttctaataattttcatcaataggaaaaaagaaatacgtctcattcttcaatactttaaaatggctttttccagtgtgctccttcttagcaatcaatatttttctgcattctttaaaagacaagagaatttggttataaaagaaatgggctgactaggcatgatttttttggtcttaaaagcttaacatgtaaaattggcaaaaaaaattttttaccttttataatacttgaaaaataagtacctctttgttctacaagtagaatgaataggagaagagtttaagcctgtttttttaaaatattattgcaaagagctctatttgtagaagcaaattataggcagattaccaggttcttataaatacagcttgtacatggacattctgcaaacccagctgtcacatttttcttgcaactccttttgcaaaagcagactataatgttttaaaatgtgaaaaaacattattttttcaaagacaaggaaaataatttactgccctcttacatagatgtatttataaagtttttccagataaactaatcaaataaattagaataatgtgacaacattacaaatttaatttgttagctgcattccttctgatgttaccacgatagaatgttactgatgattcagggctatttctgaagtctgtatgttgctgctgtccccagtgatggtggacttatctttgccttacctgatcacaaattatgttggggaaaataaagatttaatatttctttaaatagaacaagaatttggttttgctcgtttaagagcaatgagaaaatgatggaatgttgactgtgtttggcacacaggacacggaccttcatggaagtccttgctctgcgtggcatctgtcagcttttcacctttcattcttattcttcacttttgctgctgagcctagctgtacaaacttgcactttcatttgctaatataaattcagttttattttaccattttagagactactaatgattaaatgtagaaggagagggtgcacatgtttttatgtggagtgtttaaaagataaatttataccactgtaatgtgcagcttttattaaaagagaaattggttgaactgctaggttgaatgagagacttcatctattggactattttttttaatccaggcatatggtctttagtaatggcttgtaatttgtgaaaacattaatttgggggttttccctgttttcagttgtccatgtacacatagtcattatattagaaaagaaagctgttcaacaaacttgtttaatttgtttaaatcaacatagcatgaaacaccaaataaaatgtttgacatagttttaaaa

SEQ ID NO: 442879 - DNA, 545 bp, Homo Sapiens
taaagcaagtttctatttttaatttttttgctttgataaatcaattgcttcacaaaaatcctttttaaagacaacaatccaagaaaacatattgttacagtattcacatttcaaagattgtcagtttcaaagaccgaatataactagaacgaaagattgctgagttctttctgtctctaagtgccaggaatgggccttcacaaggggcagaaccccctctggacaccctggagtttgtctcaatgaaaagtgcccactgctacctcacacaggcaggagatggatcactctcaggtcacacagacacaactcccagagcccttagccgtgagggtttcttttgcatgctcgataaacacttccactcatcttactatctggaatcaaagcgcaaaggccaagctagtccctcggcaggagcgagctggaacccagcacagccagccctgccactcctgctccacaggtgcagggcaggaataacagcaacatgctcaatttgggtctcaagacacattcaaaaggagccttcatagggaaaaact

SEQ ID NO: 442880 - DNA, 499 bp, Homo Sapiens
  misc_feature (23)..(23): n is a, c, g, or t
  misc_feature (64)..(64): n is a, c, g, or t
  misc_feature (75)..(75): n is a, c, g, or t
  misc_feature (90)..(90): n is a, c, g, or t
cttgtccatggaacagctgaccnaccaaggttgacgtccgtgctgtctgctgcaggctcatacncgtagtgcagnaagtacagttgggtncggtggacagtgaagcgctctcgccggaactcatagcacaggtcgtcctcgtccagctcagacagctgcttactggaggttttccactgttgacatcagcctcactggggcagccaaacagttcccgcctcagaagattgccgtcatactcccaggaaggtcaggtagaggttgcgaaaaaactccacatgcttgttcttcacccggagcttcttgggggagttccagtgaatgacctttagatcagacacgtctctgtagcactgctcggagcgggtgtggtctgacagctgcacattccagaagcaggggagctggtacacaaggaaggggttttgtttgatgacggcattgaaaatatcctggtcagctaaggatgtagagagcatgcccatgagctccctctctg

SEQ ID NO: 442881 - DNA, 371 bp, Homo Sapiens
atatattcttccagggtttttcttaactgactatagagagtggctgtaagttctggggcaaagcttgattgtattttcagtgatgtatagttacattgtttcatgttaaaatcatcgtgcatggaaagtgaaatgtgcgtatgattttaaattattgtaatatgtactatacccttcccctaaacttctttcattgatgatacacagaattcctctatttttgcttgaaaatagtcctttagattggagtagccttttcttagatccctctatggttccatgagatgaggtgatacctgcaaagcacttttaaagatatttttttaggctaatgctccagatacagcttgaggagcagcgatgtctaatca

SEQ ID NO: 442882 - DNA, 914 bp, Homo Sapiens
cgggcccacaagatccggctattaaatcggtacaagcgccatcccagattatcggaccattctccactctagtagcagaaccttttctctgttgtcctcgcattgctaagcagtgaccaaagatgttccagatcattcaataaaggaaaggttttaggtcttccaatgaatttagtacattggtattctgagaactactttctccacctgagagagacagatcacacttatttccccacagtgaaatctgcagaagtttaaaaaactcatctttcagctgattttcatctaggtcttcaatagttcttatcaattgttgcaggtgagtacataaagcaatgatggattcctgtgacccatagaaattttgctcttttgattctttaaatacatcaaagtaatcgattggtggactctggataattgcttcatgaattcttcgatacatgtaacattctaccaacaaccacggtgagtagaaccatcttgattttccatcactttcatttaaaagactctgttgatattctaggtactgattccatatatcagtatcaacaaatttctcaaccaaggggataaatggtttatctgtttgcaattcattccgtaatttagaaaggagagagatagctttcttttcagcttccacgccttcctctccgtgtttctcaaaaaattcacttttatgtcgatgcaatgtatcaataaccttagttaagatctgtggtattctgtctttaattgtaagatatgcaaatgatcccacgtcctgtcctgagagagacgccgggacgacagccatcactttccgcgatcccggccgcaaagctcggctgttcaatcgccgcagaaacagaggcggtaccgccgatcccggtactcggaggggggcgggtaaacgcaggccctta

SEQ ID NO: 442883 - DNA, 879 bp, Homo Sapiens
  misc_feature (63)..(71): n is a, c, g, or t
gaagactctagggatgacataagaattatagcagtactataaacccaggaagtttgcctttcnnnnnnnnncacaggtagctcctgatagcactttcaagggattatttttttaaagagaaaaattatggtagcatcaagatcattgtatggatatatttttattatgtgtactgaaaatacagtattttaaaataccttaaagtatttattctcataaactcttattcattgcttcagctacaggtagaacttgctgggctcaaatcccaaagaggttttataaccttatttattcaaaacctataaggtggtatggaatcttcattctcccaagcactggaaaatgtctaagtcctgcaaattgccattgtgagccacttgctcgacatgtaacatgtaaggtccatttgcaaagcaaagcagcccccaaagcatattttataaagcttattgcattccacactgatctcttggcatgggaatcctaagctgccgactaagccctaccgacatgatcatgcagtgagattccaaagctcagtctcatttcatttaaagaagaatcactcagaaatagaaccgagacttccctttttctccctgtaaacacccaagtatcaactgcttatttggccaggacactcccagcacaaataactattttttatgtcacaagcagcaaggagggacatgctagggtgattaaaagatggaggaaacaggatcagagggtgggtatagggctgttcttagaggagtattttcagtgggaagggtaaaaacagaattctcccatatttcatcatcaaatttttctcagtgattttttttattcaggagtaagcaagcacttcactgttttcacaaagctgtgcgg

SEQ ID NO: 442884 - DNA, 706 bp, Homo Sapiens
tggtattgtcaagagctagatcaattctatgttaggactcatcaaatgtctacaacacagcacaattcacagacatagacataagcctatgttttgaccctaatagttttcaattaattaagagtaagaatcgttgtttaccctgctttttctcatgaacagtcatccattcactgttctaatttactctttcactgtaaataccatgaaagcaaatttagtcatttaaaatggaataataattttctgtttcactttccaggatgtgatattatcaaaactgtgaaagagatacaaacagcaacacataaaactggtaatagttctactctttgttaaagtatctaccacatcctgatttgccaatcaaaacttctgtttcaactatttgctatatcaactactcaaagaagaaagtggttacattttatttgtagcctttagacaaaagccacatgcatcgactcatttcagatggccagaatgtccaccgtggggtagctcacttattctctcttctggcaagatcagagctcgctacacccctttgcttatgaactatggactgaagacttaaactgtgggaaagaacacttaggcaagttagctacagataccaaggggaaagaatttcttcgttttattcatttttttctagatttttctctggcatgaaaaaatgcattgtggagaatgctcccacgct

SEQ ID NO: 442885 - DNA, 1439 bp, Homo Sapiens
  misc_feature (369)..(369): n is a, c, g, or t
  misc_feature (1200)..(1200): n is a, c, g, or t
  misc_feature (1206)..(1206): n is a, c, g, or t
  misc_feature (1217)..(1217): n is a, c, g, or t
  misc_feature (1350)..(1350): n is a, c, g, or t
  misc_feature (1373)..(1373): n is a, c, g, or t
  misc_feature (1397)..(1397): n is a, c, g, or t
  misc_feature (1406)..(1406): n is a, c, g, or t
  misc_feature (1413)..(1413): n is a, c, g, or t
  misc_feature (1427)..(1427): n is a, c, g, or t
gaaattattatttttggatcaacaagttggtactttctgacttctgtatcttaacataagggaattttaggtaatgctaagtcagttgtctcattttttgtgataagttttggaatttttagttaattgaaataaataatgcttttaaatagaagtaaaaggtttataagtgtgcaaattgtagatttatcaattacctcagcaggtatcctgccatgtaattattagtgattagtgttaataagataatagattcaggtcttccaactatgcccttggattgtggcctactgtatgttattaaatggtctcttactatccaaaatgggagtagatgctgtggccccgtctcccttggcttttacgtgncatatccacccccattcatgtataacatgtgaaatataaaaatctcatttcttgtcaaaatcagcactgcttatttggcatactcaggcatcgggatcagtgagtagttttattaaaaaatccacgcacccaactcccttagttaaaacagattcttaattcataccatgaattcttaatttctgtaccatctatgttaatgatctgctgaaggtgactcaagattttcaaggtgtaatacagtttgatcatgtaccggacctggatatttaattttttttccctcacagttaatctcctccttgataaagcaataacactgctttgagtctgttgcctaatagcatgtcagaatcctctcctggatggtgattttataggaaagtttgtatgcatatcacccagtctatcttttaaaaattaagaaatttaaatgtatgctggaagtaatgacactatattgtggcattttattttaaaaattggggaaagttgcatatttttttaaaagtaagtgtttgagtaaaaaaattgaaggtacttttttaaggaaaaaaatttatatgccacagtttacatagacatttcagattcaacacgtactcttgaatataatggtttcttttacttggtcaaaatgcatgtatagcatttctttcatcttagttccttgtgtttgcctatgtggtcctttatatattttttattgtatcgaagaaacaaaactatcttcaaaaataagttaatttggatatatttgtcatatcaaactacaaagtgtacaaagttaagtttagcccttttctagaaagtgatctttaaaattaaaantggccncctttaaaatncaccaaatttatgtgtgggaaggcaccaaaatgattttgtaagtgccactgcaatattccctttcaagtgtggcctaaatttcaatcttaaggatggaatgcatgtctgctccttggttctgaaaaatggtanggcatctactacattttaaaacncaggggaaccatatacataagccnataaaaaangatttgngcaattggaagccnggtaaatttttt

SEQ ID NO: 442886 - DNA, 652 bp, Homo Sapiens
atggatgggcaagttgccgggggccaggatctggaggtcggtgcacccggcccccagtgggttggttgcgacacgtgcaccgcaaggctgagcctgccatcagtccctgccagcccggaacgagcccatcgggctgaaggcctccgacttcctgcccgccgtgaagatccgccagcaggccgagctggtggacgaggatgccatgtcacagatccgcaaaggccacgacaccatgtgtgtggtgctcaccagccgccacaagaacctggaccctgtgcgggctgtgtggaccatgggcgacatcaagacgtcggtggactccgctgtggccatcaacgacctgtcggtggtggtggacctcctgaacatcgtcaaccagaaagcctccctgtggaagctggacctgtgcaccaccgtcctgccacagattgagaagcttctgcagagcaagtatgagagctacgtccagacgggctgcacctccctgaagctgatcctgcagcggtttctgcccctcatcacagacatgctggcggccccaccctctgtgggtgtggatatcagcagggaggagaggctgcataagtgccggctctgctacaagcagcttaagagcatcagcggcctggtcaagagcaagtcaaggcaatgg

SEQ ID NO: 442887 - DNA, 1340 bp, Homo Sapiens
  misc_feature (1246)..(1246): n is a, c, g, or t
  misc_feature (1286)..(1286): n is a, c, g, or t
  misc_feature (1297)..(1297): n is a, c, g, or t
  misc_feature (1324)..(1324): n is a, c, g, or t
caagcgtacatgcggaccaacttggaagaagcccaactcggagcggacggggcacgggctgagagtccggtttagccccctggcactgctcctagacgcgtctctggaaggagagttcgatctggtgcagaggatcatctatgaggtggaagatcccagcaagcccaacgacgaagggatcaccccactgcacaacgccgtctgcgccggccaccatcacatcgtgaagttcctgctggattttggtgtcaacgtgaatgctgctgatagtgatggatggacgccgctgcactgcgctgcctcttgtaacagcgttcacctctgcaaacagctggtggagagtggtgccgccatttttgcctcaaccataagcgacattgaaactgctgcagacaagtgtgaggagatggaggaaggctacatccagtgctcccagtttctatatggggtgcaggaaaagctgggtgtgatgaacaaaggtgtggcgtatgctctgtgggactacgaggcccagaacagtgacgagctgtccttccacgaaggggacgccctcaccatcctgaggcgcaaggacgaaagcgagactgagtggtggtgggctcgccttggagaccgggagggctatgtgcccaaaaacctgctggggctgtagccacggatcaaaccccgacagcgaacactcgcctgaacttccttttggagcaccgcatggtcttgccagctaccaggagccacttaagagattattgtgctgttttccaggaaagctgcagctagaaaatggtcttaatggtgctcactttagcagacagcgtccacaatgtgaatcctacagtttccaggtgaggccctttctccagtttgcccattaactgggagaggtactttcgcctccaaggactgaattttgccaattactataaatccaaataaatacccactttcaaaacacccacccctcttgccattaagaagtcccataacccccggttggttgccagtgaagacagaagctcttactgacttggccccgaggccatcaccccctccagcagtgaacactgtccgccgctgtgaggcctgctcccctgcgaccgccctgccccccgtcaccgaatcggacactcatcctttctcacacttcccacacatgatccttcttcccttcatcaccaaaggagcctctgtatggaaacatgtccagtgttgctggcccagtgtgtatggccttcccagttacccactntggttcgggccgccttggggggtttccggtttcctgtttncagtttcaacntaaagggtgattgtggcagggcccagnatgtggggtgggattg

SEQ ID NO: 442888 - DNA, 439 bp, Homo Sapiens
  misc_feature (26)..(26): n is a, c, g, or t
  misc_feature (99)..(99): n is a, c, g, or t
  misc_feature (355)..(356): n is a, c, g, or t
aagtctcgctttcgtccttgcgcctnaggatggtgagggcgttcccctttcgtggaaggacagctcgtcactgttctgggcctcgtagtcccacagaanatacgccacacctttgttcatcacacccagcttttcctgcacccctggagccagagagcaatggtcaggcctcagcagagggtggcctgcagcaagggaccctgctcgaggaacaggaaacagtcgtgctgctgccgaggctgctctcagcaggccccacagaggccagcgagggagatgagacactattgaagactagggcccccacccgatacctcccctgcccggcccagctgctgctcctgctgccggcccnntctaagacctgcaggacagacaggacaaacgagctcctgagccccagggcaagagtgtgctgttcttaaggtgacgcttagca

SEQ ID NO: 442889 - DNA, 2317 bp, Homo Sapiens
tttagggtttgctatgctgaatactttatttatatttttatgtaaacataatttgctttataggcacaatataacaaaagctctaaagccacaaagacattagacaatgtttcagttcacttcaatcaagcttaaattacagagaagccttcacagttcctttaaggcagactgagacattctttacacttccttcagaaaaaacaatcaagagacaggaaagaaggtgcttaaaatgagagtacgttaaacaattaacttgcgtcccccggttcttcatggcagaaattggtcttattggtcaaactctagttttctcgttctgtattctgaaagggttttctttaaccatctggagtaatttgcgattactggattaactttgctagttaaataaaaccaaaccaaacccagatttggtaggggtggtgggggagagtgcctttttatgcctctcctctggacataacaaaggcgatgtgaattctgaatgtggctgagttcccactccccgggggaaggagagccctagtatggccaagggctcttcactccttcagctctggaaaatgtcatttctacccaacttactaggaatgccacttggatgacagttctccctaagacccccttttcagcatggttacgggagaaacagccaataatatagcacttagcaaaggtaataggggaataaacgccccattatctctctaaatgacccagaactggaatattggtgggtcctggagtacgaagaaaagatgatgctggtgtcctcctttgggatactctcaccccttggttcctcagatgaaagcaccctttcttgtcttcatattttacatacacattcacaatgaggagaaactccttccagataaatatttggcatacataactcatcatcataagcttaggataggtaaaaagaccacgaatgaggtgacatttgctacaaaaggactttggaaatcaggtaattgctaagatgcattcgttcctaccacttgcggaaagggttgggtccaccctaaggcttgttggtggagaaactgggcaatgtaaaatccctctgatgtttttcagaacacaaagttggggtatgaatcaaatgagctcctggtatctccacatttgtttgtgagtgatagttaagcattttagccaaaaggactggaaggacggggtgaggagctccctctgtttctcgaaggtaactgtattcacctctcaagcacagtcaaattgcatgggggtggggttccttaggagctgaaaagttgaacaaggtgtgtgagcaggtggcttgttccttggtttccgaagagcagggcgctgcagattctacaccgggggtttatatatgggaggggaggaactgtacatctgacatcagatgctgaatataaaccttttgtatccctagagtttgttacatgttgggacatgctttggcaaggaaggagatgctcattgacttttccacctatggtctgcaaaggaactcttctttgggaaatccatggtcaaagtggtcactttccaccaggaattgaaatttacagaattggtaatgcaggtggcaagtgtgcaaacaccagcaatgctcaggaatgacttctgaatgtgtcttgtatgtggtgctttcttaaaattgaaacagatatggagcaggaagaatcctgcccatgagatgtattttggaggagaaatcttcacagcaggtcctcaaactcatgctgttgacccattgtctactgtgaaaaatccatacctgcctccctgtgtttacagataagagccagtgaaagggtcagacactgaaggggtagaagagaatggctcaaacttttgaccgtagttgtctcttaaatggatagagaaaaagtactactaggagagtttctaaatttgtgggctcatgaaaacatccggcctactctctttctgctggccaaattggcaagtgttctcatcggaggcatgggtggccagcagcaaaaaagtgtcactggcctgaggaattctaggagctggacagggctctgtgataacaccttttcatccaaacttgtctttgcccacgtctggtctcttaggcattgggcctgggacttgtattaatttgcaaggctgttctagaactgtcaagaagaacccacagatggatggttttgatacaggggagaggggaatgtgtaatacacagataggagagggacataatactgcatggcatgggattggcacttcaaaaaacaacagtgatcaacagctttttagctcagctgactgcagacaaacacgacacgca

SEQ ID NO: 442890 - DNA, 752 bp, Homo Sapiens
  misc_feature (39)..(39): n is a, c, g, or t
  misc_feature (47)..(47): n is a, c, g, or t
  misc_feature (65)..(65): n is a, c, g, or t
ggttaaccaggattttggaaatgcttccatctttttttnaaaaatgnttaatggcaaccaaagtngtcaaatggttcagtggttaccattttatatcaatttatccgtgacaacaagctgcccagccatttggttgtttggaaagaactgtttagaccaaatacactctttgcatgtggcactgggcagccctaacttcaaagtgcaaatgcctgcatggaaatgtagcttaattcatttatttatgccactattctacactgacacaacaatgctgtgcaagagcttttacagctctagagtaataggcttgagaaaatacaaaaaggccacaagtcatgcacaaattaaatgaatattaaagaacattttaattggggttttatttttttaaaatcatgttagaaatcactggtgataccactttaagcacacgctttatcaaagtaaatgcatctacaattatccaaacacttaaatccattattagctaaaaacaacactttacatttacgtagcactttgctgttgctgaagcaatttcacatactccatttcattttatttcctcacaacagccctgtgaggcaggctgaacaacttacacttattttataaagaaggcaatagagacccaaagatgataaacaatttgtgtagcggtcacagatctagtatatggtagagctaaggtgattaattttaaatacttcaaaaaagaagccaaaatcctttttatgtcatatccaggg

SEQ ID NO: 442891 - DNA, 881 bp, Homo Sapiens
  misc_feature (145)..(161): n is a, c, g, or t
cagggggtttaggactcgcccggggactcccttaatctagtcctctggtaggcttctttgagctttctaaaattgcgtaagtctcttagaattgccccaaatgtgtgttaggcccctctttaccagcgaccttttaataaataannnnnnnnnnnnnnnnnaaatttagaaagtgttagaagtttcattaataactgtttacttatagttcaaggaattgtatagtgacagcctagtggtgaccagctctaggaaaagacgctgaagaggacgctcccagcacctgggacagaggagagaacagacacaccagggaagcagccttggaaaggggatgcagacatgaggcttttcagggcttcagatctacatgactgcacccaatggacaggctctgtacaatcactgcccacaagcccaacaggtagccactcgagacacacacactgaggggacttcggggctggctgacttgctcagatgcattttaacaaaaacccccatcaccatcctgctcacattcctaccgtcacctcaaacatctctgcttttagctccagattcttctcacataactgagtaactaaccacatggatatgaaatactgttgagtaggttaaagtccttaataagtcaagcgtcttagcatatttttgaagtcgtatctataatcaaagcctggagcacctgtttgttcaacacagttatctttcatccagaattacaaaatatagaagctgtcattcttgagtttccccatgggtccctggtattgcccacgtgggaacaacaggaagggtggaggtgagggcacagcacctgtactacagctgcagggctgatcaagggaatctcatgaggtgctttttatcatttaatg

SEQ ID NO: 442892 - DNA, 1033 bp, Homo Sapiens
  misc_feature (28)..(28): n is a, c, g, or t
  misc_feature (45)..(45): n is a, c, g, or t
  misc_feature (63)..(63): n is a, c, g, or t
  misc_feature (86)..(86): n is a, c, g, or t
aaggggtaagggcccacggggccctctntaaggaaggggaaacancgttgtcctgagtacaanccaacagcaagctctgccggaancgggcctggccaaagccctgcttctggaactggaagtaagccattgaatttatgaagtgtgcaaaatatgtctctcccaccgtttcctgctagctgatgccccctgccctggccagaaagcctgtggatggtgggcagcgctgcctggcgatgctcatgctgcccacatcctctcctcctgacagtggttgagcaagtgagggaggccaggacggctgcacttcaggggcttggcctctaggggcagcagaagcatctaacagggcaggggcggtatctttcctggaccagctcttgatccagtttggacctttcctattgccactgacgctgctcagtccctggtgggggagggttttgaaggagtttgtgcagtggtccctccacccaggagtcagagaccacgtcctactgccaagcagcagtgaccgcctaagcgtgggctgtgggggtggggagaggtagggggcacctcagctggagctcagggggtatctccttccaacctcagaccaagcctgtggaaaaggagagaaagtgcatggagcgagccgggacccagccactctcctctccaacactccgggtaggaggcccccttgccagccaaccctgcctgctggccttccccggctccctctccgaaggccgtgctcccttcccctttgcacagcacagcgccaggcttcccactgctctcccagctctatagactctatttttatatctatttaaaacatagaaatgtataaatatataggatattatttatagatatatagacgtgatttactctcttactctgtgtgtatacgtactgtatatgtccatatatacaacatatatgctgtagcatctgtattctacactgcacatacccctgcttccatgcactctctcctagggagactggattgcataggtatttccagggtgataccacttga

SEQ ID NO: 442893 - DNA, 1827 bp, Homo Sapiens
  misc_feature (827)..(827): n is a, c, g, or t
  misc_feature (1700)..(1700): n is a, c, g, or t
  misc_feature (1762)..(1762): n is a, c, g, or t
  misc_feature (1788)..(1788): n is a, c, g, or t
  misc_feature (1797)..(1797): n is a, c, g, or t
  misc_feature (1805)..(1805): n is a, c, g, or t
cgagttctgagaccaccaaacatgcaacgaacacagtttatgaaactacctgcactcccatctctaaaaccaaaccagatgatgacctttctagtaaggccaggacagcggccttagaaagcaacctgcctggatcccctaatacttctcgtggctggttaccaaaaagtcctaccaagggagaagactgggaaacactgaagagctgcagccctgcctcttcccctgatttgaccctggaggatgtaatagctgatcccactctctgtttcaattctggggagagcagccttgtggaaattgatggagaatcagaaaatctttctctaacaacctgtgaatataggagagagggcacaagtcaacttgcttctcctttaaaactcaagtacaatcagggtgtggtagaacactttcaaagaggtttgagaaacggctactgtaaagagaccctccgcccttctgtccctgaaatattcaacaatattcaagatgtcaattctcaaagtatttcttatctagcctatcagggtgctggctttgtgcataatcatttctcagattcagatgcaaaaatgttccagacctgtgtgccccagcaatctagtgctcaagatatgcatgtccctgtacccaagcagttggcacatcttcctttgcctgctctgaaactgcctagtccttgcaaatccaaaagtctgggggacttaacatcagaggacattgcctgcaattttgagagcaagtaccagtgtattagtaagagttttgttacaactggcattagagacaagaagggcgtgactgtgaagacaaagtcgttagangcctatagatgccctgaccgagcagcttcggaagcttgtgtcctttgaccaggaagacaactgccaagtgctatattcaaagcaggatgccaatcagctcccccgggcactggtcaggaagttgtcatccagaagtcagagcagagtgcgcaatattgctagtcgtgccaaggagaaacaggaagccaacaagcagaaagttccaaaccccagcaatggggcaggagtggttcttagaaacaaaccctcagcacccacccctgcagtgaatcgccactccaccggctcctacatcgcaggctacctgaagaacacgaaagggggtggccttgaaggccggggcatcccagagggggcatgcacggctcttcactatggccacgttgaccagttttgttcagataattctgttttgcagactgagccaagcagtgatgataaaccagaaatttattttcttttgagactgtgaattatttaaaactgcattcttaaggttttcaaggtattctgtagaatgtcagagttttcagtaaataagttccttggctttggaatgattttcaaatgtatttttaaacttgtatttgggtctccctttgacttcatgtgttctccctgttaatgcgtttgtatatagatttggtgacatttcccatgtacctattatgatctttctcccttgagttgttgtaaactgtatcagtatgaaatatgtgcatgccctagatgtgaaactcctcaggcagctcgggttataatgtgtgtgtgtttcaccaagatgtcctttactgtgtcctcagattgcagtcacaaatgtagtcattttactctctaactgttgagttgattaagagactttgcaaacgacanagggatgaattccttactttaatctgtatcatttttctatgtttccctctttgttcagaagnccagatgcattttataactcagtttnaaaactttnaaatagtnccttgcctttgggtgtctatcc

SEQ ID NO: 442894 - DNA, 533 bp, Homo Sapiens
aaaatataatatatatttataattccgggccctcaaaagcaatcatggtagttaagaaccaagttttgagtcattaggatagaggccaactttaaacatctccagtgagatggaattaggaaactggcattagaaccccacacagttacttgacaatcacctttaaaacgttaagttctttcggacacgcaggaatcaggctagatcatccctcgggctctgtggagtggctggcaccacctgcggctgctggggaaggcggctggcggggagcggcccgttcctccctcgcaggccttgctcctgcctgcccacctggcacagccgtgtagggtgtggacttgtctagccaggactgataaatctgtccaagtcttgtgaaaaatctgtacaccaccgaaggtttcccatggacggattctcccacactgtccccttcagacattctgtaactcgcagctccgctacggccgagccgcggtctccctcacggccgcgggaaggaggacggcggggcacgggcggccgcaagc

SEQ ID NO: 442895 - DNA, 1502 bp, Homo Sapiens
cggtatttccccaaccgcaccgggcccgtccccggggagcgtcctccacctcggccgcatgcgcgcctagaggtgccagggcaagttatttcccagccccgagtgccagaaatggtccaaaaatccaccaggtagttaatagagtacttatagttccggccctcaaagccattcatggtagtttaagacccaggttttgagtcattagggataagaggcccacctgttaacatctccagtgagatggaattaggaactggcattagaaccccacacagttacttgacaatcacctttaaaacgttaagttctttcggacacgcaggaatcaggctagatcatccctcgggctctgtggagtggctggcaccacctgcggctgctggggaaggcggctggcggggaagcggccggttcctccctggcaggccttgctcctgcctgcccacctggcacagcggggaccggccactcgccctttgctcccatgggctccacccgcctggcttcccgcctgcagctgactagaattccatccgtgagaaacacttgaacgtcactgaaaaagaaatccatgcgatttggtttaagcgccagtttcttctagaacctgatatttcagttacaaatcattgaagctcctttttaaaaagaaaatttgactccctcgtaatcaactactttatgtgaagaaaaaaggcattgttaacaatggctcaaaactgttcttgcaacacgtgaggcagcctcagtcccgcttctagctggcgaaggccttgccggcatcctccttgcctctgtaccttctcttcccatgtgtgaacgggatgtaccggtacttaatcatgtgcttgatttgcctcttcatcgtgatacagaagagcatgatgaagtacatcaccagaatcggccagaacaccgggacgttgaaagcgtcgaagaaagtacagaccatagccacaaggatgcccttggtagccgcatgccaaaatttaaactctgggagccttcgaatgaaggggcggaattcctcgttctgtttggtgggtagcgaaggaccgtcatctgagtcttccattaaggaaggatccactttgggagaaagaaaagctatgaaaagatttagatggtagatccccaaggcataggtcacaatgtaccaaccctgcagcaggtaaactcgaatcatgtagacaaagctcaggcccagtgtcacgacccatcgcacagccgtgtagggtgtggacttgtctagccaggactgataaatctgtccaagtcttgtgaaaaatctgtacaccaccgaaggtttcccatggacggattctcccacactgtccccttcagacattctgtaactcgcagctccgctacggccgagccgcggtctccctcacggccgcgggaaggaggacggcggggcacgggcggccgcaggcgctgcgctccggctccgggaagctgcagcgagcactcctcgtgcggaattcgccacccaggcc

SEQ ID NO: 442896 - DNA, 919 bp, Homo Sapiens
ccatgtcaatgtcctccatctgggacccacagctgtgatgttcctgctgtgccaatatgggtcacctttcggaaaaggccaaacaaaaggtgggctttccctgtgtccagcgactgcccatgttttaggtaaagactttagtaaaggtggaggtaaaatcacttggtaaaacgttgagagtatttcttttctcgaatcaaaaacgctgacatgcaagtgggttccgcctctcccgcagtggggggccgagtgctgaacctacaaagccagtctgctcccctggcacttcgctgcccctcatggagggttgcatgaggacagatttaaattaaaaacaaaacactctacgtatcaaagaaatgtgtcaaaataatctcaaacaattaaaatataatatatatttataattccgggccctcaaaagcaatcatggtagttaagaaccaagttttgagtcattaggatagaggccaactttaaacatctccagtgagatggaattaggaaactggcattagaaccccacacagttacttgacaatcacctttaaaacgttaagttctttcggacacgcaggaatcaggctagatcatccctcgggctctgtggagtggctggcaccacctgcggctgctggggaaggcggctggcggggagcggcccgttcctccctcgcaggccttgctcctgcctgcccacctggcacagcggggaccggccactcgcccttgctcccatgggctccacccgcctggcttcccgcctgcagctgactagaattccatccgtgagaaacacttgaacgtcactgaaaaagaaatccatgcgatttggtttaagcgccagtttcttctagaacctgatatttcagttacaaatcattgaagctcctttttaaaaagaaaatttgactccctc

SEQ ID NO: 442897 - DNA, 628 bp, Homo Sapiens
  misc_feature (50)..(50): n is a, c, g, or t
  misc_feature (66)..(66): n is a, c, g, or t
  misc_feature (84)..(84): n is a, c, g, or t
gatgaagaacatcaccagaatcggccagaacaccgggacgttgaaaggtngaagaaagtacggacnatagccacaaggatgccnttggtagccgcatgccaaaatttaaattctgggagccttcgaatgaaggggcggaattcttcgttctgtttggtgggtagggaaggaccgtcatctgagtcttccattaaggaaggatccactttgggagaaagaaaagctatgaaaagatttagatggtagatccccaaggcataggtcacaatgtaccaaccctgcagcaggtaaactcgaatcatgtagacaaagctcaggcccagtgtcacgacccatcgcacagccgtgtagggtgtggacttgtctagccaggactgataaatctgtccaagtcttgtgaaaaatctgtacaccaccgaaggtttcccatggacgggttctcccacactgtccccttcaggcattctgtaacatgaattgttcaggaaaaagtagcaggtacacaggcttccttcgcagttccgctacggccgagccgcggtttccctcacggccgcgggaaggaggacggcggggcacgggcggccgcaggcgctgcgctccggctccgggaagctgcagcgagcac

SEQ ID NO: 442898 - DNA, 485 bp, Homo Sapiens
  misc_feature (426)..(426): n is a, c, g, or t
ctctgactaagacacttctacgcttcagcataacaggcaccaagaagccaaagggcccaaaacagaggcctgggatttactaggctgccaggaaaggacagtgcccctgagtgctgggaacatggagaggacagcccaggaagccgccagagcagaaaagttaatgtccacacctcgatcctaaggccacaggtttaccaaggtagcaaggctagaaggacccttgccgggaaagggatcacagagggtaattagggaaggggtggaaatgattcaaggaaaggctgaagggaccatgtgatgagctccatttaccatgccacagtgagtggaagggcttttactggaaaccgaatggcccaccagtaaacaacctctctcggtgtgtggcacccaattaaaattatgtaacaatcaggcagacanacagtctcggattgtgggaaatctgtatcctcagtagattcccaggtcccctgtggtgt

SEQ ID NO: 442899 - DNA, 1117 bp, Homo Sapiens
tccagcctggacatctcggtccagctccctgcttccatccggtccctaaataggagttcagacttccttgtttctagggaattatatatcccattgagtatactcatccagacagcaaggtcaataaagtgcctaagaatttgtttaaatgaagtattagttccttccttcctttgtccaaaagtgcctggtaaatcttgggatgaagaacccagagttccatgaggtctgaattctttaacaaagaaggttcagagctgtgtagactcctggcaggccctgactggcagccagtggtgtgactctgaggtgggtcccgttcctctgcgtgtaggctgaggagtgggacctctggggcccgaggcctggtggtgctcctcggagtccttgttgccctccatcaccattttctccccggtgcaaagcacagtgcctgacgtggagcagacacttgacaaagacacagtgagtgctcgactgaggcaggggcagaggggactgtgcccgctcccctgctgctcacctctcagcccctaggaggatgccacgcagccctctagagctcctctgtacggcccgcgtagtggttgtctgtcaggcaccaacctgcctgcctccaaaatggagctgtgggcaggtatgagaatgcatcttggtgaagttgagccagcacagtcaatcaggctctgccccggggactgagagccggcagatcagggagccctcctgtctctcgcccaccccgggagtcaattgttcctggttttccagggtcactgctctagaaatgcccctctcctgggaccctagtgctgtttctggagctctatcctcagcttccctccaccctcagggactaggtgggggattggaagagcacatttcaagggacaacagcctgggctgagggcttccctcccactctcccagccacactcaactcaccccctacgagacaggaagaaataagccaagtccagtccttggcctcccgcctgccttgctctgggaatgggaagctagaacatgacctcctcacagctgccataatcactctccaccatgtcagagccctcatagttgggggcacccggggctgccctggcctgcaagaggt

SEQ ID NO: 442900 - DNA, 947 bp, Homo Sapiens
  misc_feature (882)..(882): n is a, c, g, or t
  misc_feature (900)..(900): n is a, c, g, or t
  misc_feature (904)..(904): n is a, c, g, or t
cacattcattaggctctggtgctggagaaggatacgagccaatcagtgatgacgaactagatgaaattctggcaggtgatgcagaaaagagggaggaccaacaggatgaggagaagatgccagatcccttagatgtgatagatgtggattggtctggtcttatgccaaagcatccaaaagaaccacgagagcctggggctgcactcttaaaattcacacctggagctgttatgctaagagttgggatttctaaaaagttggcaggttctgaactctttggccaaagtcaaagaaacatgtcagagacttttagaaaaacccaaagatgcagacaatctctttgaacatgaattgggggctctcaatatggctgcattactacgaaaagaagaaagagcaagtcttcttagtaatcttggcccatgttgtaaggcgttgtgcttcagacgggattctgcaattcgaaagcagcttgttaaaaatgagaagggcaccataaaacaagcttacacgagtgctccaatggtagacaatgaattacttcgattgagtcttcggttatttaagcggaagactacttgccatgctccaggacatgaaaagactgaagataataaactttcacagtccagtatccaacaggaactgtgtgtgtcttaagaccgaagttcaatatggtatttttggtactgtcttccttcagcagtgcatattcttttgcaaagttctttggtttgacaagcattagtgacaaaggcagaaaagatttatcagccatgctaaaagagtgaagaattttgatctttagagacactagttttggccaacttaagattttacgttaatttttacatagtatttgacactcatgcaaaataatgngaaaacatctagatttantagnttattctgcgccttttgttaaaactgaagattttggaaaatgg

SEQ ID NO: 442901 - DNA, 951 bp, Homo Sapiens
  misc_feature (67)..(75): n is a, c, g, or t
  misc_feature (93)..(93): n is a, c, g, or t
  misc_feature (796)..(821): n is a, c, g, or t
aaggtaatccattccagttttgccccaaaagttcccttaaaaatttttcacaaattaattaaatccnnnnnnnnnaaaccaccattattgctnccatttttggaaaggagtcttttttccaaggtttaaaaagaaggaaaaaacagcaaagtggctacctttgcaggggaaagaaaaagtgtctttcatgggttacactttcatatttttatgcagcattaagttatctacgttatggggaaccttgggtttttattcttactcatgcatgatgtgtttcagaacttacttgctgacatttcagagaacttcttacattacctgtttaacatactgaggtgcaactggaacatattacaatattactcattatttgccactgtgggctaagtttactatactggtcttagatataaaaggtcacatttgaaattactaagttagaactcataaggaaggggggggaaggccttaaatataaaagacaaacggcagtttgattaagcaataattttcagtttactagatgaaacagacttgcaacatagtctgcatgaatgcaaaataagccatctacagcaagtgataaggaaactgggcaaaaaaggaaaaaaggcatccataggcaaatgaaagatttctctggaaataaaaagaatcaaactattattacaaaggactttaccaagaactgctgtgtttcccccatcccatctgctggaagtcaacaagagcatctagcaactttgtgttcatgtcaaatgtcagatcagagcatcctaacgcaaagccagcnnnnnnnnnnnnnnnnnnnnnnnnnngaaagggaaacaaacaaaagagaaaacccccaagccccgtccccgccaaactgtagaacagtaactccagagttcaaattcaaaagaagagaaagtggcaattgaaagaggtgatggtggcgataatccc

SEQ ID NO: 442902 - DNA, 1724 bp, Homo Sapiens
  misc_feature (1456)..(1460): n is a, c, g, or t
  misc_feature (1462)..(1464): n is a, c, g, or t
  misc_feature (1466)..(1467): n is a, c, g, or t
  misc_feature (1469)..(1470): n is a, c, g, or t
  misc_feature (1472)..(1473): n is a, c, g, or t
ctttcttggagatgctcattagcttatcaaagactgagaagtcccgctgttacagaaataatttagtttgctgtattaactgctcctgggcctggagcagtattcccaccttaagattcccagcatccctgtgctgtcccggctctcattcatgccgaaggcccaacccattggctgtgttctgtttgaagatttggggggcgccttctctttcttccccagggaattctctagcagagggaggggacccaccccagtgaggaagtagattgctgcctctagccagagacctgaactggggaatttgaacattcctttacattgttggagaaatgaagccaaagttattcagatggttttcccaggctaaaggaaagtcacctgcaagagatcccggcactgatctggagcagctgacagggtgggtctcccttaccaaagagaagaaccactctctggcgctggggtgacctgctggctgggcctgtaaggtttccatgttgctgaggccatggagattcccagagctggtcacaccgaccgctctcagggcccgctgccctgggctggcaacaccattctggccttggcctgcagaagctttcagagtcttcactggcagtagggggagatggggagaggaatgatctctgcccagccccttcctttccaaaaccatgcaatggaagagcccagatgggtgaagattgattttgccttaactcaagagaattcctgttctccttgtgctatgatttggacacaagattctggatacctggaacttagctgtgtactcctgtaccctaaacagtggatttgagttccagcgtttattcttttttccttttttcagatcaccatctaagttacatctttagctcaggtccatccttctcaagatctccttcttagccccccagcccctgggtgctgtctgtggtcaggtggaccttactcaggagcagatatcctccttggccgccatgggagcctcatccatccacacgtgcctgtagcattccagagctcactgcccttctagatgtgccttcccgcttggcttccagcggcttgtgctcactctgtctgccaggtatgagaagaacacgtaagaccgccaccacactcaccctccctcaaggccctgtgccataggggtggccacccgacctgcccccagaacttttggatactggaggcagttgcataggtctccctctctgggcaccaggactcagtccagcccaagactactctgggcagctcccatcccagtctggggccatttgcagactcaggaaaggatttctacagtgttctataaaagccaaaagagagagtgggtttgggaagagtgagggtggttggggagaggggaccgatgtgcctcattgtttagtggtgattacaaatatgcttttctggataaagtttggttgtttgctcttggaannnnncnnnannannannaaaaaaaagaaactttgtcggcccgccctcgggcccttcggaggaagtcttttctagaacccatttcgttttgggcggccgcggggcccccagttaagggtaaagggggaacattgggtccaataaggctgggtttcccttaggaaaaatcccttggggccatgaaactaagggggctttgggaattctccccacccaaataggaaaaaaaggccccgggggcggggaaaaacccgaagagcgtttcctgg

SEQ ID NO: 442903 - DNA, 476 bp, Homo Sapiens
  misc_feature (330)..(330): n is a, c, g, or t
  misc_feature (338)..(338): n is a, c, g, or t
  misc_feature (382)..(382): n is a, c, g, or t
  misc_feature (405)..(405): n is a, c, g, or t
ccaagagcaaacaaccaaactttatccagaaaagcatatttgtaatcaccactaaacaatgaggcacatcggtcccctctccccaaccaccctcactcttcccaaacccactctctcttttggcttttatagaacactgtagaaatcctttcctgagtctgcaaatagccccagactgggatgggagctgcccagagtagtcttgggctggactgagtcctgggtgcccagagagggagacctatgcaactgcctccagtatccaaaagttctgggggcaggtcgggtgggccacccctatgggcacagggccttgagggagggtgagtntgggtggncggtcttacgtgttcttcttcatacctgggcagacagagtgagncacaagccgttgggaagccaagncggggaagggcacattttaggaaggggcattgagttttgggattgttacagggcacttttggatgggtttt

SEQ ID NO: 442904 - DNA, 704 bp, Homo Sapiens
  misc_feature (32)..(32): n is a, c, g, or t
  misc_feature (65)..(65): n is a, c, g, or t
  misc_feature (67)..(67): n is a, c, g, or t
  misc_feature (83)..(83): n is a, c, g, or t
  misc_feature (103)..(103): n is a, c, g, or t
  misc_feature (106)..(106): n is a, c, g, or t
  misc_feature (125)..(125): n is a, c, g, or t
  misc_feature (175)..(175): n is a, c, g, or t
  misc_feature (212)..(212): n is a, c, g, or t
  misc_feature (239)..(239): n is a, c, g, or t
  misc_feature (281)..(291): n is a, c, g, or t
accaaatgggcttaagtccagtggttcatgcntgtatcccagccttagggtcccaatgtggattncntgagcccaggagtttnagccagcttgggtaccagtnagncccccttccctacaaaagnttttaataattagttgggcgagtggtgcatgcctgtaatcccagctactntgaagacaggtgaggggattgcttgagcctggaagtnaggctgcagtagccatgcttgcaccantgcattccagcctggttgacagagtgacccttgtctccaagnnnnnnnnnnngcaaatgggattaaggactcatggaatgggaaggggaaggggagtcttactatatgtggaataaacttgctcagtgttgccacagagttacattaccaatgtgtagaagtcagaaactagacttctagtttggttcaacatttgagggttgttttatagccatcaaagtattcaagaggttggatggcactcaaaagattctacatgtctagaatcaaactcaaatctggcacgtaggtgcttcttagtaaatgcttaatgaatgccaccaactctgcaaagtattcattgattttgagaccttagtcatgttgctactaaaagtagggcatatgaccgcctaagaaacagaacttcgagaagtcctaacgtaaccacagtaaagcagactcccctttcagcaacctcaaagc

SEQ ID NO: 442905 - DNA, 817 bp, Homo Sapiens
gttcacaaagatgaaagcaaactgaataaaaaaggtgaaacctgtatctgtaagggggaatttgattgctatttggtattaaagagttttaagattcaaccacctggtacaacagcaggctctgaaggggaagccagacagggaacctagaggtacaagcaatgtctccccagctgtcagcctcaatgagaatcaccacccataaataagctaattattgacaagattataatctgttcgaatatgttcaaaacaggtctgactagtgactatgagaatggagctatttagagttgatttaaaagaaaacactttattgttcagcaattaaaagttagccaaatatgtatttttctccataatttattgtgatgttatcaacatcaagtaaaatgctcattttcatcatttgcttctgttcatgttttcttgaacacgtcttcaattttccttccaaaatgctgcatgccacacttgaggtaacgaagcagaagtatttttaaacatgacagctaagaacattcatctacagcaacctatatgctcaatacatgccgcgtgatcctagtagttttttcacaaccttctacaagtttttggaaaacatctgttatgatgactttcatacaccttcacctcaaaggctttcttgcacctcgcagagcccagctacgggcccgcagtctccgccgccgccaccacaccggcatgactaacggctcttcgcgcttcttcctccctcgccggtcgcgcgggaaaggaagagcgacatcggaagacagctcttaggcactccggtggccccgcccccgccgct

SEQ ID NO: 442906 - DNA, 706 bp, Homo Sapiens
  misc_feature (18)..(18): n is a, c, g, or t
ttttttttgaaaaggggncccaattttattgaaatgcaatttcattgaaatcaaattcttaaacatttaaatctgtcacataatagatgtgcttctttattaacatattaaagattacaagacctagggggtggatctaattattaccataatttcagagtggtgctgtacataaatattttaagatatctgtaacgtggatatctgtgactcctagtgatgacagagacacaggtactaatactgctgtggtttgttgcctattttcctgatggaaataaataaaaacttcttttttccatcgaagttttcagatttcctgatttctatcctctggcccctttagattcacagattccaatttaagaactcccagtctataataatgcaagttttcgtaagttgtacataggtggaatcagagaaatggaagtaaggtgaagagcctcactgactggctggctgctcaggcagggcctcacgggatggttacaccctgtgggttctgagcctgctcctcattttcaaaatgttcagaaactcagtttgtctcagttcttctggggggaccctggcttttgagagacaagattcataaaaatcagagtcacaagggacttactgatttttttaaggcccacttcagattcttgatttttttctcctttcagatttcaaacaatgtcaaaggacattattcttgtcc

SEQ ID NO: 442907 - DNA, 317 bp, Homo Sapiens
caaaacatggcaaaccattatgtttcaggctttcactatttgcaggcaatccagctcccagactcaaacttcttgaccccaggccagtgaggagagggggtcaggtagaagtagaagaattcaaaagggttggctggtaacgagccatctgtacccctgatcctggccataggtgttgcacttggggagaggcagtggcatgaggaggagagaggggtttgcatcctggggccagtgctgtagctcactgtcaggcggctacatcccttgtcctctcttgcttgcctgccttcaatgagacggcccttccagctctg

SEQ ID NO: 442908 - DNA, 449 bp, Homo Sapiens
actttacaaacatgttaattttattgagtaggcatcaaagcttctctctgtgtcaggtaatggagaagccatgtcacacagattacagagctatttttacttgaaataatctttcataaaagaaagaaattaaatacaattcttctataaaaagtgcagtagtcattactggaagttttccaaaatgaaagcaagatttactacatattgcaaaaactggtttagtgctttaatactttacaaagtaatatcccaaccacagaagacagctcttacaatgggtttcttctccaaggaatggaccggattgaaaaggatatttgcattgaattggaattaacacctgcaggtaggaaaggggttctggcaccagctggggtcaaagttaatgtggattgacggacctacttttgcctcagtgttttcccttgtccccagtaatcaagggg

SEQ ID NO: 442909 - DNA, 696 bp, Homo Sapiens
attatgtaaactatcaaatgtttatttaaatttccatttaaaatattttcaagtaaaatatgtacaaaaatggttataaaatggttgaagcaactagaagcgtgacaggtataatacatataaatacaaccaaaattcaattcaatgcaaagttgaatgacatcatattgcaccaaaatttattccatacaaaagcacatgcatcaagagtttccataagatgaaaacaaacacacttacttcatagcatcttaccacttacttacacaaatagcccataaacaccatctggcattgtgattgcagtaccagaactctccccagagggaactcatttagctatagaagaatccattttatttcacatatcacatgcttgtgcaggcatcagtgctaggaaccctaagaaacaacgcaatccacagatgaaagtctctctgcaccatttatatcttcatagataaatatcttagttctaatatgattggaatgtggatgcagaaataaaatgcagttttgctctttaagaattttatcaatgtaagacattgtattaaatttgtataaaatacacacaatcccctctactaagtttcatgatcacagtgccagagtgaagaaactctgcttgagttgaggaccagttagttaggatattgaggatcactctttttcagctggatctctctgttcttg

SEQ ID NO: 442910 - DNA, 456 bp, Homo Sapiens
  misc_feature (341)..(341): n is a, c, g, or t
  misc_feature (361)..(361): n is a, c, g, or t
  misc_feature (415)..(415): n is a, c, g, or t
  misc_feature (432)..(432): n is a, c, g, or t
  misc_feature (445)..(445): n is a, c, g, or t
gtattatgtaaactatcaaatgtttatttaaatttccatttaaaatattttcaagtaaaatatgtacaaaaatggttataaaatggttgaagcaactagaagcgtgacaggtataatacatataaatacaaccaaaattcaattcaatgcaaagttgaatgacatcatattgcaccaaaatttattccatacaaaagcacatgcatcaagagtttccataaggatggaaaacaaacacacttacttcataggcatcttaccacttacttacacaaataggcccattaaacaccatctgggcattgtggattggcggtaccaggaactctccccgggggggnacttcttttgggctatgggnggggatccctttttatttcacatatcacctggcttgtggcggggcttcggtggntgggggcccctaggggnacacgggattccncggtggaagtt

SEQ ID NO: 442911 - DNA, 690 bp, Homo Sapiens
  misc_feature (642)..(642): n is a, c, g, or t
  misc_feature (666)..(666): n is a, c, g, or t
  misc_feature (668)..(668): n is a, c, g, or t
ggcagttgggggtggggtgttctggtttaatcatattcagagtttgagcttgaaataaccaactcaagacccacaggagactatgtcaccagataaacccagtgctagaatccaatgtccagcatcttcaaccactcaggagtgtttgctgagagaccaggtggtgcttacccacccaacaagcactttccatctttgggtttgcccaagatgtttaccataaatgaaaggggtggggaaaggattatagttgacacaaacataaattaaatatccaattccagcatatgttacagctacatcactatttttaattgtaatatttctaaaatgtcatttaatctccttacacattgaagagaacaaacagtgggagtgtttattccttaagagagaataaactgcagagattaaaagtttccttcgagtgtatcatcttattaaaaagtacaaagtttcatgaactttcaacaagactgcaaaataaatatgccaggtaggttgagcctatccaagtgaaaacaaggttattttgacatttagtgagaagtcaatgaaaatatgaattatttcaaagggattcatgattcaagtagggaggattagattctacggtatgttagataaagctagttccagcanatccgttaacaactccaagactanangggacggattgtgctgctttca

SEQ ID NO: 442912 - DNA, 591 bp, Homo Sapiens
  misc_feature (18)..(18): n is a, c, g, or t
  misc_feature (34)..(34): n is a, c, g, or t
  misc_feature (71)..(71): n is a, c, g, or t
  misc_feature (306)..(319): n is a, c, g, or t
tccccccaaaactctganggcttttaaaaaaccngatgccccactgaaatttcaaaaacaatgctgggtancccaaattacaaaggcgggtccacaggggtcccaaagttgaaaatctcctgccttttggatgcccacaagatgagcctttctccagcaggcttggcaaaacatccttccacagcccacccatgacacgtgataggattcggggacccacaaaaggaaagagctaagttttgaggctgaagaccaaattggttaaaaatatggtcactctcagggtcagtaagagagaattaagtnnnnnnnnnnnnnntctttgaatacagggagcaaatcagtagatataacatggaatggcacaggccatcaggcaatcctaaggcagaggtagattcatcttcaagtggcttcctccagcctgacacctgaaaaagtgcaactgcctctcatttgctctttctcctgagcagggctccctttgtcacggtgtcagcggctccgagccgtgaaggttctgtgcttccaacgaggctcgtctgggaggcaatcagcacagcttttagcttcctttagtgaggcagtcgt

SEQ ID NO: 442913 - DNA, 572 bp, Homo Sapiens
ttttttttagagagttgagtaaaaggtttattattagtgcagtcaacaccatggaacagcacatacaacacaaccagcaacctgcagagacactagtgcaaagggtagggaagcctttcactgagcttcctggctccatctgagggtaaggacaggacagtatgagccttggttaaggcaggtaggggaaaggggagtggaagaaatgtagtaaccagagtaagtatagcagcgttttcaaattcctgagcacaatgtcccagagctggaaccctactcccctcaagctttccaccccaatcccagtggagccatgatccaactacccagacctgcagcaagctagcctggaataaaattctgagaggaagccattacatggtggggaggagcctttctatctccaaccacacttccacctccatattaaaataatcacacctattatctctccccttctcttactctgccagtcactctagggatcaaggtataccccaggtaacctgaaatggaactgaagtccccaggggggtgtgggtgagacacggcacagcctgtacttagagata

SEQ ID NO: 442914 - DNA, 774 bp, Homo Sapiens
tgatatagattccggcaaacaagtcattggccctaccccacagccagtttggagtcagctggcaatagaaagccccaacttccagtgtcctggacaagaaggagggtgaacaggccaaagccatctttgaaaaagtgaaaagattccgcatgcatgtggagcagaaggacatcatgttatagagtatatcagctcagagcactgcttctgttcttgaaaacttgatgttgctgctgttgtgaccctaggcctcccacagaatagattcttcatggcttccacttctttgtaatgttagccccggttcaaagtccgagtctgagcaactgattggcatagctaatgaatgcccacattgtggctataggagagcaaaacttgcctttagtcagaacattcagctctcagggaagcaggtataactgatgaaacttctgaaaagagctgcgtggatcctagaatacatgggttgcggggggtagtagatctctcatgagtgggcccgtctttccttggaattcatcagggacagatgttcatagaacgcctcatctctctcctttcttcttggtgcctgtttctccatttcctgtttaacaatacatctgccttttccagactgccagcgcggagcactagtttgactttgggtgctcttcaaatagctggcattgataaggcattcccagaagactgtgttacttagtaatcttgtcggtacattttttcactgggcagagattttccaacagagagctgccagctttcaagacg

SEQ ID NO: 442915 - DNA, 2385 bp, Homo Sapiens
  misc_feature (17)..(17): n is a, c, g, or t
  misc_feature (23)..(23): n is a, c, g, or t
gtgaaagtagtagcccncatttntccctgccatccgggccaccctgtccccaaaagcgaacctaaacactggtgtataaggttttaaattaaaagatgtaaaacccatggcatccaagaacaacatagattgcacccaataattatacccctagtgtgtggaaagcagtttataattcattattaatcctgctagtaaattcttctagaaatttacgtaggtgataaggaaaatttagccaatgacttctgcagttgaaccaaaccagtgacgagccatggagaagttcgtcaggtgaatggtagcaaatctgaattttgttttgaaattctagctagttatgtggccaaaaacatttaagcacttttggcatattcatgtccaaaacttaatcacatgccacactggaatcagtatacatgataattctattgtgaaacactaaaataaacatcaactcacactttaaaaaatgaaaataacaacaaaaaacatggatataattagaatctgttttctgaagtcctagaagtttcatcagttatacctgcttccctgagagctgaatgttctgactaaaggcaagttttggtaagtagtttattttacactgttcctttccgttcagaataaacaataatgtgtgaggcagtgtgtttggtgtcctatattcctgatagctaatattattcaaatttcatttgatttgaataattcttttctttgaactttagtgcaggagtgtgtggcaggtgaggggaagctctatttgctatgctttaaagactcactttcatctttctggaacaaagcaagagaaaacacataccacgcaccacaattccatatacacagtactgtttacctatagtgttttccagttttgtgtaggtgcagttaatagatttcttcatagttatatccaaaatgaagaggtggcatcataatgcctagacccttagggaaaaacatattaaagatgtacatttcccaaaaatgagtcagttgattttattcattaaaaatatgcataataaaaggccaagcacaaagctctttataaaaaggagcaaaatgtattttccagaagagttagataaaggcatgagatgaatttcagttaaatggatctatttctttgtgggttttgagaactcattttagacactgaatagaggctgttttacattataatcatagctagagattacatagatggagggaaaaaaagtcttttgctttaactcttactaaatttctataaagtattttaaaatcaatttaaaaaccaaatctgtacctctcccctctatcacagtttttgtaagtaattaagaattttacccgtacgattgcacagcaactatggaagagagaggtagatgattcggccaccctctcacaaggaaacccccaaatactttagggcattaaacacaaggcttttgttatccaaaagtaattagttgcagagtacaaaaacattttggagcagaatgtacataaacatgagtcataaacagccgaaaccaagaacactaacagtaagttcataaagaaatgcacaaattctatgtatcttacaaaaatgatcctcacagatgttgaatccaagattatacaatagaaaatatttatatgttttacatttaatataaaaattcttaacaaataaaaaaaggccttgatgatagacaagaagaaattttagggaatacattaattttcaggatgccccgaggataatacatcgttaaatactcagctcctgttctaggcaaaggccaaatgcaggcatttttctcagggttcatcattggtgttaagagaaaaccacggttaaggaagactcaagcaagcttggggaaaggaagtaaaaatttagccccaaagaattctggccacagcaccacataccctatctaaaaaattttagggacataaatccaagaccgtcgtgagtatacatccagaaattcatattgatgagtttatggtcttggtgataaatatccaaaccgggagtccagttaaaacacagtgtgccaataagtaatggggactgggggaagaagaggagagaatacctatacacatcttgaaggtaaacacctgcaaggaggaaatttagtcacatttcatagctccccgtccccctggaatgtgcactttcttgcaacatctccataagttaaagagacacgttatttcacccaaacttcacggttagtgttaacccgtttttaccctggttaaatttagggctagacactcacgttgctttaataagacacctttaagttattgttcaatcactaaatagtcacccctttttcatctttattaacttagaaaattttacttttcatttaaagccctggagca

SEQ ID NO: 442916 - DNA, 436 bp, Homo Sapiens
  misc_feature (12)..(12): n is a, c, g, or t
cccccagcacanccagtgttcctgggtgtcccagttcccccacatttccccgagcagccctgacgcatgcccaggtccctatgcacccagggatattaaagtgactcaaggaggcaggaagccattatttcaaggctgtgggtttctagcaggaagcacaaatgatgactaaaccctagtttctgtcttttaagagaggagccacttggagagacaagaagtaaacctaatttcaacacaccatgctaaatgccaggatatgagtgagcactgcagaaagcagagactgggggagaagtggtctttacttccttcacctgtggtgggatccctcaaagacatgaggatttaaacacgccaagaaaagttgcaacaattaaatatgatattatacatatactgagtattattcatgtttatgacctagaaattcttc

SEQ ID NO: 442917 - DNA, 1220 bp, Homo Sapiens
  misc_feature (429)..(429): n is a, c, g, or t
ccagtaacttaatttattttagtttcaaacaggaaccaagaacaagtctcagtatgataaattatcccttcccacccttcctgctgaagaaggaaaaagaggctccaagagtcatgggaaaaccccttcctttggagggtccccattaacatctgaatggaaggagacaacttccctaagggcctggacagacaactctctgaggattcaggggagagtgcccctcagcactctgtctctttcccaagaaaaacctctctaccactgtctcccattatcccacaagagggagcccaggctgcagtaaaggagtttggggatagtacataggagtggggtgatctctttctaggatacagatcttatggctccaaacagtgcctggggttatccctcaagggagaggagtggtgaaactatagggactcnccagcccaaaaggagtatgaatcagggttaaaggggctctggagttgagaagtgggaggagcaatacagtgcatttcatcttagtccattcaggtgtctaaggagcagaagaggggtggcagcttcccctcaagaccctccaattgttggggagaaggctacacatcccagagtccacctgacccccaccacccctaaagctgtttccaggtagatactttaagcttccagggaccaagagtgaccttggaaggaaatcagagcaaagggctgaaaaggcgcccctctcacacagtcctcttccccagccccaaggtaaggctgaccctcacttacacacattcacccactctgtaaccttgcactcatcacacagcacatagcagcaccagtggaagcggcaatggcagcgctcaactcgtgtctgccggagcacgttgtgcccacggccacagcacaggctgccacagccatccaacaggcggctggtcttgttgcaggcccggccccttgtccctggggagcccatagtggggtctcgctcacagaagtcaggagacttctcaaagtagaccagctctcctgagaggcgacggggacgcagacggggctggaaggctccagaattgcggttgtgggtatcaatgaagatggcccggcccagccgctccctcaacgccgcccccactgcccggaactctggggccgccctccagcatgtcttgaactggcagctgcctgatgtgccatgacacttgcatttccgcttcaggttttcagtaaccaccgcg

SEQ ID NO: 442918 - DNA, 211 bp, Homo Sapiens
cactccaggacagtttatgacatgccacagctgtctggcatgtccagacatggctgggtaaggggcctacagaaaggtgtccccaagctggggaggcgggaggggaggcctgggcttccccagggcccttgcagtggcttcgagcaccgccacctcctcggcctgctgagcctccatgagtgccatctgctgctccaacttccggcgttgc

SEQ ID NO: 442919 - DNA, 465 bp, Homo Sapiens
  misc_feature (422)..(422): n is a, c, g, or t
aaaacaacagctttcaggtcttaaatgcagtcacagatcaataacattgcattttgctaaaagaacccttcttaccattcccctccctgaaccagcttctccttttacagtatttatgtgcactcggcagccagagcctgcagaggcgaaaggagacagtcagtgtccttaggtgctcgcctgcaagtcaggagtggggaggctgtgtacctggcagtatggtcccctgactgtatctctgttgtgtggcacaggagacaaacttcaggcacctggaggggacactgcacagcccctgacaacagtagttcagaagcacagctgtttcctgtgcctcacccgcagcagctggtccacctgcaatttcttgcagtctcttggatagaaagtgctgtcagcaagccagctttgtgctcccagcntcacttctggcgcctatgctaggaccccatgatgaaggcaagg

SEQ ID NO: 442920 - DNA, 465 bp, Homo Sapiens
  misc_feature (158)..(158): n is a, c, g, or t
ttttttttaaaacaacagctttcaggtcttaaatgcagtcacagatcaataacattgcattttgctaaaagaacccttcttaccattcccctccctgaaccagcttctccttttacagtatttatgtgcactcggcagccagagcctgcagaggcganaaggagacagtcagtgtccttaggtgctcgcctgcaagtcaggagtggggaggctgtgtacctgggcagtatgggtcccctggactgtatctctgttgtgtgggcacaggagacaaacttcagggcacctgggaggggacactggcacagcccctgaacaacagtagttcagaaggcacagctgtttcctgtgcctcacccgcaggcagctgggtccacctggcaatttctggcagttcttttgggataggaaagtggctgttcaggcaaggccagctttgttgttcccaggttcatttttggggcg

SEQ ID NO: 442921 - DNA, 458 bp, Homo Sapiens
  misc_feature (47)..(47): n is a, c, g, or t
ctcccctttaaatgtttaaagaaaccttcccctaacagaatccccanttccaaggtccaaagatccccaaactggaaaggcctaaagggtccagaagaagcgaataatgaaatcctgaacagagtgaacagtccttgaagcccaggcaagggcaggcatgtggctctcccgactggtggcccatgctcatggaaacccagatttgaggaaaaactgtgggaactttcaggttgctcttcaaactctccccagagcaagggtgccagggctcctgaagagaaggtaggagagggtggttacttagctcagcaggagtctgagatggtgaatgtagccctggcttcagcttggagaactctgggacagttccaggggaaaggactgtcactctgctgcatagtgacatcttgttttgcaaataagtgcattaaagggactggttctgggctttccatctc

SEQ ID NO: 442922 - DNA, 332 bp, Homo Sapiens
  misc_feature (288)..(288): n is a, c, g, or t
cacatgcacatgaaattttaataaagataaaaagcctaaaatatactctaactcttcaaaaaacatttttatgaaagaggaaaggaaggaggccctctttgtggctggaatgctggctctgagcagagtcagggtgacgcggcagggcgctggctttccagctgggtcagcggtcgtgaggctcaacacgagaggaggtggggtggctgctttggttgtaacattagcagggggaagacagctgcttagaagcatggtgggaagcagatgtggtgaagtgccgtactnttctgcttacaaagatggggatgtctaagatcgtgtttactacc

SEQ ID NO: 442923 - DNA, 521 bp, Homo Sapiens
  misc_feature (334)..(334): n is a, c, g, or t
  misc_feature (414)..(414): n is a, c, g, or t
  misc_feature (464)..(464): n is a, c, g, or t
gtcagtttcaaattctttcagtgatgctcccagagaagtccgtgtgcaaaggtgtgatgttctggtcataagcggcatactcagaggtgcaggtactggccagcttgagctgctgggcaagcatgggtcaagctggaatgcagcatcagggtgggctgtctcaggcagcagtgtgcattccctttccagcatgtcagccacccctttcagcaggtccaggaaaccaaaggctagagcggcctttcgcaaacggttcagctccttatagaatgtctgtgttttttcaggtagtttccttgcatttcttaaaatcttctgtacatctgtctgcagnccgctgggtttgatccagacagtcacattctgggcataactgcgtttgtttttgggctgcagggggaatggactcttatngtcatcctcgccataagggttttctttagcatctgaaataggacccaacngagccattttccctagccatgggagaggttctgggccaggctcaaagagagacatca

SEQ ID NO: 442924 - DNA, 1350 bp, Homo Sapiens
  misc_feature (21)..(21): n is a, c, g, or t
  misc_feature (26)..(26): n is a, c, g, or t
  misc_feature (32)..(32): n is a, c, g, or t
  misc_feature (41)..(41): n is a, c, g, or t
  misc_feature (51)..(51): n is a, c, g, or t
gggccccccggaaacccaaangccanaaaggncctttccgnaaaaagggtncaaacccccttaaaaaaaagtcctgtgtttttttccaggtaagtttcccttggcatttccttaaaaaccttcctgtaacatcctgtcctgcaaggcccgctgggtttggaacccaggacagtcaacattcctgggcaataaactgcgtttgtttttgggctgcagggggaatggactcttattgtcatcctcgccataagggttttctttagcatctgaaataggacccaactgtgccattttccctagccatgggagaggttctgggccaggctcaaagagagacatcatgaggtttgatttcttcttgctgtcagcttgggagtagagcattccatgccattcaggacctaattgaacaatcgctaccattccttccacttttaggctaccatggagcaggacacaaaagttaggtattttgcctgcaatctgattggctgaattttcatcttcattgtcatcagtgatgccagtacccacctcatcaccttctttgttaagtgctataggtaagaccagatgtctggacagaactgggggacttgaaatatcagctatatcaataaatcccactatttccaaatctgtgttaatgactttagggataggatcaatttcttcatctacaacaaaaggttctggcctggggaagacttgtacatcagcagttaggtggccacacttgagaacagcatggaaaggcgtatatgccaaatctatcagttttccaaacatagactgtacattcttcaagcacagggggccatcaatagtaaaaatctgcccttcaccattgtttaaatctatgagacgttcaaggcattccaaggaatcggtgctctggagctgttgctctcacttcgttgattttgagtggctagggaatgtcgcagtgaccctctaccaatgccaagacagccgtctgtcaccaggacaacctggcaaggaattgcaccaccccattcttgctgaacgatattgcaaacaccaactaatgcagactccaagcaggttttgtcataatcatccatattacttagtgcttcctgtagggtattataatctctcgtgaaggggaccatcaactcccaaagtgatgaaaaaaccacaagtgctgtaaattcaagcttgtaatttgtggccatgtgctcaaacagcatcgttaaaccatgggctgctaggtgcttacgctggtattcctcggacccctcaatagacacaggtcgggtcatggaaagggatacatccattaccaccactgtcggcatgatgaaaatgatcccagtgtcccaatca

SEQ ID NO: 442925 - DNA, 1012 bp, Homo Sapiens
tcctggtaagtggctatagttaaggcccagatgtctgggaccgaactggggggacctgaaaatatcagctatatcaaataaattccccctattttccaaatctgtggtaaatgcctttagggataggatcaatttctttcatcttcaacaaaaaggttctggcctggggaagacttgtacatcagcagttaggtggccacacttgagaacagcatggaaaggcgtatatgccaaatctatcagttttccaaacatagactgtacattcttcaagcacagggggccatcaatagtaaaaatctgcccttcaccattgtttaaatctatgagacgttcaaggcattccaaggaatcggtgctctggagctcctccaaattcgccatgcacatgatatataacttagatgggaaaggaaaaggtagtggaaacctgttgctctcacttcgttgattttgagtggctagggaatgtcgcagtgaccctctaccaatgccaagacagccgtctgtcaccaggacaacctggcaaggaattgcaccaccccattcttgctgaacgatattgcaaacaccaactaatgcagactccaagcaggttttgtcataatcatccatattacttagtgcttcctgtagggtattataatctctcgtgaaggggaccatcaactcccaaagtgatgaaaaaaccacaagtgctgtaaattcaagcttgtaatttgtggccatgtgctcaaacagcatcgttaaaccatgggctgctaggtgcttacgctggtattcctcggacccctcaatagacacaggtcgggtcatggaaagggatacatccattaccaccactgtcggcatgatgaaaatgatcccagtgttcccaatcagaatgcaaacagacagctataaacgaagaaatgcccgtgcccatcgccggacacagtccgtcggcataaactttccgtcggcataaactttccgtccgcgcgcccctcgtgccgaattcgccacccaggcc

SEQ ID NO: 442926 - DNA, 467 bp, Homo Sapiens
gctttgtgttatattaactttatttaatcctcacaatcactccatgaaacagataactagtattacacttgttctgtggattaggaaatggagacataatttaagcagcttgtccaaagtcacccaacaggcaagtggcaaagccggggttcaaatccaggcagtctagctccggagcccatgctctgaaccactaactagatatgagtcctgctctgccacttactggttctgcaaacttgaaggaaccactccccctctggtcttggcttcctcttttggaaacggactaccgttcggttcaacccactaggaatccccaagttagaactggcagagacactctgatccattgtgtctctctccctgttcaagggaaaaagaacttactcaaggtcacacaaccgggcactgggcctagtttttttgctcttgctgtgaacctcccctgtggcagggatgagtca

SEQ ID NO: 442927 - DNA, 679 bp, Homo Sapiens
cagggcggctcctccttgccctctcccttctggttgtaacggaacttatagtgctggccacagctgggctccggggagctgctcggccaggaagatgacagcatcatgtggatgcccaggagtctcgccccactcattccactaaaggagagatttctgagtcgggtcattgccctcgggcctcattgcactttctcgatcagagttctccacgccccactccaagctctctgcctcacacgcgtgaacccatcctcactgctgatctcgaagcgcagatgtgggccagtccgttttggggcctggttctctttatcatctggggatggaggctcttcctcagagctcgaagcctcacctgaatagtggtgccactgggactcaagcagcaggtctgagggaccatcggggacctggggaggaccatcttccggaagtgagcatcaaaggggaccgttcctggaggggcccaggactttcttccccagcgggctccccagagccgataccaggtcaaggaccccacgcactgtgggggtttctccatcctcacacggctaaacccgccactgccaagcactggaacctgaggggtatcctctgaggcctctccatcttcatccagccggggggctttgtatgggggaggtgctggcggggaccggccggagaaagtggc

SEQ ID NO: 442928 - DNA, 1442 bp, Homo Sapiens
ttttttttccaaacattgacagactttattgtgggggggttcccacctgggaccccacctcttaaataaaaaagtgcatagaaaagaagggatttagaaacctttgtacaatatctacatcctgggcccccagggcagaaagggggcgattgctggatgggctggaggggtggaggcagggcccttgtcacctgcatgcccacatccaccctgaacatgagggtgggggtgagatgctctgggaggggctagggagcccccaggctaggggcaagatggcagcgacggcagcaggaggtgtgaggggtcgtggtgggcagccacggcctcagttaaggaaccgacggcagcgcttggcgccacagttgcagggcagcttgttgctggcatcctcgatggggaacttgtagtcgtaggtgagctcctcaccacgcaggatgcggcgcagggcgaagataacaatgtgtttctggccctccacgtggatgacccgagagaagcagttgggctcacaggagtggttgatgaagcgggcggcattgccatgcatcgtggcgtccactacatcaaagtcatccatgcggaacatatagcacccgatgcccttcccatcgtagaacttctcccgcttgtcagtcaacaccgagcggatgacaatgccagagtactcgatgaccatctcccccgcgtcgatgttgcgcttacagaacaggcctcgcccgtggatggctgatctgtagacacccacagcttctttggacgtcttcttaaggtgacgaaaacgcatggccatgggcagctccaggctggtggcacgtctggttgacctgagctgcacctcatcctcttcctcatcacaggtggccccctcagggagcacccggtgctgggaggccaggaagttgaacatgtcaaaggtgcacttccggagatagacctctgcccgagcagccccatggggattcaggggcggctcctcctggccctctccctgctggtggtaacggaacttatagtgctggcaacgctgggctccggggagctgctcggccaggaagatgacagcatcatggtggatgcccaggagtctcgccccactcattccactaaaggagagatgtctgagtcgggcatgccctcgggcctcttgcactttctcgatcagagttctccacgcccctggggagacagcagagccagagctgagtcaggatggtgttttatggacactctccctcctgccactgcactccccccactcaccctccaagctctctgcctcaacgctgaacccatcctcactgctgatctcgaagcgcagatgtgggccagtccgttttggggcctggttctctttatcatctggggatggaggctcttcctcagagctcgaagcctcacctggtcccaagaagcaggttggagtgaagatcacccttccc

SEQ ID NO: 442929 - DNA, 504 bp, Homo Sapiens
ctaaattatcaacacaaaactgtaaaacagagatatttggtcaacctgtatttattgggaattgcttgcaaacatcctgaactatagtaagtgttagaaggcaaacaagaagataagaacaactctagcttgaagaactgtgtgatgtcactgaggagcaaagtggcactcagagaaccactgcagaattatcaaatcctaaacttactgggcagtatgtgatgttagagtttggagaagtgcttgatgaatttgggctggtgtagttgagtacacttctcctgagcaagagcgtgacttgagccatgaagcattggtaggaccctggagacattgagaagtgatgctataaggtatcttaaaagtcaatgaagatgtttgtgctcaagtcaggagcaaatgcatgtttcactttgttggttggtgctgctataacaaaacatcacagactgggtaatttctaaagaacagaaatttatttttcattgttctggagactgggaa

SEQ ID NO: 442930 - DNA, 777 bp, Homo Sapiens
  misc_feature (389)..(389): n is a, c, g, or t
  misc_feature (760)..(760): n is a, c, g, or t
caccattttggatggtagctccatcttcatgttttaattacacaaagtattttccaatagaaaaagtagaaatgatcataataaaacattcacaatcttaacactcaggaaaacaccacttcatgcatgcatatgtgtactactgcttgtttccaggtaaatgtacacaaaaatttgtctctcaacacacccactttttcttacaaatatgaacttactgaaaacatgcacagagtgtacagttcttctggacatttgagttacaaatattataaacagtcccgcactgagcagcagcagcatgtgcagcttcacacagatccctgggatttccttgagataaattcaaaaaatgtaattgtaagactgaatattatgcatattttttnggctcctgaacacattaccaaatggaccctccaaaaacatcacagagtgtccccagtgaagctctcctggggaaagcacaaggacgcgctgtgtgcaccaaggccggcactgggctcctgtcacctgggaaggcctagccgacctggcctcagtcagatctaccaatgtcttgtgagcaccaaccggctgtgtctcgctcgtctgccatcctccgtcatgaccttctgcaccatgatctcacgctgttactggtgatctggaaagctctctgtgcggacgtgtctctgtggctgtgcctctgctgatcactcttgggaaatgattaaccttggggcctaatggcacccggcaggaagggtgatggcaagtntcaccttataagggttt

SEQ ID NO: 442931 - DNA, 306 bp, Homo Sapiens
  misc_feature (47)..(47): n is a, c, g, or t
  misc_feature (59)..(59): n is a, c, g, or t
  misc_feature (70)..(70): n is a, c, g, or t
  misc_feature (255)..(255): n is a, c, g, or t
cactgcacctggcctcaatagatttttgaaaaactgtcatctccagnattttcaattgncctatctaggnacatagtatatctctcctttttaagtgttatagcttattttagaagtctattcccagactttaaaaagtctattttacagttttgtttgcaattataaataggatctgttttccatttctgattggtgacaactgatatacagtaaaactatattaattttgcatgtatccactttggcttcagnaaactcaccttcagaactggaatcttcatttctttgttgacctatggcttt

SEQ ID NO: 442932 - DNA, 490 bp, Homo Sapiens
cacgagttgtactgactttattccccttcatcctctcactcgcatgcctgctgtgccccatgctctggggctgtggggtgcctgtacacgagcagttgtcaatggtctcaacacacacctgggcatggccattctgccactaccaagccctctgtgaagggcaccgtggagactatggcagcatgagccagggttgaaggctcccagaactgtggccacagggcttgagttcatcactctagccacccatcgccagctggcctgagaccagagagccccaaggagccggggagggggcagacccagactccaggcctgagttctagccaaacaggctgagaagtccagatggacggtgggacccccacagatctccttgggaggggatgatcctgcgtcccccttcccccagccctggaaagtgagtatggtgccctagtcgcctcattctgacatctgggggcacattgtttttttgtgttgttttgtt

SEQ ID NO: 442933 - DNA, 460 bp, Homo Sapiens
cacgagttgtactgactttattccccttcatcctctcactcgcatgcctgctgtgccccatgctctggggctgtggggtgcctgtacacgagcagttgtcaatggtctcaacacacacctgggcatggccattctgccactaccaagccctctgtgaagggcaccgtggagactatggcagcatgagccagggttgaaggctcccagaactgtggccacagggcttgagttcatcactctagccacccatcgccagctggcctgagaccagagagccccaaggagccggggagggggcagacccagattccagggcctgagttttaggccaaacaggctgaggaagtccagatgggacggttggggacccccacagattttccttggggagggggatgatccttgcgttccccttttcccccagccttgggaaagtagagtttggttgccttattcgttt

SEQ ID NO: 442934 - DNA, 936 bp, Homo Sapiens
acaagattaaaattcaggaagctgtttgaatcatgcattcctacatatatttatttggtattgatgatgaggaaccccgtcaaaaattcctgtaagggagactactactcgactgttaggggtattgcaacatttacatacatgtagcttatcacatacgtaaacatttacacaaatagtacagcggtgaaccaccaagttctcattccacattcctttcccacactgcgtttacctgcccattcttgaaactggatctcagggcagcacattgcatttcaacaggcctagtgctgcttctcagaggcagtcaactcaatggtgcaaaagcacaggacagcgacaaggcattcacactacacagacatgtgatctcttactgacagcaggaagggaagagagatggagatcccgggtgggaaagcgacaacatgcatcacaggagccatgtgagatgcggtgaggaccgttggtacgcagcgtcccttgccagggattgcctcgagcagccatccgagaatgacaggcacgaaacatgaggaccttcctcgggtcagtcaagcatcatgctgggaggactcccacgtgtcccaggtacacaggtccatggcactcatccgacgctacagcttgctgtaaaggtccccaaaatgggcccacacccaggcgctgccaacacggcggctccgtgcgtgagtcccttcgggtctccatcccatgggggtgcacgtctcaggttttccgtcgtgaccactgcttgagcagcctctgaagacattattgtggctctcctgctgcctctctcgctaggcactactcatctgtctcctgtgagaggagtgcagattcaggcagaggcacgggctaggtaggtgcctaggatgacagtcaagccacagaagccctgcaaaagcgtctccaaggaggagggatgtg

SEQ ID NO: 442935 - DNA, 312 bp, Homo Sapiens
  misc_feature (203)..(203): n is a, c, g, or t
  misc_feature (218)..(218): n is a, c, g, or t
  misc_feature (263)..(263): n is a, c, g, or t
  misc_feature (297)..(297): n is a, c, g, or t
gagttttcaaacaatttatttcacaggagaggtggagaaggccaatcttcttcacacaagttttataacccattaaaacagtatctttctaatcccctcagagtggaaaacaggtaattctcaacctggagacaagctctgaagtacagagctatcacctgctgcaggaggtgtgaaggctcattcttaaagttttctcacgnttattttccattttnttagcacagaatgttctttccagcaaggtccattaagagagaccnaaatatgaatatggctgcattggattccagaggnggactttgatcaaat

SEQ ID NO: 442936 - DNA, 484 bp, Homo Sapiens
  misc_feature (17)..(17): n is a, c, g, or t
  misc_feature (25)..(25): n is a, c, g, or t
  misc_feature (53)..(53): n is a, c, g, or t
  misc_feature (59)..(59): n is a, c, g, or t
  misc_feature (64)..(64): n is a, c, g, or t
  misc_feature (73)..(73): n is a, c, g, or t
  misc_feature (86)..(86): n is a, c, g, or t
attggtccttgtaaccntctctganttttgcagttaaggctgcatccattttnaaatantgttngaaaaatancccatctcttggnaggctaggagacccgcccagagtctgcccccgcgtggagagggataaacagctcctctgaagtagctgcagacggctcttccaaccccgccccaacaggccccggggcctcagaggatctgcgccaggctgcgaagctgaggggctgggagagctggcagcagagatcccaccgctgtatctttgggtcgcatcaacagtccttctgcaggcatgcctccagcatcccacgttctgttgccatgacacctgggaccctggtgctcgctgggccagctttggaccctccagcctcaccctcggtctcatgcccacggccaagtatacacaggcagaactccccagcactgtttccaggtccctgggggggcccaggtgggcactgaagcagggcctagt

SEQ ID NO: 442937 - DNA, 832 bp, Homo Sapiens
tttttttaattttaaagaaggtatatttatttaacaaacatgtatgaactattcattaacaatccaggactgtggaggacaggggacagaaacaagcctcgaagagatcacaatatggtggagtgcatgcatggcacacctggctatctgaatcagacgtttgcctctgtgtgtgtgatgaagacagtagtgagtggaatggacagagagtaactgtaaattctgtagggaggaaaacgaacgtttactcattctctaacagtcttttgctttactatggtcatatacaacagttaatctcccatcctcagttcccagatacccaccagaaaaccggtaattaacctctggataaactttcactgattacagatgaggagcgaggcaaccttaagccataaacaatattcctacagtatgggggagccgcaatcatctgaatgccagttttcagagccagcctgtgaacgtttcatctgagggatgttttcccgatgatcatcttatcattatcgcatcttaaaagctggagaagccctaaaagccggtttggcacaaatgtcaactcaagggaggaatgccctctgtaacactcctggcagctacaggctttccacagcagcggaatgtatttttaaccaacaaaaagtattagaaacagcttcctcgtactgaactaaatcctcctcatattttccaaccgtttctctaatggaatttaattgtttccatttggtttctgaagcaatacagaattagcctattctctctcccatttccttcaagaatttgaaaacaattatcatctgtatttctgaattatctccagacc

SEQ ID NO: 442938 - DNA, 398 bp, Homo Sapiens
gtaacgctggttgctgtgacaacaatttttttacagctgctatgaacgagagtaagaaggtccagttgaactttccagagatgattgggaagctcttcttgtcagaggggccaaggttggatctactagggaggaaggtgggaaaagtttgaaccatccgatcaccatattggatagctctagttcatctaaaagtatctgggccactcccataaaagatttgtgatccatgcggccataatctccccagacgatgatctgtaaaacttttccttgtgggactctcttcgaaagataatagctgctgggtaaaggggttccagcgtttttcttgccacttttgttttctttttggctatgcagactccgttatctaatagatacacttttacaaacgg

SEQ ID NO: 442939 - DNA, 418 bp, Homo Sapiens
acttcctttggaacagtgctccttaattttttacctcctgcttcttcataaggttctatctccttgactccattgtttctatccaacgttccctttggtggaagctgtggaagctgtcggccccttcgtcctgcgactggagtacttgatgggcttgtctggacagacccagtacgaggatgagacctcgataaggcaggtgaaggaggggcagatcttccagtcattaatgaaggcatcgacctcatgaggtttgtatcaggacgttcagtggatctggagcgggtggtggtccgctcaaggagaggccgttgttctgttgatctggatctgtgatatggctgtctatctgctgcttcacaatccctgtctctatctggagaataatggtcatccatgacacgatgtctgtccattc

SEQ ID NO: 442940 - DNA, 840 bp, Homo Sapiens
  misc_feature (39)..(39): n is a, c, g, or t
  misc_feature (98)..(98): n is a, c, g, or t
aatgaaaggaagggcaaaaacctcccaatcaattaatgnaaggccatcgaccctccatgaaggtttgtaatccaggacgttccagtggatcctggaancgggtggtggtcccgcctcaaaggaagaggccgttgttcctgttgaatctggatctgtgaatatggctgtctatctgctgcttcacaatccctgcccatccctgtgatgatggtcaatggtctgactgtatctggagcgaggtagagtaagaaaatgactgtctctatctggagaataatggtcatccatgacacgatgtctgtccattcggctaattgtattataatgtccggtcatagtgcgggtccctcgaagcccctgttccacattccgactttgtggaggagggacactgggtgaccatgatctagtccttcctataacatctactcgatgaggagaccctgatggtgaacagtggtttgaatgacattacttgttctggcactgataatgttgagctttgaagatctcgaccatcatgtcgataatctgatactacaccaattccatcatcacagtcatagtcagagacttcactatcacttattctctttgacctttgcaacctccgtgttgggctctctccatggagctgtcttcgtggcatatatggagaagggtggggaagtggcaatgaagagacatcatgcgtctgaagtttgtaccaatgtggctcatcatctaataatgctgtttctaattcaattaaaatctcgcctaagaattcactttcttcctctcgaacacgagcttgatcccaaagggtaatctctagcattcgttcccgaaattctcttc

SEQ ID NO: 442941 - DNA, 841 bp, Homo Sapiens
tgtaaagacagatatatttatttcatatgacagcacgtttcacaggatatgtacagaatgtctgtgtaccactgactttaatactgtacttctataaagtttatagttataaatattgtatgccacataagcaataaaattcttacatataaacagcaatctaatatagagaacacagagttcacaaagagatccttagtgtctaacttctgctctgcttttaacagaactagtaaatatttaataatacatagaataatggctagttatttgcagcatacctttaactttcataactttgtgcattttcagcaacttgccaagtataattttcctgataaaggctgggctgctgatatgtatattttagacagtagtttatattcaataggaaacattgctcacagatctgcaatttgcactagtgaagtttacctaacaatgaattattttgctaatggagagcaaataccatatacactagtcacatggatgttaaagccacagtttcaacgagttaattcacattttgaagcaactgcttatagtaatactgctgtttaagacgctactgctgaaatgattagatcctccaaaaagctcaatataaaactcacaagagttatttctaacagcaaatcttggctgttagcagagaagattacttctataaatatagtattttgataacatttgagcatttagaaaaatgctttttttctaatagatttgctttataagtgcagtgcagtgtgctgtgcttttaacattatacatattcgtagccatgaacgctattttttgatattccctcaatgtacctcggccgcgaccacgctaa

SEQ ID NO: 442942 - DNA, 492 bp, Homo Sapiens
gttttaacaatacatgtgatttttatttagtgaacacagtatctgcaagagctctgacagccatccaccctccaatcttacttcactttacaaccaagtatcaatagaggctgttccttcatgcgagctgtgggagtatatacatcattgaataacagacactccagaaatcaacagatgtacattatttacatattactatatttaccgcaaatagaaatattttctaagaaaaaaagtcaatttgtggtttctggtctaccacagacctaacttctcagcaaagcatatctatgtagatatctgcgtttgtaactttaaaaataggcattgctttctatgaagcactaagtgctgctccatctataaatagctcctattttcagtttggtaccacattaaactgccccaaaatgttctgtgaccccaaagacacaaagttgctgcttatctgggtccagggtcagtacaattaaactcaaatatgaacca

SEQ ID NO: 442943 - DNA, 487 bp, Homo Sapiens
  misc_feature (235)..(235): n is a, c, g, or t
  misc_feature (278)..(278): n is a, c, g, or t
  misc_feature (328)..(328): n is a, c, g, or t
  misc_feature (371)..(371): n is a, c, g, or t
  misc_feature (376)..(376): n is a, c, g, or t
  misc_feature (414)..(414): n is a, c, g, or t
  misc_feature (423)..(423): n is a, c, g, or t
  misc_feature (446)..(446): n is a, c, g, or t
  misc_feature (464)..(464): n is a, c, g, or t
atttttatttttcattgttttattcagacagggttcattcaaggaaaggcaacttagtttttgtatgtgtgagctttatttttttactatattggttaatataaaagttatgaattaaacgtattcttatctcctatacccaggagtgaatccatgaaattctcagatagtaatccaaaacaataggtcctatttttaaaaatagactaaagtggggccagggcgcagtgggctncatgcctgttaattccgacactttggggagggccaagggcagnattcatgagggtcagggagtttcaaggaccagcctgattcaacatgggcnaaaaccctgttcttcttacttaaaaattacaaaaattaggccngggcntggttggccaaggcatctggtaatacccagctacttcnggggggctnagggcagggggattcacttgatncccgggggaggcagaggnttgcagttgagttcaagttcccc

SEQ ID NO: 442944 - DNA, 563 bp, Homo Sapiens
tgccgggaacatgtctttattaaagatgcaagcaagcacagaaggatcatgtgtagtgctcagtaacatccatacagtactaaaaatagaaaaatataaatgaaatttcacagaaagcagcctccctcacagaaacacaggcaaggtgctgccgagcccaccatgcgatgccacgtgccacctgcctggccacgcttctccccattacaaacaaaaacacaagcttctctctacacccgtttcaaatacagcaccaagaacggagaccccttccacagcagcgaccctcctgaccaccactttgggtgctttccagccacataaatgacagacaaccccggtccccacggggttggctggctactggcccccgactctccatcgcttcagcgaatgtgggtgagaaaattaggcagtgaagcaataaagacctcacctttactccctcagatacacggagggatgaggtggacagacacgcaggcggccgtgccaacctgatccgagtgaaacagggctacactcgcaaaatggtcctcccacggctgagcgcctcaggtgca

SEQ ID NO: 442945 - DNA, 395 bp, Homo Sapiens
  misc_feature (193)..(193): n is a, c, g, or t
  misc_feature (257)..(257): n is a, c, g, or t
  misc_feature (295)..(295): n is a, c, g, or t
  misc_feature (369)..(369): n is a, c, g, or t
ccgggaacatgtctttattaaagatgcaagcaagcacagaaggatcatgtgtagtgctcagtaacatccatacagtactaaaaatagaaaaatataaatgaaatttcacagaaagcagcctccctcacagaaacacaggcaaggtgctgccgagcccaccatgcgatgccacgtgccacctgcctggccacgnttctccccattacaaacaaaaacacaagcttctctctacacccgtttcaaatacagcaccaagnaacggagaccccttccacaggcaggcggaccctcctgnaccaccactttggggtgctttccaggccacattaaatggacaggacaaccccggttccccaggggtttgggctnggcttactgggcccccggacttttcc

SEQ ID NO: 442946 - DNA, 413 bp, Homo Sapiens
agtaattcttttgccattaagcggttgatgtcattctttgaatgagtgacagtaattccccacctcagggtgggctgcgggggagattcagttggaaaagtaacccatgaggttttgtgcctctgggggtcctgaggccccacccgtgcctgggattctctaagacaaaggacaagtcttaaagccttacagcatcttaagtcttagatcacatttagagagacccggtacaggtggaacagtgcaaccctcagaattctgcactggcccttcaagaaggcagttgtgggctctttggacccttgacggggatctgtcctctgtcctcctaagcacaaagatggggaattcttcccattgcctgtttctctccccatattcggcttctacacaatgcaaagtgggcccgttaa

SEQ ID NO: 442947 - DNA, 435 bp, Homo Sapiens
  misc_feature (100)..(108): n is a, c, g, or t
ctttaatggagattatgcttggagaaaggctaagtcaaaacaagtcatgtccaaataattcagactacacagaaatgtttgtgtatttttcaagtttgannnnnnnnnaaacaccttcacactcaatgactaatacgtgctatgctaaatattacagcttagtaaaaattgattctgaatgggcagcaagatgtctctggggaaaaaagctttcagcttgatgacaacagatgatgacaacagaataactaggggttcaggttgttgtaagagcattatgggggcgggggaaggagctcttgggccaactggatctaggttcaaattccacttactagctgtggaccgtgggtaaattactccaaaacctgtttttatctgtaaagagggcataatcatctcaaaggactgtttgaagtagttaatagggtgaac

SEQ ID NO: 442948 - DNA, 596 bp, Homo Sapiens
  misc_feature (432)..(458): n is a, c, g, or t
aaaagcatgttaaaattgcaccagcacaatttaacagaatatttattgcaaggtatgatgtacagtgacatgccatcttttgtctgtatgaacttcattactggggacagcaactgttgaatgtttgctcttacacctttatttcttcaaaactcaattcctagttcaatttttccatacactaaagctgctagactgggacagagcaggaccacatcagcgaacagctgttaaaagcaaccattatacatgaagagaggaccaagagaaaagaaattaaaacctacaaatttctctagaatgtggatcaaacataactagccacacttttcagtacattgtgaaaagattacaaagcagttttgagtcaaagttaccaatcccttaaaggttatcctttggttttttgagacaggagtcattttaaactannnnnnnnnnnnnnnnnnnnnnnnnnnagggatgctgacaccccgcacagtaaaaaatttgcatgtaacttttgactccccaaaacttaaccaccaatagcccactgctgacttaccaataacaaacagttgataaactcattttgtatgttatatgctatatat

SEQ ID NO: 442949 - DNA, 533 bp, Homo Sapiens
  misc_feature (466)..(466): n is a, c, g, or t
  misc_feature (491)..(491): n is a, c, g, or t
  misc_feature (498)..(498): n is a, c, g, or t
tgcctcagtggcttgctttgctgtgcagatgcagtctcagtggaaataagattgctcaaaaatgattaacccttggtaatctgcattttctgaagtttgatctgggtccgcagcccaatgtactcattctttgtacacctgtttctcataaattatcagctggctgggtgggcagggggcgccatggtttaaagctgcaactgactgagcaactctaatgtaagtgtttgccaaaacccagggtaaggatttccagtcttccaggaatgaaattatctttgaagtgataacgatgcgacatttactgcacatctgcacaccacagctggtgtcagggaggcgccacccccagggagagggagttggtctcagcctccctgatgagaatatctccctaaagtgagggccagattgcaaggagggaaaaccatgaccaagaaaggttttttgccagtttagagagagntgcctttgcaagtttcgttgcaggnttgagcntgtttgccgagagttgttgttgccttctaagtttt

SEQ ID NO: 442950 - DNA, 989 bp, Homo Sapiens
  misc_feature (39)..(39): n is a, c, g, or t
  misc_feature (57)..(57): n is a, c, g, or t
tccccttgaaacaaccccccacctcactgagataattanctgcttgtaatcaaaaangggttctccccaacccccagtacttgacaaaatacattaactggaaaccagctactaaattccctactgatgaaagagtactttcataggaagtcatgcatgtatggatttggtacaagtcattttaggaactaatagaaataggaatgtgggaaggccaggtggttctgtagaattttgaacaaggcttttccaagaaactcctccctccgcccccatcctccatatggagagttggtgagctgaagtggaatgacagctgagtccttctctctgcagggctttagccgccagtcttcactcctgttcaagattctctccagtgttcggaatcatcagatcaactcagatttggctcaactactgttacgactagattataacaaatactatacccaggctggtggaactctgggcaggtaggagcaacccttgggtaactcagtagactttttaaggtggctttttaatgagttgtagaattctagaactggaagaagactttagtccaaataccctcattttataagtaaggcttagagatagaggtgtgaccatctttaataattttaatggaggttattttctagtagaagtcatcatcatcataaaatactaaaaaacctgacagtgagataggtgttaagtcctttgctaggttatgtattgctatgctgggaggcagtgggccttccactcccaattctgatatgaactagctgtgcagccgtgggcaccccgccttgctggtcccttacttccgcatctgtgaaaggaggcgaccaccccttctaactctaaactttaaaaaaaactgataccgagattcagtggtagctggcttcccagaggtctgtcattcccattcagaaaatcacttcattgtcctttctctctaaaatggtctgcaagcagatttttttctaagctac

SEQ ID NO: 442951 - DNA, 386 bp, Homo Sapiens
cccaccctcccatatggagagttggtgaagcttgaaagtggaaatgaacagcttgagtcccttcctctctgcagggctttagccgcccagtcttcactccctgttcaagattcctctcccagtgttcggaatcatcagatcaactcagatttggctcaactactgttacgactagattataacaaatactatacccaggctggtggaactctgggcaggtaggagcaacccttgggtaactcagtagactttttaaggtggctttttaatgagttgtagaattctagaactggaagaagactttagtccaaataccctcattttataagtaaggcttagagatagaggtgtgaccatctttaataattttaatggaggttattttc

SEQ ID NO: 442952 - DNA, 3438 bp, Homo Sapiens
  misc_feature (3243)..(3243): n is a, c, g, or t
  misc_feature (3309)..(3309): n is a, c, g, or t
tggtggacactgctcccacagtacaactcttatataccggaataggatgcaaatgaagagtgatgtgctggactctatgtttactgcactcgaaactagacacgcagctggcattagctcccagaataaaggaaaccggggcttggacccgaacattagactacacacgatgaatatccacatcagtgaaattcactgcagactcacccgacctaaaggaacctcctgcccagtggccaaagttgtacatgttcatgtcatgtaaatataccattcattgtttcctttgttttgttcatttttaacttttttacaaagtcgacagcttactaaccactagtgagcatgccctcttgctaaaaggctttcttgtcgtctgttccactttaacgaaattctatttataatcctttcacctgctcgtatgaactgttgagatcgtaagtctgccaaggcagcagagtaaaccttaattgaatttaacaatgttcttgatttaataaaaagacccccacaatgtctgtccggactgtattcagtgcatccactttgcaaaggggctgcagacagtagtggctgacgaggtgagacaagtttattaaaaagcccccaggcagctggaggaggagaacccgaggaagggccgacaatgcacacaatgaagggaagagcgctatttattaggttgtgagtttctctgttttgccttaacagatgcacaaaaggtcattgaaagtataactgaaggaaataggtcagacgagcctaaacacaagacttgctagctgcagggctggtgcacgggaccccaggaaggcagccgagccactcgtgcccactagggacagcccagagaccttgagccagggacccccgatccactaacctcttctcccccattgcgctgacagttgccttgcactgtggttaccataaaataactctcattggcatccaagctttataaaaacatcttcattttgctcaaaaagggcagtcaatagatacagagaagccaaactgaacagcctcaataaaataaaattaacaccagcagcgaatcctcttgctgaagacttcggctagagggcacgtgcaccaaagttctaggctgttaaggggccacccacacaccgtcctcgccttgaacacaccagcttggaaatcagttatggattttaatggccttttcaaggtaagtgtagcgactcctctttggggctttgttgaagtggtcgagccctagccaaggccgaggatgagacatattaccgggctgtggctcaaagtctttcaaatttacttcatactcgtcttcatttatgtactggtgtcggcccatcattacaattgcaaatttaaacttctcaaactccttctcctggatgtccagcaggctctggattcgcttcatcacttctcgaaaatgctcgccctggtgtatcctcagcaaaaacgggattccgaacgttccgaagacctctttgtggaaatgcgccactgtgacaagcatctcattctctttgtctatgtccacctggtccaaagggatttcctctattcgaaacgtccggctcgttgcaggagataaacattctaatagttcatcttcttgatgaacaccaatgattttgtagcttacaatttctagcagcctaagtttccctgatgctttctccccaagctccacggcctttttacattcttctaacaggtcccggacacacccatgcttgtctggatatagtgttatttcctcttccctaaattggctgtttaaccatatacatttaaaacttcgcctgttctcaaagtctgtgattttcatcttaagctgctgatagtaaagtttcttaggttgtctaggcttgaagaactgtagaagatctcttaaagtaccttcataattatgtctaagaggattacctgggccatccctataaccttgagacttgaaaaactgcagcaacattggatctgtgttgagcctctgtgcaactgtctttgcaacctgaaaataattcattctatttgataacgtaaccacaaatccaggatcattagggattgttttatcacagaaaatgacatcaacgcggtggtagagatctcggaaatactcctttgcggtgggtaattcactgttatcattttcagggtcatccttctgaaatactatgatgtcaccatccattagttcatcaagggctttatcaagagacacgtcatagtcctgaattctctctgttaaattcggtttaacttcctcatagaggataaggctagtatcttgaataaatcctgctctgtcacacataactgggagcaagtcacgtattttacaggatattggtgtgtagatatgcccacagtaattcaagctccgcgttttgggatcatacatcttcaaaaataacattacatcatgatctttatcaaacttgggtaaggtcgctccactagcagccagctcgggatcaactgtttccaggaatattgtccaagggttttcattatcactgagctcaatcattgttttattgccgtcggcttcattatctaacattgctggtcgttttgttccattactccttgcttgcatgggccacaatcgaatttgatcttgtggaaatcccatggtctgagagaggctctgaacaaactcagcaagcgaggagttcttcaatactttgaacacagtgtatttcactttttcttcatcgtacatgtcattcccttggatggccacaaaactggtcctctgcgactatctgcacttgcatatagagatgggcttcctgccgctccttccgcttctgagcctcgatccttttctcttcttgtaatcgctccaccaactgctgaggaatatcatggtcggtgaccgcctgtaaaagttcactcagttttgattccctgatgtagactaacatgtaagcattagtgcagtgtcgaacagacaggtcgtcatcgtgacccccataattgtgctcaattgcttcctctttagtacaccttgacaccacgtcgtcatcaaaatttacaccatttgccatcccctttggggtttagataaaccacataatgtccagcatgattatctccactatgaaccaggactgcatgaagaatataatttgcagggtccttaggatctgttttttgcaaaaattcatcaagtggtaactgctctgggaattcaaacctatcattgatcttgatattttggtccgtctgagggtnatacataaatctcatcagttgtagatgtaacactggtggcaatgttaggaatttcacacctttctntgcttcctgtaagccatgttccccagcgtcgtatttattgtccccatcgagctgttctactgccacataatccacaaatgattcaaatatatttttctttcctttgatacttagctggatatcataata

SEQ ID NO: 442953 - DNA, 450 bp, Homo Sapiens
  misc_feature (205)..(205): n is a, c, g, or t
  misc_feature (394)..(394): n is a, c, g, or t
  misc_feature (429)..(429): n is a, c, g, or t
gaagggaagagcgctatttattaggttgtgagtttctctgttttgccttaacagatgcacaaaaggtcattgaaagtataactgaaggaaataggtcagacgagcctaaacacaagacttgctagctgcagggctggtgcacgggaccccagggaaggcagccgagccactcgtgcccactagggacagcccagagaccttgagnccaggggacccccgatccacttaacctcttctcccccattgcgctggacagttgccttgcactgtgggttaccattaaaataactcttcattgggcatccaaggttttattaaaaacatctttcatttttgcttcaaaagggggcagttcaattaggattacagggggaggcccaaacttggaaccggncttcattttaaatttaaaattttaaccacccggcnggcggattcctttttggcttg

SEQ ID NO: 442954 - DNA, 1438 bp, Homo Sapiens
  misc_feature (257)..(257): n is a, c, g, or t
cggtagtcctgggagtgggctcgccttaggaacactgttcaggcagagcaccctcaggcgccggcagggcccacagcacatgcatcatcgctggccagggcaacgggtcagcactggctccgggaggcgcgctggagccggctccaaggtcagggcctcacgcctcagctttacctttctgcggctgagtaggtgaacacggctgacctcaagtacttgcgtcacatcagtcccaggcgccatggacctgcatgtcncgaatccagcccgtgagcccctttagacggaccagtcaaaaatccaataccagggaagtacgggagaagatgatcagcagatcttcgcaggacggacggcacgacaagcgaccacgaagaggaataagcaagggccacgacgaacacacgagactaaaggagaaggtggaccaaaagacgaaacgggacactagagggcaacgactataggaagaaagtccaccacctcacgagatccggtgggacacggaggaataggaaacaggagcggaaccaccgagaccaagagacggcactagtcggaagtagaaggacggagcgagagtaaggaaaagaactgagacaaaaagtagagtctcgagccagaggttggagagttctttcctggctcggagtcctgaagggccggcagtaggatctaagacagcgcacagaggcacccgagtgcagctttgtgaagacaggctctttaagcagacagagccaacccaagaatttggggctgggaaaaaaggcctgcaaataaatagccaagaaatcccgcaaaaggcctgcaaataaatggccgacaattctgtgggaggagagcaaaaaacaaatgcctctgcacttagctgacaaatggaattttgattttggtaaagctgagacccccgtggtgctacacattgtaccagagcatgaaaaatagcaccagttacacgatctggcacttttctgaaagggcccagcatgtgtgaaggtgacattgcacccccagcaagccttcaggttggagagagctctggacaaagtttgcagtgttagcaccagtctggccccaggctccgagtgcatttgcaccagatgtaatctgggtaactttcatgccatttccatacaagtcatcagatttgctgcaaaatacaccagttcattggagccatagagacatcaacattgggaagtgcaagacaacacaacataatggaggtgtaaattctattggaaaagaccctctcacccatttgcttggtgattcttcaagcaaatatatatgtatctatatatttatataaatctacataaaaaaatcagtgcaatgccattctaatctgagagcatctacacctaggaaaatacaatagttatattcggacgcgtggtcgacgatatcccgttacttccggccgtacagcctg

SEQ ID NO: 442955 - DNA, 968 bp, Homo Sapiens
ctgacctggagcctgctcagcccgcctcccggagccagcctgcaccgttgccctggcagcgatgatgcatgtgctgtgggccctgccggcgcctgagtgcctctgcctgaacactgctcctaagcgagcccactcccagcactaccgcatggctctgaggacattttctttcaataaaggcagactctggccccaattattctgatagcaaacctcttcctcctcattgaagccatgccatcaccttggtttggagagagacatttttttcccattcataagctttctttttcccatttttatgtgaagccccctctggcttttcagctggtgattgctctggtgagactgaatggacttgctggtgaaatgaaatctcttgctttcctgtcttggtcctgcctaaattcctacaaatatatttaagccaaggactcaggctaattcctaagttgatcacattaattgttactcctagagggaaaaagatcaattcccttgaagcatgtggagtacctcctgtgacagctgacttgccagggactccctacagaattctgtgatatacattttacttctgtgtatgtatggtatatatggtatgtataccatgtacacacgttacattgagtatgaatgactgtggttggaaacacacacacacaactcaagtctgtaaaatatccttcctcacttgaaacctgtgctttggaaatcattttcttgtacagctgtgcagttttcttgtaacagctgaggacaaaagctaaagacaggcggacaatttagacaaagatcatctaaagagtataagtatctccctagcaactcatgaggacagacaaccaagtgggcaggttgactcccaatgggatggagactttcttctctccctttggagtgggttcctaagtgtttcttacttctgagtgcccaggctgtacccggttaaatccctttcatatgcg

SEQ ID NO: 442956 - DNA, 588 bp, Homo Sapiens
aatatttatatcttataataaaaccatgacatgtttataaacactctatcaggcatttttacaatggggccacccaccgctgacaactagaaacgcaataaatatgcacagacacactgagtatgaaatatacatcttgattttataatcgtgtgtgctttattttttacacaaatggaatggaagtgttgaatatttacacttaacaggagtgtaagctgtgcagtgtctctgtaaactccagcctaggcaaggagtattcccacctccctcccatcctgtgctacagctcggtggagaaacatcctgtcagagagaagcacaaaactgtcatattgaaaggatctaacgggtacagcctgggtgcactcagaagttaagaaacacttaggaaacacaaactcaaaaaggagagaaggaaaagtctgccatcccattgggagttcaaccttgccacttgggttgtctgtcctcatgagttgctaggggagatactatactctttaggatgatctttgtcttaaattgtccgcctgtcttaggtttgttcctcagctgttacaaggaaactgcacagctgttacaagg

SEQ ID NO: 442957 - DNA, 427 bp, Homo Sapiens
ttcaggactccgagccaggaaagaactctccaacctctggctcgagactctactttttttctcattcttttccttactctcctcctccttctacttccgactaattccatctcttttttttttttgttcctctccttttcctattcctccttcccaccatctctgagttgttgactttctcctataatccttctctattccctttctctttttgtccacctctcctttagtctctgtttctctgcccttcttattcctcttctgtcctttctcctctcctcaaatctctgatcatcttctcccgtacatccctgtattgatttttctgtcctctaaaggggctcatgggctggattcaggacaggcaaggtccatggcactggggactaaatggacacaaatactttagggtcggccggttttcacc

SEQ ID NO: 442958 - DNA, 702 bp, Homo Sapiens
gatttccatttcccccagcaaatcccattcaatctcacccagagcaatcacccagctgaaaagcagagggggccttcacataaaaatgggaaaaagaaagcttatgaatgggaaaaaaatgtctctctccaaaccaaggtgatggcatggcttcaatgaggaggaagaggtttgctatcagaataattggggccagagtctgcctttattgaaagaaaatgtcctcagagccatgcggtagtgctgggagtgggctcgcttaggagcagtgttcaggcagaggcactcaggcgccggcagggcccacagcacatgcatcatcgctgccagggcaacggtgcaggctggctccgggaggcgggctggagcaggctccaggtcagggcctcacgctcagctttactttctgggctgagtaggtgaaacggcgacctaaagtatttgtgtcattagtccagtgcatggacttgctgtctgaatcagccatgagccctttagaggacagaaaaatcaatacagggatgtacgggagaagatgatcagagatttgaggagaggagaaaggacagaagaggaataagaagggcagagaaacagagactaaaggagaggtggacaaaaagagaaagggaatagagaaggattataggagaaagtcaacaactcagagatggtgggaaggaggaataggaaaaggagagg

SEQ ID NO: 442959 - DNA, 456 bp, Homo Sapiens
  misc_feature (208)..(208): n is a, c, g, or t
  misc_feature (424)..(424): n is a, c, g, or t
  misc_feature (437)..(437): n is a, c, g, or t
gccataaagtataaaatgttttaatatttatatcttataataaaaccatggacatgtttataaacactctatcaggcatttttacaatggggccacccaccgctgacaactagaaacgcaataaatatgcacagacacactgagtatgaaatatacatcttgattttataatcgtgtgtgctttattttttacacaaatgggaatggnaagtgttggaatatttacacttaacagggagtgtaaggctgtgcagtgtctctgtaaactccagcctagggcaagggagtatttccacctccctcccatcctgtggctacagctcggtggagaaacatcctgtcagagagaggccccaaaactgtcatattggaaagggtctaaacggggtacagcctgggtgcactccaggaagtttaagaaacnccttaggggaacnccaaactccaaaaaggggg

SEQ ID NO: 442960 - DNA, 274 bp, Homo Sapiens
aaaacgcccctgtggagtgccctgtcctgtggttttagcataggccactgagttgtattcatggggtttcatgtctaccaagaataagattgttcttgcttaaattgtgaaagctttaccggtttagctcatagaaacagtcttggcaagagttccctgagataaaacttttcctgccctgtgaactttcttgttttgaattttaatgcattctaacatgagtgtctcatgttagaagctcagtgttgtggaggtcagtatagctatttaaaaa

SEQ ID NO: 442961 - DNA, 1657 bp, Homo Sapiens
ttggggttggggacaggtggaacgtgccggtgcacttggggttggggttggtgtgttgggtgttgaagtggaactcgtttcatcccagccatggaggccaccagcaggagtgttcatggggatgtgggcgaggtggggcactttgaaggaatggcggtctgctggtgccctcgaaggggcatccttcctggtcttcgctgacccagaggcgctgtgcctgcatatcatccaccaccaccctagcccagccttcccactgccccaggaaaagctcttctcctggccacctctgccccccagcacctcaaacttgcatggctgggctgtggcctctgcggccaggaagcctgacactaggcaccccccaggcgagagctagtggggtgcagagggccccatgccagacagcccttggggctcgttgcactttaagaaataggatctgtggtgtattccagggggcctgatggacacctttcccgggcgtctgcagctgccctgcccgtgcccgcctgcagtggttggagacgggagtggcccttcggctcccgagctccctctggggacggctggctcactgtctccagttctcaatggccaacgaaggtgcttggaaacacctaaccttgcaagttttaccgccttttgaggaacacaaatcggagaacaaacccagggttcaggcgtgttttctgtgaatgttggatgatgaatttttgtctcttctggtggagctgtgcctggccctgtaggcccagggttggctggaaggtgacatctgtgtttcgttttagctgaggttggcagaaacgttcccaaactcccccagccctggaccccagcagatgaggaaacggccccatttactgaccccgcccccttttcgaggttatgctcacctggtcagctcctcacgtaattgggggtggagggaaagcatggtggtgccctgggccgtccctgtgtgaacgcaggcaaaagcagcccagtccccctcactgcttgagctaacactgccacctcttttgtgtgagcacaaaagccacgtcccaagccacctgggcccgatttccacagatgtattgtgcggccagtgacttccccaggagtgtggagggggtggtgaggaggagcacctgggctctctacccctctcctcacagaagtacctgaaactaggtctggggcactcccaatgcagcgccttgtcagccaaggtgggcaggcagggactgtggcagcttatgtccaaagggagcccccatgcacaggaagccacagggttcctcttgtttcccccgctaacttcagcctctcatctgctgctctgggctgagggactagaggacatctcggtcgtttgaggggcatggccagtcgtggcaggccggccttcagcgtccggtcagggaagcgtgcagcccaaatgggcacttgcatgggagccacagaggagcgtccctggggattgttgggaccatgctgcccccactcccgctttgttggggctctaagttctggaaggtgtgtgcacagagggtgctcatgggactcgcatgcagctctcagcactgggtgggagggcgttggcttgtccagaatggggacgtggggcagcacccctgcccagcgagagcgcagacaccgtgtgagggga

SEQ ID NO: 442962 - DNA, 2198 bp, Homo Sapiens
  misc_feature (456)..(512): n is a, c, g, or t
tggcgtctgtcgtctccctgggtggccaagatttgctttgctgcgggcgcgcatgtatatgttgccccgctccttggttgtgtgtaccaccccttatgttaccggcttgcgaggtcgttgtagtgattggtgtcctcctgaagcggctcgggtggattcatcgctctggatgggggtggttgtggcccacccatgttgtgtgtccccctccgccccgctggttagggagtgtgtctcttcctcccaccgaatgtgtttccccacctgtgtggccgcggtgttttgcccgccccctgccccttctgtgtttaatagctgcggccccgtggctcctgtggtgctttatatagtcgcccctccttattgggggccccctttttcacacaaaaccgggggggcgcccgaaaaatgggggcccccctcggggaaaactttgaggcgcgcgcccccccctcnnnnnnnnnnnnnnnnnnnnnnnnnnnnnnnnnnnnnnnnnnnnnnnnnnnnnnnnngttattttaggcaacctttattacagaagtccactattttaagtgactttttgccaattttagatttgaagggaaggtctcaagttaagcttggaaccacttagaatccaagagggtagcaggaagatccaacccctcaaagcaggtggcatgggtgccactgggaggggatctggggcctgtcttgagccgtaaatcttcctccacctgagacgtgcaccccactgtaccagagatgcctaagactccaatccctgggttctggctgtgtggaaaatgtctctacacagtcaagcttcagctgactacatgtcaaagagagacaaagttaagagcagcctttcatggtgtcaagaagcagttagcatcttgacttcccctccactcactcgctgacctgctgcagcctccccgggcacctcaggcatagaaaatgagctcagggatctgcccaccctggaccccagtcccgttggtgctgtccgaggagcactggaactggaaggccacctttccacactgcacttccgtcatcccctcctgcccaaagtagctgagttcgctgccgtccaggacggcactggccgtgtagaaggtgtcttgttcaacctggaccgggtgttcaaaccagaccgggaaggtgttactggatccgtctgacatgaacttggtcaagttctgagccagaaccaccccgagccgcttgagctcaatcttcacgctgtactcagccttcccagagctggagccatacaggcccagccctgcaataaatacccttctgtccactgcaaactggatgctgtcgcagcgcccgcggtaccgccactggttgctgcggtaggcagaagactggaatcggtggcacctctgcggggcgaggcccttcctcttggtcaggggaaagtccaggcggggcttgttggtggccgtgtaccacaggaagatgctgtgggtctcctccagagtcaggatgtctgacttggcagcgccgttggcaaactcctctagggtcatggttggaattcggaccagatagagggctcgccccagaacatgcctcttgtttcgtggggtgattggcagcccctgcctcttgcactccgcctcggcccagttcaggacggcctcgaagaccaccgcctctttggtgttgagggcctcccgagtgacaatgatctccagcgtctgccggtctatctcacagaagccttcggaccgtagggccatctcggcctgtgcgtcaatgacctcccagcagcgctgcgtcagctcgggctcctcaaacagccggctctgggacagcaggacgcaggcgttcttggcttccaaacttgtctccagaaagttgacacaggcttttgccaatgctgggacgatgtacttcttagcagcgtacagagtggccagcaccgtgtcggcttccagatcgatctcatcactgtacatgtactttaagaggatcagaaaggctgcgggctccacgtctggaatgtgaatttcagatttgacttccgccaggtctccgtagaacatggcatagaagacggagctgccgacagccaagacgtacttgtgggcgggcaccgtcctggtcgcccccgggggccccacgacgaagtgcacgtcggccatgagctcgttgttgaacatgagcgcgttcctgcaaaggtagaggcacgggct

SEQ ID NO: 442963 - DNA, 599 bp, Homo Sapiens
cttctgcctacattacaggcattaattcatttaaataattaaatgaactaatatcaagacaaatgacttgataactaaataaatacataaagattaacaaggtggaagcttctactagcttcttctcaacatctgcctgcaaactctcctttgtgttaaaatcttccattcactggaaggaaacagtaaatgatgaaccattcagaaagcatgcttcatttcacttttcagggctagatatttctgccggcctataggtgcatataggagaaagaaagaactactagtttcttcacaatgtctgcctacagactactgtaaatggggattcgttacacaaacagggggggttcattatgacacgtaacagcttattcactaaccccgtgggctcctatttttttaaattatggaaataatcctgttcctagttttaattgtttctaatttaaataatacaaaaaagtacaaagcaaaaagtaagcctctctctctataacctcacttacccccgagtcccactcctgggtaatctgttaatagtttctgtgtattctgccagacatggtttatggttataaaggcatatacaacacata

SEQ ID NO: 442964 - DNA, 310 bp, Homo Sapiens
caaaaagaaatcgatactgatttttaaaaatatatcttaggagccctggtctcctgctgattccatggatgcctggagcacttgtatctggagaatggagacaatatcaccccaagcccgaattcatttgatgagactactatgtataaaacagttaattatatacataaataacataaaataattctcataaattaaaagtcaaatgatctcccactattcattcaactgagaggtgagagctaggcgcgagtgatggtgggtaaggtgaggaggtgagccccacagaccctcctgcatgctgcctggg

SEQ ID NO: 442965 - DNA, 1584 bp, Homo Sapiens
ttttttgggttttaacttctagacataaattttattacatttatagttgtatccctttgtgtgatatagttaggatttctctattaagtaattaatcctaactatatccttgggctgatttgatttctgcccccacccgacagactgacccttgtcccccttccccattccagctcaaggcacttaatattacaaagaaggcagtggctggctggagagatgggcctcaagtcagaaatcccccagtgcaacttaagacaaacagagagaagtcaccttcctcttaggaccctccctgggttagcagaaggaaagaacccagaagtcttcagtaccacagtaggcttcggtatctccctagccaggtgagggacccccaggcattctccctgcccgcaccgagtctctcttcaccctggctacttcctggccacacgtatgactctgccccttactttctgctctgagctgcctgaatacaggaagcaagagttcactctgaccagagatccagaagcctgcaaggaggccccagcagctttcaagaatggggagcagatggccacatgtggcctgctctgtcttatagcgtcacaagccaggagcaagcccaggggagatgctgttccatgctggcctgtataggttactttgctcgttctattatctgtcccccatccctaacccagataaacaatacatatgtcactgaaacaagaagggattgaagcaaggagacccatgggcacagatctcttctaccttcctgagctaaaagatgccaagccaaaggaatacaggataatggcctatgtgtccaggaggccggggacaaagctctctggctttgctgggggaagaaatagctccaactacgtagtcaagaagcctgtgacagaggtgggaggggaacctcgtgaccttgaagtcacttctacctttcatattcccttctagctatcgaataggctcttttcatattcctcacaaccccagctgttaggaagaatgtggtgtcatacagtaggtggcggggagaagacacatcttcagcctagtccctgccaagcccaccaagagcaacagttagtccctagctcctccgtccccaccaagtacccacacatccatagccagagaggccacctgtctccaggacagaaaggaaactgggcatgttactcaaggggaaggaaaggggcctaaagcccagaccacagtcatagggcccagccctctagcttggaagggagagcccaggatcgggtgaaaatgggggcttgctccttaattgcgatcccccatcagctgcagcacaaaggtgaagatgtagatgatgtctgtgtaaatctgcagggcgccagtgatgtagtcctcggggctgatggtgtgcttccggttccccaggaccagctgtgtgtcgtaagccaggaacagggtgaaacaaatggcccccagagcagcatagagcatgtggagccagtaaacgtattggaagtagagcacaatgctagtgaacatcccagtcaccaggagcacaattcccaggacacagaagaggactgtgcacgaggtgaagtccac

SEQ ID NO: 442966 - DNA, 469 bp, Homo Sapiens
  misc_feature (426)..(426): n is a, c, g, or t
ttttttttaacttctagacataaattttattacatttatagttgtatccctttgtgtgatatagttaggatttctctattaagtaattaatcctaactatatccttgggctgatttgatttctgcccccacccgacagactgacccttgtcccccttccccattccagctcaaggcacttaatattacaaagaaggcagtggctggctggagagatgggcctcaagtcagaaatcccccagtgcaacttaagacaaacagagagaagtcaccttcctcttagggaccctccctggggttaggcagaaggaaagaacccagaagtcttcagtaccacagtagggcttcgggtatctccctaggccagggtgaggggacccccagggcatttcttccctggcccggcaccgagtcttttctttcaccnggggttatttcctggggcaaacgttttgattttggccccttaa

SEQ ID NO: 442967 - DNA, 907 bp, Homo Sapiens
  misc_feature (464)..(483): n is a, c, g, or t
ctcatttagatctccccagcttaatttgccaatcccagttatgaaaaaggtaccataaatagtccacaccaaattggcctgaccatgtggcccaactacgtgtcatcgaaagttgctggaaccctttctcttggttttggcccccgttaggaacgttaatgctgcaaattccctctcggccataatataaggtccacctggtttcacatcctacaccacacttttaaaattcccatggggctttcttagtttatcaccacataaggactggcaccctgttttcacaaagaattattgctaaccccgggttaaatgagtgctaatgggctgaacgctttgccccaatggctttctgcggatagtataaatatggattatctaaagttgttctcaactccagtataaaatatatgcccaaacttcttcataggcccaaatgttcccaaggccccgggaaaaccccnnnnnnnnnnnnnnnnnnnnaacttttacgagaaagtgcaactgcagggtctcttgaatgatcttctagacagttccgcagaaaattagcagtttggctcagaaagtagagttcctcaggaggaattaaagttcttcctagaagaatacaaagcaacgtttcaggcagctttctgaaaataaaccattagcttatgcctacacagcgagacaaactggaacgtgtaataatgaaggctttcacatttgttgtgatgtgctttttttctcttaccccaggacctctagctgttctgtaatgttacataaagtagttatagcacttcgtccagcactgacagcaggcaggaagctaatcagcgaggagaaaatcggaagtgtgttcatgtgtttcattgtttttcaggtcaaatctcaatacttgcaaataaatcattaaaaagat

SEQ ID NO: 442968 - DNA, 922 bp, Homo Sapiens
  misc_feature (154)..(164): n is a, c, g, or t
  misc_feature (403)..(449): n is a, c, g, or t
  misc_feature (769)..(782): n is a, c, g, or t
  misc_feature (869)..(869): n is a, c, g, or t
  misc_feature (882)..(882): n is a, c, g, or t
acaccaccaccttcttctccacccctgttgctaaaacgtctgtttataattagttgttccgcgccctcttgtcagaagcgctctctttaatattattcttcctttccatagtatagaagttttctgtctcccccaacaatactttctgtctctnnnnnnnnnnngttgttcatagtgggtctcccttctccccacgaggggttgtctcaccgtcgtcggcgcggtctgttcccccccgtcgccgccgtgtgtgtatactctgtgccccgctgtctcgtcgtttttatttgcctcctctctctcatgtggggaccccgcttctgacaacgaaaaatgctgggttacgcgctatcagtggggcgctccgtcggtggtatctttttatgctcgcccccccccctcnnnnnnnnnnnnnnnnnnnnnnnnnnnnnnnnnnnnnnnnnnnnnnnagaagctctcatagagatttatttagtgtgagaaatatgagaacaatagttgtaaagaacaaatcaataacccgcagtgtgcattttggaaaaccaaataacttcttcaaatttctgagtacacagagggtacctgccttgaaatttaaatgtctaaggaaaatgggagatgattaagagttggtgtggcctagtcacaccaaaatgtatttattacatcctgctcctttctagttgacaggaaagaaagctgctgtggggaaaggagggataaatactgaagggatttactaaacaaatgtccatcacagagttttccnnnnnnnnnnnnnngaggacagagtcttgctctgtcacccgggctgggaatgaagtgggtatggatcctcagttggaatggcaacctccacctcctagggntcaaggcgatttntcaagcctcagcctcccgaggcagctgggggctttagggc

SEQ ID NO: 442969 - DNA, 601 bp, Homo Sapiens
  misc_feature (48)..(48): n is a, c, g, or t
tgaaccaaggaacctggaaccctgcccttgtcccgccccttatccccnaaaacccaaaaactggtgcccctgaaccccccggctgctgctgaaacccctggggaacccctaaaggctgaggcccctcccctgctaccggctcctacctgatgatgtcgatgtggccgtttttagctgcgaggtgcaaagggctggtgccgttggggtcggtggcgtctcccggccggggctccagcagcgccgcacacatattgctgctgaggagcagctggaccaccccaacgcggccgaactcgcaggccaggtccaggggcgtcttccccgagttgtccaccatgcacgggttagactggtgctgtagcagcatctcagacacatcatagtgaccatgctgggccgccaggtgcagggggatgtggccctcatcagacgggatgttcacggccgagcccgccttcagcaccagcttcatgggctccttccggccctgccaggccgcatagtgcagcggccgcatgccctttgtaagtccttgatgtccacagcggcctgggcactccacgcagcaggctgatcaattcagtgttcaaggaggtgctta

SEQ ID NO: 442970 - DNA, 495 bp, Homo Sapiens
  misc_feature (484)..(484): n is a, c, g, or t
ttttttttgtcagacaaaaatttaactttttatgagatttcagtttttgaaatacacaactcttacagcacaaacacagtatttacatttcaagttctttgtacaaaagatgtatgccattttggaagaatattgttgagatcatgatctaaaatacctgtcagagttactcatggaatctgctcttcacaaatccattgtattatgacataaaatatggctagacgccaaggtttaaccatacataaaaatactaattctcggctgggtgcactgggcttatgcctggtaatctcaggcactttggggagggcagagggcagggtgggattcacctgagggtcagggagtttcaaggataaggcctggaccaattatgggtggggaacccccgtcttcttacttaaaaattacaaaaattaggcaggggtgtgggtgggcctggcacccgttaggtcccaggctactccggaagggctgaggncaggatctggt

SEQ ID NO: 442971 - DNA, 383 bp, Homo Sapiens
ctgtgacagacggcactcacactgatttctatgtcctaccagacactgccctggcgacacacaaacctcaagtaatgagggtccagataagatcattagacaataggcttccccagattactaccaacaggggtgccccagccttgaagcgccttcacactggacacatgggcttcctgattaccagcaagtctctgaaggcagaagatcaggacagtccccacaggcttctgaagtataaagtgaccagaggaccagagcatggcttcattatcaaaactggccttggaaaccagagcactcgagtgtttacacaagctgacattgctgagatgaagttatgctatgttttgactgagggcagcaacgcattcaaaggacat

SEQ ID NO: 442972 - DNA, 421 bp, Homo Sapiens
catccaaacaagataaatagaagatgtcccttttgaatccgttgcctgcccctcaattcaaagacataggatatccttcatcctcatcaaatgtccagcttgtgtaaaacactcgagtgcctctggtttcccaaggcccagttttgaataatgaaagccatgctctggtcctctggtcactttatacttcagaagcctgtggggactgtcctgatcttctgccttcagagacttgctggtaatcaggaagcccatgtgtccagtgtgaaggcgcttcaaggctggggcacccctgttggtagtaatctggggaagcctattgtctaatgatcttatctggaccctcattacttgaggtttgtgtgtcgccagggcagtgtctggtaggacatagaaatcagtgtgagtgccgtctgtcaca

SEQ ID NO: 442973 - DNA, 456 bp, Homo Sapiens
  misc_feature (12)..(12): n is a, c, g, or t
taagcttcattntggtaatacatatttattgaaaattttcttcaccgacaatggtgaaatcaagacctcaaattacaaaacatggtggcaggtgatacttacaaaaataaagcgaaggtctatgttttacagatttgtgcatgtttccttcaaatctcagtctgtactgtcattaaaaagatcatggaatctatgttgttcctcatgatggaatagtaaaaaaactgcattccactgacaaaaaaaatagctttgcttccaaatagcacaagtctttaaagtgacttttcccaacaataaatatagaaaatagcctttaacaagcgtcttttagcttggtcagggttgtatcatttgtttggaaagtacatccttcccctgcagtcagaagaccccagacagcctttccagttctcccgagtctttggtgcgcaccaaagacaaggtagagccgag

SEQ ID NO: 442974 - DNA, 877 bp, Homo Sapiens
ttttgtagatacatccaaatagcactgatggcttttattgcagattcgtgtcattacaaggataatctgggaatatatttttaaaaaaaccctcccttttatatacacaaaacatgctacatggtacactttgtgagaaatgctgaggtaataggcacacacccagacatggacagtaccaaacatccaacatctcacacagcctggcccacgtgcccaccgggaagggtctcaccttcttgactcatcccttgccccttcttggcaatagtcccgggagtgctgaggctgacacttggtggccaacaggactcagaaagccaccatgctgcagtgcatcaaccaaggggtccggtgacccctgattattcaactcctgagaagtggcctgttttcatttttgtggcacttgttctccagggaagtgtagtttggagatgagatgcggactctagtcagcctgagagcgtggaatctctggtctgtagccatctgggggctctgatgatctgatgacttctgttctgagataattctcctggccagataggttattatttgtgtgaagactcaaatgacctgtaggttaaagtatgaatggaagatacaaaactgcgagtacattatctatacggccggtggagcttttggcctggccttcccttcccaaccagaagcctggagcccggagtgtttcctactcagaagctgaggaatctcgcctggaaagaaggggctgtgcgacagaaaaggcaaggagtaggtaggcgaggagtacagcagagcggaaagggggccttgaactgcagtgagtggccagggactgacacacagaaggcacttaatgaatggtgtcaaatgaagggataagtgggtg

SEQ ID NO: 442975 - DNA, 385 bp, Homo Sapiens
  misc_feature (243)..(243): n is a, c, g, or t
  misc_feature (301)..(301): n is a, c, g, or t
agcaccacactctggaaggcttcccggtaggcagcctgcatcggcccttgtaatgtgtctgcagctgctcgggcgatggcatcagtcaagttcttggacttgagcagcttggagatgttctctttcatgctgccctccacagctgtgagcttggtagccactgagttgctcagttggcctgccataggctccagactccttgagacacatggagggactgtcttcttgatctcatcccgtatntgcgctctagccgcccagctacagctgacgacagtgcttgggacaactgttgtgtcantgctcctgcagctgccctccccgctgctgcccctcagccagtgctcgctaccagccgccgctgttccctagccgtgccgagtct

SEQ ID NO: 442976 - DNA, 416 bp, Homo Sapiens
atgaaacaaaacctcagcgaacgtttatttctcatcatatggaactggtagcaaagccaaagatttctgcacttgaacactggataccactccctacccacccagtgaacatttacagtcatcacatgccctctagaacccagatccccatgccggggcctcttctctcctgcacaccttcttgcagggagggctttcaggccggaagggggtgccggttgcttctccgcgcctgcacgggtatttaatgtggcacactggccaggctcctctcctgccccgcccagcagcagcacggcccttgcctttcttcagtgccctccaaactggtcagagaggaggcacagactgctagaaggaagggcaagagaagtcgtaattcacagtcatttgctacagaaagtgcctggaatcgg

SEQ ID NO: 442977 - DNA, 816 bp, Homo Sapiens
  misc_feature (627)..(627): n is a, c, g, or t
gaggaacagcctagaggccaaggtctccccagagagcccatgagcctggcatgggggcacagggggaccagagggtgtcttccactcctgggtgccagggcagggggctcacgctgctgttccctcggctttgtggggcttgtccttgagctcccccaattccctaatgccactgtggccagtgtgctggggagcttctgtgtggctggaagctgggaagggggtgaggttccaatccaggtgcccagagccttcctccagtcctttatccctgccctgggggctgcggtgtgggactccttcagctgtggtcggctgaaaaggcttcgattgctttagagagctgaaaacacataagccaggccttttgatgacaacctgcacttttgcaggagagacgtactagagatgaatttttgagcactttattcagactataaaacaggaaatctctaattttcctcaagtgggggcttttgaattccctcaaggcaagtccctttgcaggtgaaattaattggtggattttcagaatggccgccctggagccgagcttcagccacgcctgacgccctggcctctgaatctccactgtctctgaggtgcgctggggccacaccgcagggntttcacctgcttgggggggtccacactagggcttgggggttcacacagcattgtccctgggctgagcccttgggtgggctagagctgcagtcctcagacatggctgcaattccagcgaggccaagaccaccagccacccagtggacttcgggtctctggggtgttctcctcatgcagccggggcagagg

SEQ ID NO: 442978 - DNA, 524 bp, Homo Sapiens
agaagatttagtaccaaaatcaaacttttagtaacaaacaggaatcttgtcaacacaatgtaggccagggattttgtaaaggtttcctcaaagacccaaataagggagaaaaaaatttttagttgggcctgtttaacttgggaaacactgtcatcagcttgagggtcctcagccagcatgtgattattttgatgacaggactcaggctaccctttaaggcacattttttactcagcattaaacactagctacagtcgtgaagcagagctcccattgcagctacatacttgagatgtactcttggtttcagaatcgtaactaagaggtaaggcattggagaaggacaatgtaaaagacagaggtttagaacaaagtttatggtgtgaatgaggctttcaaaatcagtatctgggtaaattgatactaaagacactgaagaaacactcatccacataagatggaaaggatgtctgtccatctaacaagctcaggggtttctgagtctcagaatgacatcccatttc

SEQ ID NO: 442979 - DNA, 116 bp, Homo Sapiens
aaaataaagccactttatttacaggtaatacaaaataaaccacaggacaaactactgtgcagggggaggggcagcccccacaataaccaccctccccatcccagagtaacttatat

SEQ ID NO: 442980 - DNA, 528 bp, Homo Sapiens
ttaattattaaacataatttttatttcatccaaggcaaagctaaatacaattctacaatgcaaaacttgttgtagaggccagactgattatatccgttctgtgctcgaacacaagtcagtgctggctgtgtgggcatctgcgcctcccagaggcactcgcacacctgaggcctcccaaggcctgttgttgcatcatttgatctatagttacataggaaaattgactatgggtattgttgtcatccaagccagaggaataaaccatgcataagatagtcaaaagcactgcatatcaggtgggaggtgggagggtagggactccaacctgggacaaagtaaagtaaagcaagttataggattttcccgagaagtccccgctcctggaactccctactgccagcccctctgatggcagcttgtctgtgacactgagatgaagtcatggagtgacggaatgcaggagcacggctggtcttctctgcctttgattctttctcagtctccagatgcctcaacaggcatagctca

SEQ ID NO: 442981 - DNA, 540 bp, Homo Sapiens
gccttttttaaaatttttattttcagtacattaaatttactcataaaaacattctaaaaatgtacaatttgtcctttttaacaaagtataataaaacataaaaaccccaaaaacagaatacttgacatttacaattcaaaatcaaattagcggaatattaaatatttacaaaactatatcttttaaaaatatttataaagttacatgcaattttgtagaattgacaaaagaatggctcaaaaatgggagaattttccttcattcctaaaaagaaaatatgtccaatagaagctgtgaaggtatcgagtacacaaggtgtccagtttcagtaccaaagccttctctttttgtgcacgtaagactcacacatgtgatgagggcttgttacaacgcacgtgaggccgcggcggatggccactgcccccttccttggtgaacagtggagcaatgttaacctttggcctcaaccagcacagtatatggttttctagaatattgcgagtgttgagtgttgattaaagatgctttcattcagaccct

SEQ ID NO: 442982 - DNA, 433 bp, Homo Sapiens
  misc_feature (252)..(252): n is a, c, g, or t
  misc_feature (304)..(304): n is a, c, g, or t
  misc_feature (361)..(361): n is a, c, g, or t
  misc_feature (392)..(392): n is a, c, g, or t
  misc_feature (420)..(420): n is a, c, g, or t
cagtacattaaatttactcataaaaacattctaaaaatgtacaatttgtcctttttaacaaagtataataaaacataaaaaccccaaaaacagaatacttgacatttacaattcaaaatcaaattagcggaatattaaatatttacaaaactatatcttttaaaaatatttataaagttacatgcaattttgtaggattgacaaaaggatgggctcaaaaatggggggaattttccttcattcctaaaaagnaaatatgtccaataggaagctgtgaagggtatcggggtacacaaggtgtccngtttcagtaccaaaggccttctctttttgtgcacgtagggcttcacacatgtgatgnggggcttgttacaacggcacgtgagggccgnggccggtgggccactggcccccttcctngggggaccgtggg

SEQ ID NO: 442983 - DNA, 601 bp, Homo Sapiens
  misc_feature (24)..(24): n is a, c, g, or t
  misc_feature (38)..(38): n is a, c, g, or t
  misc_feature (44)..(65): n is a, c, g, or t
  misc_feature (527)..(527): n is a, c, g, or t
  misc_feature (571)..(571): n is a, c, g, or t
ctgaaggcatttacagtggctggnatatgtgctgaaancaaacnnnnnnnnnnnnnnnnnnnnnnaagcaaagaaatattttaaataaatcctatttcaacactgaaattgttgaaaaccgtctcataacaaaaggaaaaaacattggaatttttgttttagtggtcagtataggggaatgaaagcgtctgttgttacccacgtaactattttgataagtattagaggttaaccttaaatccagcaaaacattaaaacagaaacttttcaacttggagcctgccattcagcgttgaggtagatgagttccgacactgtcacggctgtgttcccagcagcgaaggcctctgcggactggccagtcgtcttgaacgtgcatggggcggcgtgtgacatctccaggggaggccgtccgaagtcgggaattcgtcagctgttaagtagggagctacacagcgcagaggaaaatgggaaccacccttccgtgaggccttttttccggagggaggccgcacatttgggctttnagggtttgcccagcaggcgagcttcggatgcatttttccaaagncaccaggtcggcgcgtttaaggagcgtttt

SEQ ID NO: 442984 - DNA, 1765 bp, Homo Sapiens
ttccagcacttccttcatttatttcctcactcattcattcaccacacattgtatgagtgacaattctgtatcaggtgctctgctagacacatggcgaaggctacggtccctgctgtccagacttctgcagcaacgtcatgaagccccagcactcaggacaatctgggagggtgtgggcattaaagcaacctggagcctcagcaacacctcattaggaaacaaaattccacacaagaaaatcatcctagtccttcattttgtcaggaagtggaaaagatacgtgaatgagtgactagcagtgggaatgtcccccaccagagatcctagaagagtgcaagggcttgtttgattgttaagaagtagcattacccccttccactgaggacaggccaagagagaacagctgtcagttgcaagaacaatgcgggtgactagaaagaacatccttactgttacctgggagaccccgcacacagcatcatctggcctctgggaagtccatgcaaaaaaataactctgcccttgatatttgcccactcgtgtgtctatcagaggcagataactcttagatcatgggttacgcatcttactttcttgcagaatgtcccctatctgtgggccggctcatggcagagggtgatcaagtcctcttcctggtgatctatgtgtggccatcacatcctcctgtgtagtgaggatgcccagcaagctgcaggtgctctgaattttggatccctgcctactcttgtggagaccgcttggcttgtctgcctaacttggccgtcgacgttttctcatggcataatgcacagcctctgagactttgccttgtgtttatttgccattcttccacagccacccttgtcctgggggggtctgcaacatacccatgcacctcccggaatcccctgaccaccccatagctggtctctttgctcacaccaccagctttcaccctgttcctacagcttcaccccgacattctgggccccatctttagggacagcgggtctggtctcaactttttctgggcttggttgctgcttgtgggaggcctccagagcggtgtcagtccagatgcctgccagcggtgccaggcaggtttctcatcttctgaagaagttgagggtccagctgctgtcagaattctatgcatagatgtccttgcttgcaccacctgccagcattttttcctgcaaagaaggcgagctgtccctcctcgctccttggggacgaatatcccgcatctcaggctgaggctggcagctccaggaagtcctctgggagctctttccggcttgagtcaggtgtagtgatggcttggacccttcctgtgaatcaccaccccagctgtccaggcaacccagagtgcatattctcttgtgctcaaaggcacaaaatccaaataaaagaggctcagggtccgagagggatcacttgacaaaattcttcacagaaactaggtcgagctacagcctctcagtttttcttcgatgtcttaagaagaaagatctttgagattcctcccaggagctagataggccgttcccagagaggaagaagttgcaattctccgcctctcgtggagctgggaagagcctgcctctgcggagatgggaactccatgatacctaagactatgatcacacctggtaaggcccagcttggccgccactccaagaagttgtcccctctaagggctcccctcgacagcttgaaaaaattaatcatgacgttggtttaactggttgcttaacattcaaat

SEQ ID NO: 442985 - DNA, 1029 bp, Homo Sapiens
ttttttttgacaggctccagatgtgtttattaggctatttaaatagaaccatgtgaccatttctgtaggtaaaaggacaaagaagaattacaaacactttgggtctttcccaaattctctcccctttctctggtcaactccacccaccttcactctcaaaggaaaggcacagggggaaggaagtgagtgagggggctcagaagagtctgtgtggctcctaccaccccaaacatattctggtttcccgaagataagaggcaaggcttgctctgatctttcccagttctcagagtccagcaggccgctgtgctggacacatacatggatccaccaacatacatcagtccttctgtgttctctcctgcatggtagaggctggaagcctaagagctatattcctcagaatttcctgccagccaggatttgctttaaagtccactaatgagaggcacttctagaaaccatgattccttctccagcagtggcagacagtaggcatgaggttttgtagcatcttctgagcattttccagtacatcatctgcttttgtgctgctggaagctgagaccatcagcaggagttttctgtgcctcctgcaagttgctgatttctcacagttgctactggctttctccaatgttcacttctctatccctttcagtggtttataaatacttcattcctatagtagatcccttcctgcttatattaataatacctagaggggacatggttttcctgattcatccagctatcttaggaccttactccaaaataaggaaggcttctcttggggaggtaattgcctgtagaaagatttccaaacactgttcattatttgatgccaaaaggtaaacagaagctgatgtgggtggtaggcaattcccagccatggaacacatgttggcctgtgagtcctgagatgctgaatgggatgccagttccctgaccagaaatgtcctcccatctacctcactgctgccattccctggggatgccagggctgagcaataaccacaaggaggaggc

SEQ ID NO: 442986 - DNA, 504 bp, Homo Sapiens
  misc_feature (459)..(459): n is a, c, g, or t
  misc_feature (467)..(467): n is a, c, g, or t
  misc_feature (490)..(490): n is a, c, g, or t
aggtgaagaagtataacacaatttattttatgcttaaataatcgactaggtcatccagtgtatggtttttcatacatatgtcattagagctatgtgtcaatgaatgctgattttatgtgaatataatcaacaaattaaagaatttcaccaaaacccaaataaaaatgccctttaaaacacagcagccttattaacctaatatgacactgctagaatggttacaaatgattggcttactgaaaggtgtctacatcttatagccagtacacaatacagtaataattttacagcgtgctgccattctactagctaaggatttctgttcagtcctttttaaatacccccgactggggccttttatgaggcaccatccacctctaaagcggcaagcatttacccccttttaagcactaacagatagcatccccccaccccctaaaggcaactaccgtatagggnattttttnttggtggtttttaggggcttttnttggaaaattgggc

SEQ ID NO: 442987 - DNA, 302 bp, Homo Sapiens
aaaagcacaactatatttgggcacgacggatttaagtttttcttgttgagaagagtacatctttccaaactggacatcaaggaattgctacacagaagaaccacatccaggatagaaaggaccagccagagctcgttcagtagtgtatttcagaatcatcagggaggagccggtagcagaattatcccgttaacactgagaccacatttcacctgttacttatttttctaaatggagtaggagagaaagatgctaaaatgtgatcttgggaggagtcccccagtcccccgaaaaagaagaag

SEQ ID NO: 442988 - DNA, 713 bp, Homo Sapiens
tttttttagctttttcaataggtttttattgaaatggttatattagcaaattctgcacatacgggtgtacactgttggcatataggtatataccatacaatttcactacttgattatacttacaccaaccatgcagaccaaggagctgtgctgcccagaacatttcaaagggttgatgagatctgattgtcaagaaccagctcacactctacttgtaggtgtttgtgttccagacaagaaaactcccccgacagggaggcccgaaactgagctaatcgtcagttttgcttcttgaatattgactgttctttctggcacaagctatccaatgaattaaattaaaattttaattaaaattcaagtgcataggtttccttttcatccctcaaggtgggaggttaaatcatttgccacatttagggtatatccccaggctccccacccccacattacccgtgctatagttagaaaaatagttttgtacgccatcttctgagatgttgtgcatagtgagcaggaacctagagtacggtgggctctttcaatgacccaaatatgaaaggggcaactttaatattttatgagtataaaagctacggagggtccaaaacaactgtgacatatgtggcctagggcttgcaccagctcctcctcctgtacaggaacaggatgcttccatcaggtgagaatgttctccatacctcaaatctccc

SEQ ID NO: 442989 - DNA, 383 bp, Homo Sapiens
agagatttcccttttatacatattgcaacaagttctccataaaacattcatctgaaataaattaaaaagtccttttgccactgcctccaaacataaaaaggagcctgtgccctagccccagcccgggccacccatggccctgattgtccatggaagaaagttaaggattgaggggcccacagcctgagatgagagggccagatccttcctctgaagtctccaacaagaaaggcgaggtgacggcatgagcctgggagatggcagccaactccttgagaaattcagggaaaatgactgcacagtagacagcattcttgactcgaaggccctcaccttggcgttcaggggccccgcccggggtgagtagaactggagttgaagcc

SEQ ID NO: 442990 - DNA, 2053 bp, Homo Sapiens
  misc_feature (793)..(793): n is a, c, g, or t
  misc_feature (1995)..(1995): n is a, c, g, or t
  misc_feature (2015)..(2015): n is a, c, g, or t
gttgtttcagccattttaatacattcaagaatatttactagaacaacatttaaacgtatcgtcggtccgcagaagcctgggatcgagagaaatagaaacgcgactggcccttttgcagtaaagcttgtgcttgaagggagaagaggcaaagtggcttcttggagacttcgtgccagatgccacaggactgagagcatctccaaatgtcactttaaacacgtgtgagcatctatagtcattcctaaagcccacagtgtcctaaggatcctattagacgaggcaaaaggcaatgcttctggaaccctctcccttgcagctctgcacgcaaaccttccccaaggaggggcccgaggcaagcctctagataggcggggccaagccctccccgtggcccaccctctttccctgttgctgacctcaggcctgatgctggacccatgagactcccagagggaaaacacagatacagcccatccatccatgggcaccttcctccagaaggatcctggggacccctacccccccatcccatgaggcaccagggctgggctcgcatggccagcaagggataaagttgggaactgcagaccaggggaagccccctcattcttagggcaaaacagcccctgaaggacaaaataaataaaccaaaccatgaccagacagctggatccggacaggtggagtggcctctgtgaaggcaaatgagagcaaaagtgggaactgaggacacctaagtggagagacacttaaaaacagtaattctcacatgaacatcagtggctcatgccanacagcagagctggccatcaacagaggaacagcaacaaaaacacaactcagacggggggcgggacggggccaggagtctgcgggggtctctgatatgctttgtggcatgactttgcttgcctggcctctcctttcttagctgaaaacaggcatttcactaaagggcatccagccatgcggcagcagcctgagctcccaggctgacatctgggcagggctgatgggcagcttctggccatctggtgaccaggtgtgccgccagctgcacccacatgcacagcccctttcctaataaccacattctaggttacgtagacacgttaaactcctattctagaacatcgtgcttgaatgcagacccctcagcccacaatcgggctggctgggcctcctgtgagcccctcattgcatccagtctgtggggcagtgaccccgcttccactggtggctggtcttcctcatggtgctatgcaggtgccaaacacagttatattctcaaaggtacaggtcttgtctggacattgttcaaaccaatagctactgcgttaggcacacgggagatccctattccccaaaaatagctgttgagttctggcctgagagcatctccagtgaccacctttaaataaggctttggttcaaacagcatggacccagcacctggggagggtgggcacagggggcatggacccagtacctggggagggcgggcatggtggtaggagacaactcaaccactgagtcttggaggtcctgccttggccatggagggcagtggctgccctcacaagaagagttaaggcactttctttaactctggcctaggagaattatgtcttagtgactcagtgagtttaaatgacactgcctgggctccctaaagttgtttacttttctcctatttcctgctttattccttgctctcaccatgctaatgtacagatgttgtttagatttctatgcttattgaaacaatgtaactttggtactaacagaacaggagcgaccttttccagcattgctcgtaacaaaacaaaaatgttaactagaaaaactccttatgatgaagaaatctaaagccagagctgggactccaaaccccttccaggctggaagacaggtcgctgagtccaggcaaggggcccccgtaactgcttcccgccagaaagcccagccgcgtgagtgcagcagcagcaccccagncctgcgtgcccgcaccactncctctagatactctcctagctgcaggctgcctcgtgcc

SEQ ID NO: 442991 - DNA, 850 bp, Homo Sapiens
  misc_feature (139)..(147): n is a, c, g, or t
  misc_feature (420)..(420): n is a, c, g, or t
aatctttttttaatttggcccccagaattgaaaaggggaggagttgaaaaaaaccctttaagggggggaaattcccatatttttttgttaaaaaatggggttaaagaaaattgtttattcaaaaaatggctttctgggnnnnnnnnntggctttaggttaaactgggccaagggccaccatggggaaaaaggaaagtttcttacctgaataaataaagggaaattcccattcccattttaattttggggcacaatttattctcaagaatcaagaaccctagggtgtagccccggggccaggggagtcagggtgatgcagagaggagggtggtacctcttgtgtggaggccaaggactgcagacagttcagccacatcaggtgggttgttcatgtgaattagatggaccttgagttctctntaatgctcatgttgtattacattgaaaccctagcttcaacactttaaaaagttcttattagcaagtaaattacagattgaacttctgaattgtttgcagccattttttattccaaacatgtatgtttttgtaaacctgacatttcccaaacagtgcaagtgaatcagaagtgactgcttagactttaatacacgtgacattgtgaggcagcacaacctccccccacccaccaaaattcctcagtggaaatgtacatggatgcatcagtaaagttctggaaatgcagatagcgtgggtgcctgccaagcaattaatcactcgtaaagcttttaaactcactctgccagtcacaccgtgcacattagatttaaaacaacaacatcaacaaagaaaaaaccttaacacagtctgaaatctaggatccattgtg

SEQ ID NO: 442992 - DNA, 639 bp, Homo Sapiens
  misc_feature (552)..(594): n is a, c, g, or t
tgagtttaaattttattttacaaaaagagaaataaagaaaactgataggcagttatactgacttacaattgttctgtttgcttttttttaaaaaagtgacatgaaacacaagtaaaaataaatacgtcatagaaacagccagttgcccagtctctggggcaggagcgcctgccctgctgagaggagggaagcccatgatcacaccagcagctggatcacccagccacagatgctcctcgaagccaggcacaggtcccaggcctcaggggcgtcctgaggaaagaagacggaaaaccaaagccaggtgccaggaccctggggccacctcattatcccccactcctcctggcagcagtctggtcttagtggttatccatagcgaccccccttaacccacctggaccctcttcccctgacctctctgaagatggtacaagggaaaaacctgtcttgggcaggctgggggggattcttctggtgagtccccagcccaccctgagtaacacaaccagataacagtcattttacacccaggtgcacatgagcacaggnnnnnnnnnnnnnnnnnnnnnnnnnnnnnnnnnnnnnnnnnnnggttgggctgagctctcttccagggagggtcctggggtccagaca

SEQ ID NO: 442993 - DNA, 530 bp, Homo Sapiens
ctatttacatacattgagagaatactacaatcaacactttttcctgggatgactttaagaggtttgagccacagcacctgaagtggcaaagatccatggtctttgtagggtattagagaactcttccagtcacctctgaaagcactctagatcttgcagctgagtggatgaagtgtaacaaatctgttgcacgctgagaggagtcagaattagcatttttcatgaaagttccccacgtctctactaagaatgaggaagaaaagactaagactaggtaattacacagaggcttgaaatgttacatcaccagagccaagtcctctcccttcagatcagttactggctgctacacagggacacccccaccttttcagggcatcccatgcactccacttctcaggatctaaggaatttgactttgtagggatcccagaaagggcactgtgccacttcccctggtgtgaatcagacatacattgtacattcatttctaaaattcactcatgcacctcaaaccaaggtcattatcc

SEQ ID NO: 442994 - DNA, 694 bp, Homo Sapiens
  misc_feature (52)..(52): n is a, c, g, or t
  misc_feature (71)..(71): n is a, c, g, or t
  misc_feature (83)..(84): n is a, c, g, or t
  misc_feature (117)..(117): n is a, c, g, or t
  misc_feature (127)..(127): n is a, c, g, or t
ccagcttctctgtcatgtgcgaacacagtgacacgtttgcccagtgacattncaatcactgaaaatgtgcnccacatctcgtnnggatttctaggcctgatacccaacagaaagcanagacgtctcnggttattcgttactctaaggtaaaaccatctaggatgattttcccccttgcagttatgttatcattcttataacattgtatgttaatagaaaatatatttgcataatatgcatatatatgtatatttaccaagattttgtttcttacgcttgctatcatggcagcatgcgatgtcatattttcctttatgtgatgtaactactttctgttatctagaaattaagattgaagctaaaacacttctactgttcaatttcagaaactaagaatcatcctcatgcctttatttctgtatctgacatatttcataagcacatccaactactcctagactgactaggattctgcaggaacatgacccgtacacaccacgcgtcacccaacgacccatgaccgttctctgaggcaaaggagggcaacctgacagcaaacacagtcactgttggttccttctgatccacagcctcatcagtatttggactttttaaagctcgtagaaacaagacaaggtgcaccggtttcatagacgcaaccttaacttactatttagatgagatctttctaaag

SEQ ID NO: 442995 - DNA, 478 bp, Homo Sapiens
  misc_feature (321)..(321): n is a, c, g, or t
  misc_feature (360)..(360): n is a, c, g, or t
  misc_feature (366)..(366): n is a, c, g, or t
  misc_feature (396)..(396): n is a, c, g, or t
  misc_feature (456)..(456): n is a, c, g, or t
  misc_feature (464)..(464): n is a, c, g, or t
tttttctttagaaagatctcatctaaatagtaagttaaggttgcgtctatgaaaccggtgcaccttgtcttgtttctacgagctttaaaaagtccaaatactgatgaggctgtggatcagaaggaaccaacagtgactgtgtttgctgtcaggttgccctcctttgcctcagagaacggtcatgggtcgttgggtgacgcgtggtgtgtacgggtcatgttcctgcagaatcctagtcagtctagggagtagttgggatgtgcttatgaaatatgtcagatacagaaataaagggcatgagggatgattcttagtttctgnaaattgaacagtaggaagtgttttaggctttcaatcttnaatttnctaggattaacaggaaagtaggtttacatncacattaaagggaaaatatggacatcggcttgctggccatgattaggcaagcgttaggtnacaaattnttgggtaattttac

SEQ ID NO: 442996 - DNA, 460 bp, Homo Sapiens
  misc_feature (441)..(441): n is a, c, g, or t
gttcagaaaaactacactttgtatattatgagaattagtggtcactgttgagcaaaacttctagagctttcttggcatgcctgttgggaagagaataaaaatgtgtcatcagagtacaggtgacagagtgcacccagcgccatgccccacctccctcttccagtcctttggcccacctgcggctcctgcctgctgtctttcttccggatcatctgcctggcccaccccactcacctctcttcttaaaacttaaatgtgatcacatcactgacctgcctacagcctccttttccctggggaataacgttcaaaggcctccctctgccattcacagccctgtagtctggcctcatcctgatttcgggggtctttcgatgctgtatagccctgcatcccctccggtgtgggcccgggcagacgtgcacacttccgcacacgctntggttcactcaccaccgtt

SEQ ID NO: 442997 - DNA, 321 bp, Homo Sapiens
  misc_feature (71)..(71): n is a, c, g, or t
gtgtggggaactaaaagaatcactttgtattcaagttgcacagatggtctttccaacaataaatggttgtnctcccatcttcccagctcctgggcctgagacaccaaaccaagacaattagcccatcaggaaagaggccattgtgtgcttcttagcatgatttatgtagcagggaggggctcggcaatgcttcccgtgattatagctctcaagtgcaatttccatagctttttcatcatcctgggcagctaggatggactgggatgctggacagagtggccatcaggtcatgtttcatcttctcgagcctgtggagccaaa

SEQ ID NO: 442998 - DNA, 412 bp, Homo Sapiens
tttttcaatgttgtaataaaatatttattaatttctctttataaaaatttgggaaaagataaaaggcaaaactacacatagaaaaaggtcagtgataagtgtttatacagtcagttttttctgatgtgtgaaaaaaactgattaaaaaatcctttgaggtaatatgaaagttcatgattctcattccatcaacatcactgtttgctaccatagcttcttagttgtccagctagattttatgctatgaactgatgcatgagatttcataaaacattaatacctcttttttatactacagttctttcactggtataccataaagtagtattacaaataaattatgactatacttcatcataaatagaaattaagaaagtacactttgccaaactgatttctgactcttttaaat

SEQ ID NO: 442999 - DNA, 466 bp, Homo Sapiens
  misc_feature (399)..(399): n is a, c, g, or t
  misc_feature (456)..(456): n is a, c, g, or t
gggcttgttgaagatttaaaatctttatttttcaaagtaacaatatatatgcattgcttttgtaagaaaatccacaaaaatactattatgttaaaaaataatttacctagttttggcagatgctgctgggcaggaaactctacagcaattactgacctgttcttcccttgctgcttgtgcttccactctctatagctgaatgctcacccttccagcttccctgactgctggggtggccaagtgataggagttctgcctagtgagatgtaagtggaggtctgctgggtggacatgggaagtttctggggaaagttaatggctcctgataaaaggagggggatacttctgggccctctacctctccttttcttccttctgggaatgtgggaagtgatgacnttgaaccagcagtagtccccttgtggacaacaagggcaataaggggtggtgcagcanaagggttatt

SEQ ID NO: 443000 - DNA, 595 bp, Homo Sapiens
cttatccctagggataaccactgccatttttttacaatttcaattttttatgattataaaagtcatacacatttaaaaatacttcaaaataaatacaaagtaaaaataaatgcttcatgcttaggttaccttggtacatgcaaggtctgagaccacatccatcaatgcagtttgctgcgtggattaccagatctctccaacattgacctcaattttttactctgagagcaaacagaatgggcaagggctgacctgaaatccttttgaaacacaagctggatcctagggctttgacctccactgctcactgccacatgggatccgtctctgtgccccactctgccccagccccactggccttcctgctgctgctcacacaggcctactcttaaggcctttgcatactctgttccctgcagaggcctctgcctctgaacaaatgtggggacccatctctgccaaggctggggaagcaaacagcccccactttggccttgtcagcctgtgtttggcaccattcctgtggttgggcttttcccaggtggttttcacgtggggattttgagctctggggaagctgggaagtttgttggag

SEQ ID NO: 443001 - DNA, 498 bp, Homo Sapiens
  misc_feature (253)..(281): n is a, c, g, or t
attcagtatgttttcaattctatcataattaaaagtctttgcagttgtaaatgccacctttaggttaaatataaaccaagcatctgtcagcatcaatgtaagagagcaaataatgccttaaatgctaagagagtaaaactcaaactgcattgaaatgagcttgtcatctcaatgaacattcataaacacatccctgtttagttctgtgaaagagtagaattaataagtacatatattttcacatagtgatttnnnnnnnnnnnnnnnnnnnnnnnnnnnnngcctttctttagagttgtgctaaacagtgtgatttttctaatgcacactgctctgtccccttctcctctggttcctgttgcccagaaatgtccttcctgtgggataggtcccggggagtcatctctcctagggaggtttctgtggaccacccctcctctgagggggctaggaccccagtgcttttaggggcacattgagtatctccccgtcataggc

SEQ ID NO: 443002 - DNA, 299 bp, Homo Sapiens
  misc_feature (21)..(21): n is a, c, g, or t
  misc_feature (23)..(23): n is a, c, g, or t
  misc_feature (34)..(34): n is a, c, g, or t
  misc_feature (141)..(141): n is a, c, g, or t
tttactgtgttgtgaaatacngnttctcttagtntgtaacttgtctggtcttttgactaaccaactatctaaagaatatagaccacacccctgcagggaaagggatgtcttactggagttgtatttggaagctttataagnacatctgagacgttctctagaatcaaaatatttgtctatatttgtttttgcagttttcttacatatcagaacctctggcagcccttgcaagtccattatattaaaagccaaaagccataaatatgtacatcatagttcaaagtataagtaccaagaac

SEQ ID NO: 443003 - DNA, 665 bp, Homo Sapiens
ttttttctgccagataatctttattttacacatttgcaacacggcaagagaattcaccccgtacatcaccatgatcggatcccccacccattatacgttgtatgtttacataaatactcttcaatgatcattagtgttttaaaaagaaatactgaaaactccttctgcatcccaatctctaaccaggaaagcaaatgctatttacagacctgcaagccctccctcaaacgaaactatttctggattaaatatgtctgacttcttttgaggtcacacgactaggcaaatgcaatttacgatctgcaaaagctgtttgaagagtcaaagcccccatgtgaacacgatttctggaccctgtaacagtatcttacgtgctccaaaggctgaccttctggaggctcaccgcctcatctggctgcttcctccaaaatccaaaaccttgcctcaaaataagctgtcctgtgggtgagttggctgttctgtttcattctgaccattctgactctgcccagaacgccgtcccacctgcagacaccctgctgccagaactccaacaggtccccgaggtagcgaggccaagccatgcccattcactcctgcaccatctcagtgtgctccctcacacagggcctgagatgtgtggggcccatggcctggcagtgaac

SEQ ID NO: 443004 - DNA, 2083 bp, Homo Sapiens
  misc_feature (1977)..(1977): n is a, c, g, or t
caccctctctgctcacatcacactatccatcatgaccagccacacacccaccccaccgaccaccaacaccgccgacctgaaaaatacttcgggcggtatgtgggttaccctcctacctccccatttggtttagaacataaagcaaatagacacagtcatactgtcactgctctggactgtgtggagctcgctaaagtcatggtcattgcaggaatccaagctggcagtccttctcattcattctaatcattgtatgtgcttcactacgggggggagaaggaaacgttagcatcatgtttcccatttagggcaggagtgagaggtctctcttcctgatttagatatgcaaaagctggtatgttcagtaggaactgtacatgtgttgggaggcataaagactaattagcaaccataatatggtcactaccctaatagactaaatgaaatcttgcaatttcaaattactctttctccatattagatttacccacagctatatttctgtttaagtactagggtgagggttttctgttactttgttttttaatgttgttccttttgaaagaatcagtcttgcagctgagtgaaaaatctgtggaatgtattatttgtcctctttacatgaaactactcatacttaagcaaaagtcagtcttatagcaagactgttagccctcaaacttgactctactgatctgaccatttccctctcatcgccagacaactgacgatttccctggttttagtctgcgtctctgctttaaagttattgtgatatccttctagatcatacacaagtctaacagttaattagttaacagtttttaaactaggtttgtgggtatttttttggtagcacatgtatgctattacatacaaatttttatttctaaaatataagatctgagattgaatattttcattaaaagctacagttttgtgaatctttgtgcttcaacattctttgcaagatgatacggtatttaggcatttgccttatttttgcatctcacaaacataagtgcaatagatcttttcattgaacagcaaagtaggattcatcattccatatgacttgagttacaccagacctattctgcccaatgcctttttgattacagtgtagcttgcccaccgcatttgtcgttttagatactttgctagccggccactttggatttcatcagacagtcctaacaatattgtctgaacggctgaatatgaatagatacagcagaggcactcctgatatatgatttttatccatgcgtcagtttttcccacccagtgtagcatcctaaaagataaagccagaagctaagctgccagtgaggctgtggattggggcgtagaagtggggagccattggggacctcacattacacacacgaggaggatcattaaccatgtggaaaagggcaaaaagcatgtgtttgccaacatctggataacttcatgggcctttgataaatgtatatatgtatatgtgcatgggctgtgtttcccgtacacctttcagccaaaacagatccacagtagttgttgagttcaagtacataaagtacataacaagcgaacgtctagtacaattcttacttatgtgtatgggatttttccctttgaggttgctttgttttgtcttacaaaggtgaaaattgtttgtaagtgaagtgagaagttcatatttctttggcttttttgtgtttttaaaagttactccttttagggagctggtctgatgacttgcttagcttggaaatccttgttttcagtgtgtcagagtcaaaatgtgtttatgtgagctgtcactgtggggaaccaattgctttgtcatatagctggttatgaactagtaacatgtttgggaagtcctactgatgttcctttggaagaaaaaatctgctggttttaacaacctgtgcttttgctatgtatggtatcccagttagttgaaatgcagacactgagatctgtttngagtttaggggtcatttttagaaaggggcagtttaaaagcacaatgtctcacatgggacaaagttccaaaatgccaaaattcttatttttttaaaaaagctagttc

SEQ ID NO: 443005 - DNA, 361 bp, Homo Sapiens
  misc_feature (323)..(323): n is a, c, g, or t
caacattctttgcaagatgatacggtatttaggcatttgcttatttttgcatctcacaaacataagtgcaatagatcttttcattgaacagcaaagtaggattcatcattccatatgacttgagttacaccagacctattctgcccaatgcctttttgattacagtgtagcttgcccaccgcatttgtcgttttaggatactttgctagccggccactttgggatttcatcaggacagtcctaacaatattgtctggaacgggctggaatatggaataggatacagtcaggagggcactcctggattttatggattttttatnccatggcgttcagttttttccccaccccagtgtaggcc

SEQ ID NO: 443006 - DNA, 488 bp, Homo Sapiens
  misc_feature (353)..(362): n is a, c, g, or t
  misc_feature (421)..(421): n is a, c, g, or t
tcaatttaaaatagggactagaaattatttgaagttttctttattacggattcaaagacttattttgaaagttggaaggagaagggagggaagagagcagaagggaagaaggtgtaagtcaagctcttgaatataactggtggtattgtgggcagagatctttagttcaaatccacgtattttttaaaagagagaaccggagtaggagcaatgatcagatgggtgcacagaccagtgccaatctgaacattgttaatggcctgtgacatgatgagcacaggaacaggcatgaagatattgccatacaattttaatttatacaagtattgggcccctccaagtgggttgggaannnnnnnnnnaatctctttttcttgagacagggtcttactctgttcgcccgggctgggagtgcagtggntgcattcacgggcttcactggcagccttcgacctcccccagcttccaagcattcctccccaccctca

SEQ ID NO: 443007 - DNA, 544 bp, Homo Sapiens
cgtctcaggaaactttttaatgaaagtgtcggccacggtggtgtgtaggtggctgagctcagattgcagctgctaagacaccagccacttaccaagagaaagccaggctgcttcaaacccagggcccaaggcaaaaaagcatcacttccggccggggagtctggaagccacgccttgtgggaggtcacactggcatctaggccttcgcctgcattgcagaaggagagccaggtccccctcctggagaacgctgcgttccccagccccacaccggctttgccaccacacaggctgttgaggcaggaggtgggtaagacgtagctgtagacccaaagcaaccaccagccctggggaccctgcgggagaggagcacttttagaacatgggaaaagtgtgggtcatcccatcatttaggacagcacacatccttacataaataaaaagtcgtatggggggaaggaggtttggggagggattaaaaatttgggcacagactttgttagactggtttccattttcaaggtaacagttgcacttcttgagg

SEQ ID NO: 443008 - DNA, 535 bp, Homo Sapiens
ttttttttgctgtgcagtagtatttattgttacagtgttaaaattcactctcggggaagcgatttggggccacggccctagaaactgcatctttgttcagagccaacccatttcctctgcagccacaaaatgcctttgtgtgtcagggctcgggagattctcctcgctggccagccattggcaagaatgccagactcagaggttgccattgcccacaggctttcttctcctttcctttcacagcaggaagagccctccggagcctcgaaaagcagagtggaagtggtggtgcccaggacgcatgggctctgatgggaagagggaggtgggcctgagcatgggccttcttctccccaggtcagaggggcctggatgcccctggagggaacactgaggtcacctctggccaaatcttcctgttctgccagtacccagccctgttcagtgacgtcaagcttttgggtccctgtcctggggccctccacgctggccgggctgtgtagagacgcccttctctccactttattgggtccag

SEQ ID NO: 443009 - DNA, 472 bp, Homo Sapiens
atacaagtgaaatcatttatttatctattcattttcatttattccatttattgagtgcttttctatactgtggatagttctgagtactggtgaaataaaagcaaaaacacacagtccctgctctcaaggagctcacagttaagaaaacagatatgtaagtatgctactgtaatatggtgttatcagcactctaataaaagtatatacaaggttagtagtgtctccatgatgggtaaggaaagggtgtttctttaaaaataatcagacccagaataaggggggaaaccctccatgtctacaggatgcagtagagatcttgggcattccagagacaaagaaaggtgctgcaacttctggacataaagaagttccaataaatccaatcttacatcataaagactaagcttaccatcaccaattcatacattggaagttcaagaaccagatttcccttattcagttggtggtctgt

SEQ ID NO: 443010 - DNA, 382 bp, Homo Sapiens
  misc_feature (21)..(21): n is a, c, g, or t
  misc_feature (48)..(48): n is a, c, g, or t
taacaagtgaaaatccatttnatttcatcctattccattttccatttnattcccatttcattgaagtgccttttcctatactgtggatagttcctgaagtactggtgaaataaaagcaaaaacacacagtccctgctctcaaggagctcacagttaagaaaacagatatgtaagtatgctactgtaatatggtgttatcagcactctaataaaagtatatacaaggttagtagtgtctccatgatgggtaaggaaagggtgtttctttaaaaataatcagacccagaataaggggggaaaccctccatgtctacaggatgcagtagagatcttgggcattccagagacaaagaaaggtgctgcaacttctggacataaagaa

SEQ ID NO: 443011 - DNA, 614 bp, Homo Sapiens
  misc_feature (486)..(486): n is a, c, g, or t
atctctgaactccaaacccagggctctttccagccttccttactagtctccctgtcctcagattttcctgctgcctaattaatgttcttaaaacaccaaagtagccccagccttcatcgcgtctcatctgctctgaaaatccactttgactatttcagtccacagaactcactctcctctgaactcctatagcttattgtcatattattcaactggcactaactcagaaaatgcttagtgagatctgtctttaattatgaaataattttagtgtctatttagaagacactgtgcccggttatgtgagactgctccagtactacttaaacgtaagttttattcagttctgcaaatgcttttgacaacctaccatgagtcaggcaccatgctgagagctgaagacatggtttctgccctcaagaatctcagtctaatgggaatgtggatatgtaaacgttttacagacatatgtgtacaattggtcantcattcattaattcagtaagcaaactcaatttgcaggccatgagagataagtaaaatacggtccatttcttttaagtaacttgcagtctaggatcaaagagagacgtgaattttttcattcattaaat

SEQ ID NO: 443012 - DNA, 701 bp, Homo Sapiens
aataaaaatcataactaacatttattgagtgctaactgtgtgccaggcctttattaactcatgtgatcctcaaagcgaggttggctctgtcattgtcatcgttttacagatgcagaaactgaagaacagagaacttagatagctcatgcaagatgacaacacagcaggaggtgacagacactttatttcgttaccgtgagataatatttcaaataagtgtatgggaaagaaagttagaaaggggaaaaaatggcagccggaaagataagggagagccaggtgaggtcccaactccaagtacaccatgggaggtcctaagcaagggacatgcagaggggagatctgagcttcccagcaaccaaggcaaaaaagtgtcaatcagtcacactcttcacaagtgcctgccagagactataacccacatactcatgaaagggccagacagccctgacgttaagatctgggagaaattttaggagaggatcctatgcctcagcagttcgtagaagtttcagaggctgtcagaaaacatcccaagtgttagcggtagcctttccctccagcagtggtcagtacttaaagcatttctgttgggtgacagcaaagctgttagcctctctggcctcatggtggggagggactgctgtggagactccacaggaaggagggagccaacagcgctacagggaggctccttctcc

SEQ ID NO: 443013 - DNA, 456 bp, Homo Sapiens
  misc_feature (20)..(20): n is a, c, g, or t
  misc_feature (29)..(29): n is a, c, g, or t
  misc_feature (35)..(35): n is a, c, g, or t
gcattttatttaaacatttncatacattnaccatnacatgaacacattcaaaatggggaaatgccacagtttaacggttcaaacagctggccttacttcaaaaggaacactatattcatattaaacatttacagtctttccatctaactttacacatgtcctaaatcattttccagcacttctcacatagaagtctagttttgctctttaaaatcaccatctgtatcacccctagtagacgcgagggtttccccaattacatgctgaagagagccagccaccaccccacctaaagacatccaagcagctccagagcctgcctccgaggccaccccttcgccacggcagtctcgattccaaggattatctgacactagtgaaccagcactaaaggctgtaggatgtgactacatcacagttccagaaggaaggggaccatggccaagagaagcccta

SEQ ID NO: 443014 - DNA, 679 bp, Homo Sapiens
ttatgtataaacaggtaccagttttgattttatttaatcatttcatacattaacatacatgacacatcaaaatgagaaatgcacagtttaaccgttcaacagctggccttacttcaaaagaacactatattcatattaaacatttacagtctttccatctaactttacacatgtcctaaatcattttccagcacttctcacatagaagtctagttttgctctttaaaatcaccatctgtatcacccctagtagacgcgagggtttccccaattacatgctgaagagagccagccaccaccccacctaaagacatccaagcagctccagagcctgcctccgaggccaccccttcgccacggcagtctcgattccaagaactgattatctgacactagtgaaccagcactaaaggctgtaggatgtgactacatcacagttccagaaggaaggggaccatggccaagagaagccctaaatgacagaagctcattaaaaccaagtgccccaaacctcctgaaacatcgttagcaaggagctactgctttcctttcttaaacatgttttgggcatgaccacactctggaagtggtgaactgttacacatttggtgtgtgtgtacataacatcaaaaactactgtgtgaaacttgagaatgtctgattaaagatttcaatgtat

SEQ ID NO: 443015 - DNA, 593 bp, Homo Sapiens
ttttttttggaagtccacaaggcattttattccacaggaagaaaaatgatgactctgatatgagaaccagactcaagagtcttcacacactggtgactgtaatagtgtttacataatagagaaccagatatttttagaattttatcaagcagctactatggtattttgaggcccagatcatacttacaaacaaagtggccctggagccttcagaacattgcgatgagcacccaccaagcagcaagacactcttgggatttggggaaggggccgcttgtctgttttccactgtgtagtgaccaggcccaggggctggggaagcactggcctggctcacccttcagtgagcacagagaagcagcgacagccagggagtgacacgggtcggccaactgtgctgggtcaagggactgggtagctttggatatctccttacccaatttactcttattccatttattttactttcctcagagacgaactgtgtgtttgaagcagaaagaaaagcagtagaaatgatcttaacaaagtcttaggcattgctggctgaatatcagtttacaaagagccagtgtggagagaggggtaccgag

SEQ ID NO: 443016 - DNA, 377 bp, Homo Sapiens
  misc_feature (46)..(46): n is a, c, g, or t
aagacaaagttacctaaatgttgaaaaacccaaacttatcctgggnagtggtttttgaccctcccatccctcctgccaaagtggccctaaaccctttatggggtgccccactcctggtggagggcaggtggatgagtggattgtaatttataataaaatatatggcagaaacacaggccttaggagattgcacaggcccctctatcagttcaagtgacatgggacagcaccacgcagggacgggcaacgcgtctagcaggccaggcgtcttcatgcacaaaggctaaacttgttgctttaaccttttctgaacaaattttaaacattctggcaaatgtcaagttttgaagtttttcctgtgggttctggcctctttc

SEQ ID NO: 443017 - DNA, 757 bp, Homo Sapiens
  misc_feature (55)..(55): n is a, c, g, or t
  misc_feature (725)..(725): n is a, c, g, or t
cttcctttccctaaaatggaaaaatgtgctttaaaaaggaaattctgcctctgtnaatcctgctgaaatggatgcaatctcaagtgcccaatcccacccagggcagcggcaatttccccacctgccaaggcttccaggcttgggcaaagagatggcacccaaaggcatgctgtgtgtgggcagtgagctcgagtggcacagcccagtgcctgcctggaccgcaggtctgggtttaggaagggctgaagtcgggggaggtgtgaagctgggcaggtggccacgttcttattgtcagccagctcgcactcttgcccctagactagccttgtctgaaggcagcttcagagccacttgccaggctgagaactatccgggctcagtgctctcctatctgctgcccctcggtccccctgcctgccctctgccctgagacaagttactaaatgttgaaaaccaaacttatctgggagtggtttttgacctccatcctctgcaaagtggcctaaacccttatggggtgcccactcctggtggagggcaggtggatgagtggattgtaatttataataaaatatatggcagaaacacaggccttaggagattgcacaggcccctctatcagttcaagtgacatgggacagcaccacgcagggacgggcaacgcgtctagcaggccaggcgtcttcatgcacaaaggctaaacttgttgctttaaccttttctgnacaaattttaaacattctggcaaatgtcaagt

SEQ ID NO: 443018 - DNA, 603 bp, Homo Sapiens
cctttttttaaattaaaaaacaatttattgaaaaagagtaatgctttatacaaattcccattataaaaccccaaaatgtctattggtctgtttccaggtgtggtagaagaatataaaaagatcaaaattggataaattctattgtaacaatttcgttggtcattttgggccataaaatttttttgtaatgtttggtaactgatatccacatggaattacactcacacatcatgaagatctatgtatgtggcaaaagccatttaaattttaacttccaaaagcatatattctcaggtttggaaggcacactaaaatttattaggtccaattcctcataagacacggtggctgactttccttgtgtagtttattatgaagtaccatttccaaactaactatcctagcagcgtcagctgccagctaacagcaagagctctgagggcatcactgaacagatagcaccttatgagttattatgattcaaaaatctcccttgctgttggatttaccaacacgtaggcttttatttcttcgccattacatgcgtgtttagccacagaaagcatcgggccatactcactgcagaagataagacttcctccc

SEQ ID NO: 443019 - DNA, 377 bp, Homo Sapiens
tccattgcacctttattgtttattctgttcagtgttcagaattttcatacagtctttctagaatcacacagagcctactgagtagctccttccccctgacactgctttatttctaaccagcctcctctcatcccttatccttagtgtatgatattctgctagtgtccagggagttcccagggttgtttttacaggggagggagaagggtgtgcggtggtatgcctgcagctttctctcctctccacctcctttcttgttcagcagcctccggacccccaagggctaaggaatcagacacattgggtttggatcttgactccactagaagccatgtgatctcagggacatttctttgacctctctgagccctttttcc

SEQ ID NO: 443020 - DNA, 818 bp, Homo Sapiens
  misc_feature (75)..(83): n is a, c, g, or t
  misc_feature (308)..(308): n is a, c, g, or t
  misc_feature (597)..(597): n is a, c, g, or t
  misc_feature (697)..(697): n is a, c, g, or t
  misc_feature (794)..(794): n is a, c, g, or t
ggggggaaaaaacggttttcccccaaaactttaagggacccgggtgggggcacccccgggccgggttttcccctnnnnnnnnnaaattcccccctgggggaggtaggccttttttctgaaagcaaagaattgttgggccctttcaaaactgttccacactttccaaagcggaccttttcatttctgttagcttccccttgaggaagatatttttcaggggagctagttaaggatctcttagctttatttttcagaatgtcaagtttgaaccttccactgctgtttgcattttctgggattgtactatntgaaatagtagaagggccttccccgatgtgcacgtgtgtcttctgcttggcttcacacagctgcctcaggtgtaaaatcacaagttcattttcttcctggtcactgactggcttcattttctgaactctttcaaagatgtcagcttgctcattatctgtcagtgatgagagatgcctctgtatcaccagcttggctcttggtgggtagagaccttcaatcctttcacagagcttatgcaaagagtgcatcgggcaggcctcacacagtttaatctgcgtcttggcactntgcagggcagccgccgtactgaaggcctgtttcagagtcagcattacctcatcaaccagagattcgctggcacactggaatacataacaaatatactggntaagtctaggctctggagactcccggcagataaagccaaagtgatccacatgctttataccctgagaacaagaggagatatctttaaaattcttttntagcacaactgatttagtgtctgg

SEQ ID NO: 443021 - DNA, 1210 bp, Homo Sapiens
gcttttaattttaaaacatttattttgcttcacatatagaaccaggaaagaaatcacctccccaagtcgacagggcttagacagactggatgaagcgccccattttgccacattgtctccaggctggtctctccagccacacattaagccagcaagatggcccttttagtcacattcatctccagcatagcagggagcaagacaaggaagtgaaagggactgcctatgagcccaggatcttgccctcaggatgggacggaactggggttggtgaggagccaaccccacctgtctcaagcctcaggctaggaacagcacttggctgcaggccaggaccaagagccaggataggtgctgctgggctgagaaccaagaaaaccagttccctctttttggaactcggaaggggtggaacaacccagacccattcccttctcagatcacactctatccagactgctgtacagtgcggcccaaagctggaattctcagaacacccccatttttgccatgagcagatctggattctagttcgttttgaccttgagaaagtcaaattgtgttgatctttttaaaaacaaaggggcggttttcagaaatctataagcttccttctggctgtaagaacttagcactctgggctccctgcttcctttaaaactcactgggagatctgggaaagggaggctgagacctctctcctaagggctgattttaccttcctgtccctcatgaaagaacgggctggaggacgggaataggacctgggccagccactctccaaggacacaagctggatccagacaggaagcagcggcaagtagattgcttctccccagataggtttgtttcacaatatatttaatacaaaatggcagcagccactgtgcagttataacaaaattagccatagggtatctggagaaatgtacacaggcagcctcagctggagtcatgcgagccaactccggcctgctcgggtagggcctgtgcctgctgcccagtcagctgtgggtggtcacacggccaggactggatggtgcccgtggcagggcggtgcacaagggctcagaggtgctgtacaggaggagccagtcttccaacagtacacaaaagcacgctgtcctctgctctgccccccctgcggactcagcagcatgtgtgttcatttattttattattattttttgagacagagtctcactctgta

SEQ ID NO: 443022 - DNA, 736 bp, Homo Sapiens
gctattaacgggacaatcactgttcagaaatctttcacaagctcaaaataatcaaacgtagtcaattgcagtagaaatttccacacctgaggaataaattgcacataataaagaggtactaagatccagatggcaaaagactccagacacatagttttacatgcaaaaggcaatcagagaaggcaatgaagcagtgacattccaagacagataagagtccaaatgagtcaccattcttttgcgctttcttttctggcttcattaccaaagaacatggttatttgtgcaatgattatgatatgttctttagggggaaaacggaaatacacggggttgccagaaactgaaatgagcttgtttcaggagcttgacacctccagaggtgtcatgatggctagaccagtgtggcgatggtcctccgaagctcctcctggcctccctagggtagcagaaagtggcagatgccggcagaggttgaaggccaccagctcatccaaaccctttccaaagtggcctttcatacaggctgtggcagttccagcctctgcagttgtttttatctggtggcacttgattgagaaagtcatcctctccctttataaaaataaagtttgggcttcttgtaatactggcacaaaggacactctctattcccaggactgattccatttactcagaatatacgagactaggttctcagtttcttctatttccctgtaaaaagtgacctcaactt

SEQ ID NO: 443023 - DNA, 499 bp, Homo Sapiens
gttttgaaaagtgctttgagaatttactgtacagtttttttaaacaatttatttatatgttggcttctacatgctcttacattcgtgtaaaacatttatacatattctttacaatttgtacatatattaaatggctatagcataaacattgttctatgggattttatagaagaaaaatcaagtggggagaattacttatgaaacattaacaaaaacccgtgatattgaagaacaagatgttctcatattcatttgatttcatctacttatttttggtgtcattttattgatgctggcccagactttccatttcccgtaattattaggtcagaaaaatgaaagcagcgggagggaacgcggtaaggcacctgtgggagacgggagcgctcctccgcaggggtgagacggtggctgccagtgttgagttcgagctgacggtgtgccaaggtcctgttttgctttatgccgttaagtgaagcgctggaagtgctggtgctca

SEQ ID NO: 443024 - DNA, 498 bp, Homo Sapiens
  misc_feature (406)..(406): n is a, c, g, or t
  misc_feature (425)..(425): n is a, c, g, or t
  misc_feature (432)..(432): n is a, c, g, or t
  misc_feature (439)..(439): n is a, c, g, or t
  misc_feature (472)..(472): n is a, c, g, or t
  misc_feature (483)..(483): n is a, c, g, or t
aaacaatttatttatatgttggcttctacatgctcttacattcgtgtaaaacatttatacatattctttacaatttgtacatatattaaatggctatagcataaacattgttctatgggattttatagaagaaaaatcaagtggggagaattacttatgaaacattaacaaaaacccgtgatattgaagaacaaggatgttctcatattcatttgatttcatctacttatttttgggtgtcattttattgatgctgggcccaggactttccatttcccgtaattattagggtcaggaaaaatggaaagcagcgggggggggaacgcgggtaagggcacctgtggggaggacggggaggcgctcctccgcgggggtgaggacggtgggctgccaggtgttgagttcngggcttgacggtgttgccnaggtccngtttttngctttttggccctttaagttgaaggcgctgggnagtgctgggtngcttcaggaaacatt

SEQ ID NO: 443025 - DNA, 1721 bp, Homo Sapiens
  misc_feature (185)..(185): n is a, c, g, or t
  misc_feature (1698)..(1698): n is a, c, g, or t
ttggccccgggaacacaagggctttttcttccatgaaaaccttccccctttgggtagctcagccggccatgggccacccacccaaaggcgcagcttctgcacttctgtccttatttttccacccagtgccatcccaccaccagggtggccaaacagaagagaagggcagaggcccaccaagagcntgatgctgcgcagtctttgggggatcatcctccggtctccactggggacgaacccaggttctggagcctctcccctgacagacagcttgtcaccggcacttatgggtcctctgggatttcagacaatacccaacttctgtaggttcagaaagtgctttcaagcaggcagtggcacccacacccggtgggacacacctcctgggtccgaaaccactccatcatgtggctggtgtggccaccgtgcccacaggtcaggcagaaattggacgatccccgcacagccacgtgacagatggcacactggaacgtgaagcctttgcagatggcaactgcgtgccacggacctcactccggcagtggctgcagtacacgccgaactcgatccctttgtgagggtcaggaggacaggagacaaacttcaacacttcagctcgcttctctctcagaccccaacggtagaggatttccccatagcatttcttaaagtcatcaaattgctgggtattggcggggtccaggagccttttatttttatcatgctggtcgcgttctcgctcacggggatcactgtaggtcagactcccaaagcggagctcttctggtgaggattctccccaaggggaggacaagtgctctgcctctcttcccgctatgttccagccgccagtgttgagccctgggtctgacatactggagcaggaaccagaagaggtaaagctaggatatcgactatgggacaccacaagattagaagaacggttaggaaaaggcccaaaggggtttggtagcccctgaggccgagactgggcttcaaacacgctacagagcatcgccagtgtctgaacatcccggagccggcaatagtgagccaacagggactccagcagctgccgcccaaatggatgtcgagcccagggtgtttccaaatctgggtcagatttcggaccaaggcaaagatctgtagctaccgtagccagcgaccaaacctggacaagatcctttcttccaacgagcaaggcagaggcggcattcttctgacatgtttcctgaatatcattcacattcaatatgtacagctctcccagcgatttgtgaacaggcaggaggcaagcaatatcctggatgatgactttcccagcagccttgatctgtcgattgccagagtctgatccctcacgcttacttttccatcgtcttgatttccgctccttgtagtagaaggagctgatggagacctgctctttctcgctgcgagtggggctcccactgtataaacgaaggttcccaggggcctctgtgcggatcttcatgggcgcgatcaagccagtgtgataagcagacaaggctgagagagatctcggagtaggctctgtgggagacaccgcccgatgcattgtcatgggccttgtgaaatataccaggtaacctgctccgcagaacctggccccagaagtcctaggaaagggaatgttggccctcgtgccgaattcgccacccaggcctcgctacctantacgcgtaggtagctgccgtcgg

SEQ ID NO: 443026 - DNA, 556 bp, Homo Sapiens
tttcaaattactagaattttattagccaagggatagcagctggaggagaaataacaaaaaaatacatcttaagaatccttaagtacagtgcatatttacaatttaagtgtcatattttagaaggccactgtccatcagctcagtaaatgtaccagcttctaaagccatgatgccataggtccatttgttgatgaaattcctacccactgtcctcgggcatctgactctggtctctgcactggcatcaagagaacgctgctcggtggtttaaggctaacaccttacagggtaacactgtaacactggccctggagccaggtgcttttctccatgaaaacttccaccttggtagctcagccgacatagacaacacacaaagcgcagctcttgcacttctgtccttatcttcacacagtgacatccacaccaggtggccaaacagaagagaaggcagaggcccaccaagagcttgattgcgcagtccttgggggatcatctccggtctcactggggacgaacccaggttctggagcctctcccctgacagacagcttgt

SEQ ID NO: 443027 - DNA, 912 bp, Homo Sapiens
ctcgtggccgcctggtggcccccaggttcccgcgctctgcccaatgattcgcgagcccagggtgttcccaatctgggccagaatttcggcccaggccaagatctgtagctccggtatccagcgaccgacctggcacaagatccgttcttccaacgacaagcagaggcgcattcttctgacatgtttcctgaatatcattcacattcaatatgtacagctctcccagcgatttgtgaacaggcaggaggcaagcatatcctggatgatgactttcccagcagccttgatctgtcgattgccagagtctgatccctcacgcttacttttccatcgtcttgatttcgggaagtcgttaattgcttgtatggaccaacgccgccgggcagagcgaggagacatccgctccttgtagtagaaggagctgatggagacctgctctttctcgctgcgagtggggctcccactgtataaacgaaggttcccaggggcctctgtgcggatcttcatgggcgcgatcaagccagtgtgataagcagacaaggctgagagagatctcggagtaggctctgtgggagacaccgcccgatgcattgtcatgggccttgtgaaatataccaggtaacttgctccgcagaacctggccccagaagtcctaggaaagggaatgttggcgtcctggtacgacccgtaagccgtggtcgcccgcgcaaacgtcggtaaggggggagtgacagagttggggagtgcaacgggttgctggaagcgctgtcttcctggttcacaaggactcaaggcaggagacgagctggcgcaggcagggctccaggcagctctggccacgcttcactttctgcagggctgtgtccttcaggatcttcagcagcttagctttcatggtggatgtgatggttg

SEQ ID NO: 443028 - DNA, 467 bp, Homo Sapiens
gggacagagggcctggctatccctagaagcacttcatccatctttacccacccaaacgggatcccttcacatctcatacccagtaagatgcaagaaaggaatatctgagagcaagcagccctgctccaggggccccaggtatgtgtagaggcccagtgggggtggccacttggtgtttctaccaccccctgccatccagtctggccccagtacctacctgggaggttggtgtacttggcttaagtacttcatgctttattcaggctgcttccccacagcaccggcaggaaatgaaggtgcacttatatgcatccctgcaggaataaagagtgggtggcctgcccagcccagcaccacggcctttccccagccagggagagaccacctaaggatcaaggcagctcctgttttcttggttctgtgacactcgagtctgagccagcccctcaggaattgcctcaaaagag

SEQ ID NO: 443029 - DNA, 481 bp, Homo Sapiens
  misc_feature (27)..(27): n is a, c, g, or t
ggtctgaaatgtggctgcgtcccctgnccgtaattctcccaaccaccaagctcctccgggcttctgaggctccctctccctcccattggcttcttttgaaactccttggccctgcccccgccccctcggacctgtgctcagctgaggctgctctctggactctgggcaggacccacaactcccaagagtgcttcatgctcttgaaggtgggggcatggccaggatgaaggatgtggaattggagtaggaaccaaagaaagctgaaaacgaaactcccctttcactaactggaggactccttctcatcaatattttggttttttccttttagattaaaatttcccttgaaagggttttctcctctctggcaggggtctcagtgcaaatgctccaattatacctgctccagacctggagcgccccctctcggccttctccttgggaatctcagtagggccgggcagagggcaggagcgaaagg

SEQ ID NO: 443030 - DNA, 395 bp, Homo Sapiens
  misc_feature (326)..(326): n is a, c, g, or t
tttgttttttaatatgctttattctgcatattagtatcacattacacagtttggtcatggtatttgtaacctggagagaatactagtgcagtcggtcttcataccaccccattcacaaccagcttaaatggcagtatccctctgtgaactcaactacccctcctgtgggtccaggctgagctctacaggtcagcctcttcatctcagcccttctaggtcctgctgtcagggctgagctgtcacttcacttttttcccagagtagtgcagcatcctctctgaaacctgagctatcatgacattttcttttttaattttataattttnatatttctctaatttttgattttaggagacagagtctccattatattgccgagggtgaccttgaactcc

SEQ ID NO: 443031 - DNA, 2678 bp, Homo Sapiens
gcgggtgaaacatttttatttagtttcattacagaggttaaatagacttttatgacatccatacaaaatatagcaatggttgtgggcataaataagaattgttctaactattctaactgattttataatgcacagctctttcagttgattacaaatatgaagtatatcacctcaggatgcagagatttttgaattctatttagcaatttccaaaagctgaagtctagaaccgaagacacatataaaaagatgatttttaaatggaaccagccaccttgaaaaatattttgaaaaacatgatttaaactttagaaaataaaacttttaatacttaagagataacatgatgcaaacgttgcttgttggcctgactttccaggactaagaccctctgggaatcaatggggctcggtgacatggcgtaacctgctactggggtgtggtctcagacacaaaatcacactggatgttggtctacagaggcaggattctctcattgctggatgactcttgaaatgaagcctttgcctttgttacacatttggctttacaatcttcattgacaaatagttcggcaaagagtagaggagcacggccacgaagagcagcaggataagcaggaacagcaagccgatgatgacccacttaaagcggcgccacacgatgaacttcatggtcttgcatgggttggtgaaccagaggaaggaggtttctggtcgatttggtaagtccagcttggggttcatgttgggttcgtcccgccctttcccggctggcctctcgtcggccttccttctcgttgaggatttccaatgtcatctccacgtttcccagccattacgcgggcgccatctttctctgcgtagcatggccaccatcctttcatggacttctgctcaaagagggaggctgtcttggctttaagggggttcatggctttgaggtccggaatcatgtcccaacctgcatttctctggtgattttgcaggaatgatcgtgtgacgcaagtcaagttctaggaaacccaagtagtcatccagagaaaacttgtcattgtcccatatctgaatgatcagcctgggtgggattcgaaattccgtttggtcaatactccagaaatgctcttttttcgcaacgatacagagttgttcggctggaaggtagtcaaacgggaaaacaaatcgccagttaaaattcccttcaccatccaaagatctgtaatggacatctgttttctgtttgttttcttcattgccaggaatccagcctttgacgtagatgtcactcatttcctctcctgtgatgcttttctcgtccaagataacgtccttggtgttccagatgatcacacgcaggtagtatttcttggctttccggggtgtgatgttgaaaggagggcctggtggccccaaactcttggggaaaacatccacccacatctgaagttttccctgggaaatgttgggctggaaggtgctgtgcaaagtccttgtttccacgtgctcagggaccagcccctgagtcctgaggatgtgaagagcaagccgctcttcaggggccccgaggtgctggtgcaggattttgttggcttcaaattcatccaagctgtagtctcgtcctccatatctgattctactcccatcttcggaaaggatgggttgtgggaagcctttgaatctggcgacattttgaagcagctgtgttggtctcagttgatctcgccaggtattgactccagaaacacagtactcctctggtatgccgcagtgggacccaaagcgggaaaggaatcggttttccagatcaataattgtttctcctactttttcatcccgggtaaaggtgtcataatcatagacagaaattttcaggtctttttcttgaggtaagtagcagctcagttcgtacatcctgccaaagactgggttgagagtttatgggaatgttagtgatctcggtcttcgatggactttgtgttgcccagtgttatttttatgtaaggggtcacacaggccattgttgtcctggggctggagctcttaagcctcgaacgatgtaaatcctaaccgtgcattcctgtgggacgctgtcaggtaattcccgaaactgtctgggaggggctggcacgctggggtcatccggcagagggtagatccgaaaggagcccttagaactctccaaccacagaaggatcttcattttcatccgacttgcctcggtacaacttgaacgtatctgagaagtctgtcaggccctcaaattctgctacattttctagttcacaattatatatcttgagcttggaatagcctttctgaatatactgtccgcatttttcatgttcccctgaggaagcataaaatttactccaccagtccacgatttcttcctccttttctgtcagcttagaagccagtaatggtttggtgtcttccatttcgataacgatgtcccggcatggtggggcagacagaagggaggctttgagctgtgggacgatgtcctctttccctgcataagggtcacagcgaaagcggtccaggcgctcgatggtgcactggccgacgacaggcttccgcccaactgcctgtggtcgatgaccttgatcaccagtgggggcatgtacattcctccttgggcaagacactttcatgaagagacagaacttggaaagttgg

SEQ ID NO: 443032 - DNA, 1093 bp, Homo Sapiens
  misc_feature (54)..(54): n is a, c, g, or t
  misc_feature (218)..(218): n is a, c, g, or t
aaaaacacaaaaacccccaaaataacacacgcccattttgtctcgccttacagnacaggggtgctcgagtctggtctcagtgctgacgtggagctaagagagagaaaaggtggctggttagtcagaaattggtcattggcggcagtttccagagtccttgcaatggctttatatgacgatatcaacaaccctgtgatggagttggttggccatgaaantagctatgaacaacggggaaggttatcagcagaacagttcaaaccttagacgaacattttgatgtagaaacacaaagaaacaacatatgcccagctcggtcccagtcagtggtggagtgcccacgtgcaggatttaagttctgagttcaagaactacctggctatgattttgagctgacagcattataggtagctgggatgtagtggttttcaatactgagtatgaggcaccagtggccacctgctccatctagagaggtatgggttcacagaggatgggcagtggaaaagagatgaacattaagacaccccaacaaaacccgcaataaaaatcaatctgtgcaaagaaatctgagaactgtgcagttgtgccactttggtgtcagcctgtgctcagagacatttgtcaggtgagttctctggagagatatatgattaagtatgtcaagggataggatgggcttctcactaatgccaattgagcactttatccccaaggcaagtgatttggtttcaaagggcagccaaggagatgatgtctgaccaaacgcagacatgtgaacatcgtacagccgccctctgcagagggggcatgaagatgtcaggacttggctgggcacctaccaactacgaacttggtgtgtgggttcagagaaggtttttgccagccccagaagcaaaagtgaatcacagaacctttcttgcttattctgaataaggccttttcagagactttattatacgacttcattctaatagcagtagttatcaacctctagcgagcatacagaatcacctagaggattgaataaaacagatcttctggacccacccccggagcttctgacatcgtcggcccgaggtcggggctgacc

SEQ ID NO: 443033 - DNA, 847 bp, Homo Sapiens
attctgaataaggccttttcaagagactttattataccgacttcattctaaaagcagtaagttctcaacctttagcgagcatcagaatcacctagagggttgactaaaacagacttctggacccaacccccagagcttctgattcagtaggcctgaggtggggcttacgaattagtatttcgaagaccttcctaagtgttgcagatgctgcttgtcccggggaacacactttgagaactattgttctaaaatgttctctcctttcttttaaaggagagacaggaattccagagaaactgctaatttaagcataatgtattgaataggtcgcaggcttttttaaaaaaatcaaatcttgaagcaagtagaagattactttttctttttccccagaattcccaaaggaggtctttaagggccctctaaagagggtccttgggaaaagactatcccagtctctttatcctcttgtctttgatagctcttttgcacttcagcttttcactgagtgcaaaaatcccaactcaacttagaagagcctgtctcctttcacatgaccacagaaggctacatgcagaacaccaggtggccagctaaggcaatcaacattcagaaaaaaaggagagcaaacgtttgcaagcgcactttaagcctgtacatttaaagctgaaggcctccaaacaacttgatgggggaacttgtgaacgagcggtgctgttaaagacatgcttcctaaagccaaaacgagaggaacaagaccatggaagagcagagataactttagtccgtttggggatcttatggcacctgtggtttataaacagctttagtaacgagtatttcaaaa

SEQ ID NO: 443034 - DNA, 474 bp, Homo Sapiens
aaaaacgtcccaaccgggatgcaatgtaaacaatgcagaaggaaggtccagccgcggggctgagcagggatgtcccaggtaggctcctgccttatacctccgtggcaatgacacattcattcctctcctctgatatcaaacacacagactggtacatggagtccctgggggagcatatcgctgatatccgacactctggcttttcactgtgtaaccgcagtggcgccttctctcctaagctcttgtcactgtggggaaactttcctggcatggtcccccgccccaggggccctggggccagattatagtccaatgtgtggttttgctgtttgccacagttggacttgtccaggccacagtccacttccagctccttcttctggtttgtgtttttaagctgggcggcaggaatcaggttgtccttatctggtcaccaacctcttaactggtctttacttttgctgatgctgccta

SEQ ID NO: 443035 - DNA, 2902 bp, Homo Sapiens
  misc_feature (355)..(357): n is a, c, g, or t
  misc_feature (396)..(396): n is a, c, g, or t
ggaatgtggggcccaaaccgttccccggtgggaagcctggggcccaaaggccactttttggaaaaccaccggatgccccaggtggaggccacaagcaggctcccgggcccccatggggcttactgcccactctttttttggaaaaccaggccggagcccccggaaaggagcccccctgaagggcccactactggcaggggcagtgcccagtggcatctctcttctcttctgttcctctgggttggtgcagctgcccaatctgatgcccagacagacaccccaaaagtttgtgaagggtattgcatctcttggcaagttcacagtctgtccggttcctgccattccctcctcctcnnntgagagcagcacgttgcatatgaaaaacgtcccatccanggatgcaatgtaaacaatgcagaaggaaggtccagccgcggggctgagcagggatgtccaggtaggctcctgccttatacctccgtggcaatgacacattcattcctctcctctgatatcaagcacacagactggtacatggagtccactgggggagcatatcgctgatatcccgccactctgggctttttcactgtgtaacccgcagtggcgccttctcttcctaaagctcttgtcactgtggggaaacttttcctggcatggtccccccgccccagggggcctggggccagattatagtccaatgtgtggttttgctgtttgccacagttggacttgtcccaggccacagtccacttccagctccttcttctggtttgtgtttttaagctgggcggcaggaatcaggttgtccttctggaagtccgacaagttgttcatggcttccctgctgccgtcgtccggccgtcgaagccgcagctgccgcacagccactgccaccatgcccagcagtaccagcagcactgccagccccacacccagcgagacggccacccaggggaagctgggcggcaagcccacggggaactcgcagcggctgcccacaaagccataagggcagttgcacacaaaggtgtctgtggagaggtcggtgtagcaggtggccctgttgaagcagggactcgaggcacaggcatcgatggatgtccgcacctcacagcgtcggccagagaagccggcagggcaggtgcacatgagcccattctccaggtcatggcaagtgccaccgtgggcgcaagggttacgggcacagtcgctgacgtggagttcacagtaggtgcccgtgaatccaggacggcagcggcacatgcggcttggacctcggttcaggcactgtcccccgttggcacaggggttgctggtgcacctgtccactttcttctcgcagttggagccggtgaagttggggggacattcacaagcatagttggccccctggttgcgctcccggcaggagcccccattgaagcagggggagtcggcgcagctcaaggtgctgtgttcacaatgcaggccatagtagcccggaggacacaggcagtggtagccatcctcctggtccttacagctgcctccattgcgacaggggttgctgtcacactcgctgagctccagctcacagtccacaccagtgtagcctgggcgacaggtgcaggtgtagcttcgctgcccactgttggagcacgttgccccattcttgcatggggagtggtgggtgcagtagttgagatcttggtcacaaaacaggcctccccagccctcatcacaagtacattgccagggagtgctgcaggtgccgtggcgacagccattgtgggggatgcattcgttacacagccggccctgccagcctgggcggcagaggcactctgctggcttgctgcagtagccattctgttcatgacagcccgaaagacagataggctgttggcaatattccccacgtccaaccgggcaaggcaggacaagttgccatctggctggcacacatagtggccgaagtggtcattgcgcttcttgcacaggcgggagcagttgtctccatagtagttgtcactgcagatgacccggtaagagtagcgcagccttgtgagggtgctggtttgctcatccaataaccagttctgacccacagctagggagccctggatggcgatcttgctgatgagtgcatctggtggcaaggcctctggccgcaggtcgtctcctggcgcgtgccaagcttcgatgatgagcgagaaggtacccggccaggtgaaattgaagggcagtctggagagggttgcgcaccgccgccgcgtcgtgtcgtcccggacagcgaaaggagttggtgcccgagtaccggcgtggagacggtcccgaaggtgcagggtccgggcgagacgaccgcctggaagtgcttaaggcagacggcggaagaaagtccggcagcacggcgctcgcaaggcgcgcccactggcacagtacgccgcgctgcaggtggagtggaactccatgcagctgcaaggctggaagacgcgcggagccaggccagcgcgcatgcgtggccaaaggtgcgcacctagcagcaagtagcgctccagcacagaggcgctccgggacgcgtgccgccatcccctcgggcgtcgctctctccacccgcagggccctcaatctggcatctgttcgcgacgccgctttcccgcgcgtccgccagccaggcaggggtccctgaaaagaggcgctcctctcgggacgctgctcccctttggccgttctcgcatggctcacgctgcacgctgccgctgtaggtaactcacaggtgactacggctgggcggcgaccgcgccgaggacgcgtcttctgtctaatcctggggctgcaagcgggctagtgccggtgtacgctgcaccaaggcggctggggctgcggctcttggcctcgtgttcccggcctgcgcgcagcg

SEQ ID NO: 443036 - DNA, 634 bp, Homo Sapiens
ttttaagaggtattatcatcaacctgatcctttataggcctatatagtaacaaatgctaatttaactgcccagctcatttttattgtcagtctagcctcagcaagtataaaactgacaagacattgctctatgagagtgaccctcttagtgagagagaaatctatgtaccatcagaggaaataaatcttagtattcggtgtgatagagactaattcatttcttttgatgaagtcccactctttgagtgactttgaagggggagacaataatgtcaagaaggagtcctgcaggtacaagtgcttaagatggtgtttaatacagcagggagccaagatacagtagtaggacacagtaaagaatgtggagtgtgtagatacaataaagaattcattttatgatctgccacctgttacttgaaagaggagtaagttagggaaataaatgactcagttcttcatacatgcaaaggtaagttagttattacaaaagtttttgctgttgtttgtgctgaaagaaaagcatatgcatttaaacattttttaaaaaataaatcactcaataggcttaagaaaaatactttagttcatagttcattgatctgacgttttgatttaagatcaggggatgaatcca

SEQ ID NO: 443037 - DNA, 433 bp, Homo Sapiens
tttttttttgggtaaggaaatagtttattactgggtggcgggtgggggtaggggtggaaaacacagaaaaggagaggtccataaatatcccttaaggattccattcatgaagatgttggcaagggcaggggagtggtggggcggttatagcaaaaaaggtcaggcctcattgctgaatccaggtgtgtgtccggatgagttgagccacagcttagcttctaaaagcattcacatattgacctaagaatttgttacaagtccacatgcttgataactgctataacacactcgcatcttccatgggcctcgatccacctctgaggctgaattggtatcttctgctttgaagctataaaatagggttttcttgtgggtaaaggtgaaaaatagggtcctacttcacttgctggccctcttccttttctgggagcaa

SEQ ID NO: 443038 - DNA, 696 bp, Homo Sapiens; identical to SEQ ID NO: 151507

SEQ ID NO: 443039 - DNA, 458 bp, Homo Sapiens
  misc_feature (32)..(32): n is a, c, g, or t
ggtttttaaaggaaaagggattcccccgcccnccccaaacccaacccctccaagcaattaaaacatttttgggaggccccataatccaacagggacagaataactacttagtgatgatttacagagtgaaatattttactgttttgtagtaagcacattttagtaactgtacactagtacaatgtttttaagattttatctcatttttgtcatattagcctaaaatgtttatttttatttaaaaagtagccaataggaaggtaagattggggagaaaggtcagtaaatgtcacaaaagagactcctagtaacacaatctgagggagctttttcttttgaaataaagatggtgcatctgtccctttacagatttctctccctgtcccctgggactggggaaggtgaatctcctgcctgacaccttgtagagattagtgtatccagctattctattgcca

SEQ ID NO: 443040 - DNA, 1468 bp, Homo Sapiens
  misc_feature (39)..(39): n is a, c, g, or t
  misc_feature (41)..(43): n is a, c, g, or t
  misc_feature (78)..(78): n is a, c, g, or t
  misc_feature (144)..(144): n is a, c, g, or t
  misc_feature (151)..(152): n is a, c, g, or t
  misc_feature (154)..(154): n is a, c, g, or t
  misc_feature (160)..(160): n is a, c, g, or t
  misc_feature (169)..(169): n is a, c, g, or t
agccaaaaccaacaaaataatatttattagggctcgatngnnntttctgtggctaaggcttaggtttggtgtgcaganctggcctgctcttgtgggctgtggttgctgtgacagtttcgttttctgaatctttgtaatgctctnccacccnncncgtgcngcccagagntgatctgcaaacctgggcagtattccacactgaagctcagtttgcaaaccttctgctgtgttaattctggtcagtttcacacagaagtcacgagggcctctgcccaggaccttctattcacatttcaagaatccctttctgaaattctccaactctctggtcaggaggaggagcaccattggggcggggtaggcagctagaggcgcaggagcgaatccaggttccttgcgtggttcccagcctctgctgacagcacctcagctaccaggtggggagtggaaattcagcctgcttagaggactgacctctacagttcatatttgcagtgacataaaaggcaaagaggagctggcatggtggtacagaaggtatcagtcaagcgcaggctcttcagaaacctagaaactaaaaagagatgcaacatgtgactggccatcagccagacatgtctagggtgagaccagtgctcagcaccacccgccaaggaacactgatgagttgtgggacattatggtcggccaagtgaggaatgattgcagggaccagagaagaccaaagatgccagatgtccccagagtttcttgagggctgggtttcacgtctttgcttgtcctttttgtccccacttgcctgcaccgtgcctgactcatccagtggggaaggtgactcaagaagttgtttaagcctaggcctaggcagtccacttcgggaggtgggggcactccacactggggggccctgcagctccagggctggtgctctagcagatccgctcaggcacggttgggtgaccgtggggtcacgattgcgtagattatttctagggcagtgctgggttagaaatgtctgtctggaaacaggacacatcttgccaccacaagtccacacctggccttggctgctgcccgctctctgcagcgtggatttcctttgcccatttgggccagaaggtcaccaggagttcatcactgcttagtgtcaacttgacatcttcagcttccagacagaaaacccatgctttactttgtacagccctgtcccagagttagtaagcctcggcttgtcacctgcttgcaaagggtatagacatcattctgggtagttctagaggatatcgcaacaagtgcgtttgaaggttcagcacagctggaattgtacggtagtgagctcttcaaaatgaaaacagaatgaccggatggccatctgtcctgggaaactgtagaattgaataaatcacttgaaaataggaacacttcttgggaggctttcttcagaactgaactaggaaacaaggtttcc

SEQ ID NO: 443041 - DNA, 1172 bp, Homo Sapiens
  misc_feature (1123)..(1123): n is a, c, g, or t
ttctcagtggggggggcgggaaattacgagatggggggccaattttggggtgaaccccgcggggggagagagaatagggtaagtgcggagtaatcaaggccaggggggggaatagggcaaaaattggcgcccggcaacacggttgtgaggggtttccgctttgggggccaagggaattggaagggagcctgaggggcccaggcccagcgtcacgggggcgcggattccggtttgttccttttggccgccaagctcccccgccgacttgggggggcggctttaaagccgccccctgctccaagaggcagctgtagctccgaaggcctccggcggggtcccctcctcctctgagcatgcccgaggtcggcaatgcaggggcagtccggggccccttgcccccccagcggggcgcaccatgctgctgtaccaattcccacaaagggtggcagccatggaggggtccagctggcacaggcactggcacgggagttcaaagggggggcagtattccattggggggttcctttccagcggttattccccctaacactttcttccacacatcagggggtgcttgggacctcagcttgccattcccatctagctggagctgcagggccctgagggtggcaccccaggctgctgtaggaagggcttggaaaacggtgttgagctgggctagctggtctcctatcaactcagtcctcagcaggcgtgccacttcctgtccgccagctcagtccaaccagcctcctcatcatccccagccaccagctgggccttcagctgttctaagcctcggtaatcccgaagctcggtcctcaacatggtcagcagtgcagatgggggcaggtggccctggaggatggaggccagagcctgaggtgcccggaatgtgctgctgtgtctcagttcttctggagtgagctgggcaccccgcaggctccgccgctggtagtacccgcaggcctcctcaaacaccagatccttggctgaaggcaactcaacaccctgtggggcttcccagcccacacaaaacagacccaaggctgaaagcagacgaagattccctcgggtctccagctcttcctcatcctccatgccgggggctggcggttctagnagatgtaccctgtctgtacttaggaccttcctctccagcagctgccccc

SEQ ID NO: 443042 - DNA, 1614 bp, Homo Sapiens
  misc_feature (390)..(390): n is a, c, g, or t
ttaattatttgcaagcccgcgtgctaatttcgttacgtgatctacatggactctgagttggctgctgtgtggtgtggttcgcatgttcgtccctattttgcacggggttatatccgtggcatcatttcataggtcgtgtcagcttcaaaaaatattgctctctccttatagtaggtcattcccacagtggacgagggtccgccgtatgttttgtttctcgaggccagagtggttcttaacgtgacgggggatatcggtgagtcccctgaccttgggcgcgttaggagcccccagagtgacaagtaaacgcggtttgcgggagggcttgtctccttgagggatggcgtgggtaggcccggcctctcggaggtgttcgtttcgagtgggggngatattaaactatgtatatatttaacacacacatcttaaaaatagctccagatgacagaacagtattgcatacacaggtccatacatgggaccctccaagtcccaggcacccttccctgatcactgtgtcctagaaatgatttcctgtgtcagtgacacagaggaactgtccaagcaagcctccagtcccaagcaagcctccaggccctgagtgttctgatgcctgaagggtagtcataggtcccgaggtggagtcgggggtggagtgctggggtcccataggatgtcctcatatgggcttagaactgggcccgacagccatccttgagccccaagtctgctccaagcagggctttgagcaagcccacattgagagggggttctgctccaggctcagggaatggggttgggggccccacctcatctgggaggtatgtcctcagtagaagcaggagctcagctggagccagttctggtgggcacaggcggcaaaggagggggaggtgagcatcaagccggcggtgctgggcaaactcggccagcagcagtttgaagatttcacttcgaagcaggggactggaggggccgagggccaggccagcatccagagcccgatcccattgttccttttgcaccagctgcccgacagcttggagcacagctttaggccgcccactgctcaagagcagctctagctccagagcctcaggcctggtcccctcctcacctagcactgccagagctcggcgatacaggggcagtcctgggccccctgccccccagcccggcccgccctgctgctgtgccagctccacaaagggtggcagccatcgaggctccagctggcacagacactggcacaggagttcaaaggggggcagtattccattggggggttcctttccagcggttattccccctaacactttcgttccacacatcagggggtgcttgggacctcagcttgccattcccatctagctggagctgcagggccctgagggtggcaccccaggctgctgtaggaaagaccaagccgtggggcagccaccatcactttgcccttgcctgggctccagatgagtagaacgtgggccacgccaggccaggtgtgtacagccagtggctccctgggggacagcaacccaggaaggcctcggagcagggtccggaagtcccatgtgtcccctcgtccaggattcagactcttacttaggaccttcc

SEQ ID NO: 443043 - DNA, 476 bp, Homo Sapiens
  misc_feature (34)..(34): n is a, c, g, or t
  misc_feature (46)..(46): n is a, c, g, or t
cccgaaagctgaaataaaaataacctttccagantcccacctccangtttagttggatgtaagcctccactatttttttccctaccgccatgcattttcctaatgtttggggtggatggtgtgtcggttatggaaggcatagacgtcattacaggtgctacgatctcacacacacacaaggaaatgttagtctccttattttatgattggaaaatcaatgacctagaggcaaaatggcatgtttaaggacctgggatgacaagtcattctgcagtcagccacagagccaaatttggactcctcaaccagaactccatgaaaagcctgactttgccaaacactgtgctggaaaagctaagcccctttcatttgtgaagtaaattttaaattcaagatatttagtttagagaattgagtcttgagatgtaaactacatgagatttctttggtttcaattgaataatattcaccctcgt

SEQ ID NO: 443044 - DNA, 583 bp, Homo Sapiens
taatttaggaagattttattttttggatgttgtcagaaattacagcaatatattcataaatacctaattactacattcaacaaataatattacaatacaattaattcaaacaagtacacttagaacaggtttaatttcacagcatctaaactgcccccagagtgaccgaggcaccggtgttcctccctcccacctgcgtatggggtttactgttatagaattaagcacagggtacatacaaaataacaccagttagcatggtcttcctcaggtcaaggcagagttaaggagttttttaggttaagcactggatggaaaagttggggacaggctactgcaagtagttaaggaaagtcaacagcttggttacttggaaagaatatagagattgctaagtgggctaatatacactttaaagaggaacagaatcggtttgtgctgaccatctccatcttgtggtggatccctggcattttctacacttgtgtgaaacacgtggctcagggaaaggggtaggatctggtgtgaaattcagcttaacttttgagatttggcagtattatgagctacttgaggaaaatag

SEQ ID NO: 443045 - DNA, 500 bp, Homo Sapiens
  misc_feature (474)..(474): n is a, c, g, or t
  misc_feature (480)..(480): n is a, c, g, or t
taaaaattgacatgcaatctcttaagttttttgttcagctacttcacactgagtacctcaaatctgctctggagtcgattatgccacctgtgtgtcaggatgcacctgaaagccctcggttcggtcgttagcatcttcctacattacctggaagggagctgccatctgtccctctgcagagggataccttccaatagtaaattatctggttcctcactgaaacaagttatttttgcttcatatagtcagagtcagactgacatgataaaatatcatgttcctaatctgttgtctcagataagtgaccaaggacggggactttccacattttagtcttacattctaatctttaaagggattaaaggcacttgatttggggactaaccttctgatagggttgccacccttaagggtttttcgggggaggcttcaaaggggggcccacaccttccggccgttgaggggtttttaacncggggntttggcgtttgttgggcggt

SEQ ID NO: 443046 - DNA, 466 bp, Homo Sapiens
  misc_feature (413)..(413): n is a, c, g, or t
  misc_feature (427)..(427): n is a, c, g, or t
  misc_feature (434)..(434): n is a, c, g, or t
ggaagattttattttttggatgttgtcagaaattacagcaatatattcataaatacctaattactacattcaacaaataatattacaatacaattaattcaaacaagtacacttaggaacaggtttaatttcacagcatctaaactgcccccagagtgaccgaggcaccggtgttcctccctcccacctgcgtatggggtttactgttataggaattaaggcacagggtacatacaaaataacaccagttaggcatgggtcttcctcagggtcaagggcaggagttaagggagttttttagggttaaggcactgggatgggaaaagttggggggacagggctactgcaaggtagttaaggaaagttcaacagcttgggtttacttggaaaggaattattaggaggtttggctnagtgggcctaattnttacccnttttaaaggagggaaccggattccggtttgtt

SEQ ID NO: 443047 - DNA, 415 bp, Homo Sapiens
  misc_feature (25)..(25): n is a, c, g, or t
cggtttgtgcctgacccaacccccnacctgtggtgggaccccctggcattttcctacacttgtgtgaaaacatgtggcctcagggaaaggggtagggatctggtgtgaaattccagcttaacttttgaagatttggcaagtattatgagctacttgaggaaaatacccattctgctacaaactgcagattccctgtgttagaatccttcactgctgaaggtgtgggctccttttgatgctctctgaatactcttaagggtgcaacctatcagaatgttagtcccaattcagtgctttattcctttaagattagaatgtagactaaaatgtggaaagtcccgtcttggtcacttatctgagacaacagattaggaacatgatattttatcatgtcagtctgactctgactatatga

SEQ ID NO: 443048 - DNA, 410 bp, Homo Sapiens
  misc_feature (38)..(38): n is a, c, g, or t
  misc_feature (45)..(45): n is a, c, g, or t
  misc_feature (67)..(76): n is a, c, g, or t
  misc_feature (96)..(96): n is a, c, g, or t
  misc_feature (161)..(262): n is a, c, g, or t
  misc_feature (286)..(286): n is a, c, g, or t
attatattagggttggtatgctggtaaaaagttttctnagttttncttcatcaaagaatgtcgtaannnnnnnnnncatgtctgaagagtattttnactggatataggatgtgggttcacagttcttttatttaagcacttcaaaaagtacttccagtggnnnnnnnnnnnnnnnnnnnnnnnnnnnnnnnnnnnnnnnnnnnnnnnnnnnnnnnnnnnnnnnnnnnnnnnnnnnnnnnnnnnnnnnnnnnnnnnnnnnnnnacttgcattgggactgatcagggnaacaactcaacccacagagaatggagaagagcaggacagggcagggcagggcaacagcttacctgggagcaacatggatacaagagaacctacccctgccccgggaagcagttagtgaatatgt

SEQ ID NO: 443049 - DNA, 692 bp, Homo Sapiens
  misc_feature (143)..(143): n is a, c, g, or t
  misc_feature (644)..(644): n is a, c, g, or t
gtctttttccataatagcctttaatactaaaatgcattaaatttttgaagcagagaaaacacatttaaagggggaaacagagaaccaccagataaaaggaaacaatgtggcagataacaccatttgaaacataactgtaatantttaataaagctgctttatcatcttcataaaatagacagtggtgattcttttttgtcttttctcctttttacaatgattcaatcactgtgaaaatgtacataacatacagatcagcatatacaacaattttatcttcatataatcagcaacagagactgcttaatgagacatactgtacttgcatccctctaaatttccaccctggtttgacaggtaaacagtaatagtgtcatcaggctcattcccctcactagaggagcgaaggcgtaagcctattgcaactaataccttagcattcaaatagcacaaggaggtatttgttgctgatttctagctcgagctagtctggctcttggtcattaaagtctgtatcctagccttcctcagctgaacgccagccagtgccagtaaaaatctactttaaccagtgctgtaatggtgttagctggtttgtttgctaaggttgacagcaactttcagttagtaacaaggtcatcttngatttgccaacacagctggggcaacagtcagcatcatcagttttccct

SEQ ID NO: 443050 - DNA, 673 bp, Homo Sapiens
  misc_feature (191)..(212): n is a, c, g, or t
  misc_feature (424)..(424): n is a, c, g, or t
  misc_feature (426)..(426): n is a, c, g, or t
  misc_feature (569)..(569): n is a, c, g, or t
gtctttttccataatagcctttaatactaaaatgcattaaatttttgaagcagagaaaacacatttaaagggggaaacagagaaccaccagataaaaggaaacaatgtggcagataacaccatttgaaacataactgtaataatttaataaagctgctttatcatcttcataaaatagacagtggtgattnnnnnnnnnnnnnnnnnnnnnnacaatgattcaatcactgtgaaaatgtacataacatacagatcagcatatacaacaattttatcttcatataatcaggcaacagagactgcttaatgaggacatactgtacttggcatccctctaaatttccacccggggtttgacagggtaaacagtaatagtgtcatcgggctcattcccctcactagggggagcgaaggcgtaacgtantntggcaactaataccttaggcattcaaataggcacaaggagggtatttgttggctgatttctaggctcggggctaggtctgggctcttgggtcattaaagtctggtatcctaggccttcctcagctggaacggccagccagtgnccaggtaaaaatcttactttaaccagtggctggtaatgggtgttaggctgggtttgttttggctaaggggtttggacaggcaacttttcgtttaggttaccagg

SEQ ID NO: 443051 - DNA, 1041 bp, Homo Sapiens
tatattggtgagcccccccagggccagcctgttgtagagggaggctatctgaccgccggtctggcagaggagatgggtgggcagctcccagacaccccaaaggacccggttctcttcccagagcgtcctaaggttactcttggaacctgatctttgttccctcatcccagggaaatgacacactctgtatttctgttttatttagaaatgatttaaaaaacattatacaaaggctgatcagtttaaaatgtgactgacactgaaatgctgtgatgtcccccaggctgaggggaagctaggctctggggcccccagtgctttgcccctctgtctgccctgtcctggggtgatggacaaacagatgaccacaggcaggagaatctgagattggaagcctctaggctgagccctctgggcctggccccacatccctcacctctgcagcctgggctgcctgcctccatctcctgttcattctcagctggcctgccaggagccaatggggagcctggcgggaggcgggggtgcctagagctttcaagaagtgagagcaccaacctgaggagtggacagggaccaggaagtgggggaagggaggccaggaagaggtggatacaggagacacttctcatctcatctcagaccctagaggggtccacagatggggacacaagacccagccagcccactggatggcccgggcaagtaacaacctctctgtgcttcatctgagggcacggtgagagttaccgtcggcctcccagggcctaacacgagtttcatgtgagtggacaggtgtgagctaataaagtgctttgcaaagtataaaacactgtacaaacctatgaatcactaatatctccgcagttgttccctgcctgtcccagggagcctgcccttggccaaaatgagaaaaaacaaggatgatgacaggggacacagcggacccacatgggcacctctgggacaagagattttgcttgagacagctcccagggcagcaggagtccctgtctgtgctacagggtaagccgaccccaa

SEQ ID NO: 443052 - DNA, 505 bp, Homo Sapiens
agatcccccgtggagtctcaagttttttattttcagaacagagtctggttttatttttaaaaagagaaggaaaaaagtgataaatgctagtgaggtgccacttccctccttcttccaggctctaaccgccagctagctctctttcacaaaacccacggatgcagaatcaggacatgttaaaatggaacagtctttagagagggtctagtctttttaaaataagtaaggatttggggactaacagagaggaagcccctgacttgctgaattgttaggagcaggcggttctcgagattctgagcccaggatccttttctgtgaaccatgcacgtgctggcactggcctcaggagacagtgccctgccttggctgtcaggtccacggagaaatctcaggtttgccccttcactagggatgccctagaaagcaagggcaaaggaagctttaggggtcatcgtgactggggcaggggaagtgagtgcaaggactcaagaaaaacacagca

SEQ ID NO: 443053 - DNA, 478 bp, Homo Sapiens
  misc_feature (468)..(468): n is a, c, g, or t
acaagtctcaagttttttattttcagaacagagtctggttttatttttaaaaagagaaggaaaaaagtgataaatgctagtgaggtgccacttccctccttcttccaggctctaaccgccagctagctctctttcacaaaacccacggatgcagaatcaggacatgttaaaatggaacagtctttagagagggtctagtctttttaaaataagtaaggatttggggactaacagagaggaagcccctgacttgctgaattgttaggagcaggcggttctcgagattctgagcccagggatccttttctgtgaaccatgcacgtgctgggcactgggccttcagggagacagtgccctgccttggctgttcagggtccacggaggaaattcttcaggttttgcccctttcactagggggttggcccttaggaaaggcaaggggcaaagggaagtttttagggggttccntcgttgactt

SEQ ID NO: 443054 - DNA, 511 bp, Homo Sapiens
atgttcttcatggtaatctagaatttttatttgattccaggtaactttggacaatagacatgatgagatgttttctctttgaataagttaacagtttaattacattgaaataaaatatactgtgggcttaatacattgtaaatattacagaagaagtactactttgctatagtaatttaatgactgaagctacatttaataacaatcttaccagtacttgtatacaaagtattatacagattactaacgaagatattgcagtggttgcaacgatgttaccagctcaacaaacatctaacaatacaatattcttctaagggggaaaagtaataatgttaggatttacagacaataaagagtcatgtttcccgcttgaaacattggaaataaatttgaatccagatacaagaaaaggtttcctttcttgggaactctgatcccccagtaggccctagtacagtcaatttacatgaagatagcttttaagatgccacggcaatgtaaagaaact

SEQ ID NO: 443055 - DNA, 533 bp, Homo Sapiens
taaagtgtaaacctgttttattattttactgaataaacatcattattggaatgttactgaggaagaaagtctgtggcttctcctccttttctaagagcctttaccctggcctactgccccgatgatgggcccacctcctttacacagaggcactcggggtcaactcagtcatgattcttctaaggctttagaaaatgcacaagagattacgaggtaccgaggaaaacaaacaatggattgttacagtacatacattctggtggaagtctgttctttctaaaagcaagtctctcagttttctttctgctttctgccaaactaaacaggactccgtaaacatactgacgaactggcctatagagcagagcggccggaggcaggtccttgttggcttcatcttcaatagaaacagcaattttgatttcacccttcgtcaggacatggaagatgtaggggtacatcagccccttcttgtgcctgtgctcggccactctcagcacctcaggtgcgacggggggcaggggaggtgtggc

SEQ ID NO: 443056 - DNA, 884 bp, Homo Sapiens
ctctaccttggcagcctgatcagcctgaccatcacagaggtcaatgagtggggtcttttcccggctggctttgaggagtttggattggaagagcttcccatcaaaatacatccaaggacaacagtgttcccaggggattggctgtccgcatgcatcatttgcaaacaaggccatgtctactccactcatgaagagagctgatagctgaattcctcggggatctaggttctcaatcttgagctcctggagctgatcaggctcgtagagtttgggggacagcgcctgagccaggaaggcatctagctcctgacgccgaaggatgcgtgctcccggccactgcaccatgtaccgtaagacgcagcagagcaccatgaggtgagtgggcacgttggcagggttgagcatggctggggtgtccgacctcatgcaggccaggaaggccctcatcctgcggttcttgtcctctaccgccttacccaaccacagcctcttcaggttggggcaggtccactccctgaaggcaagagcttcaaccagttccggggtttgaggagactttcctttgtaagctgcccattctttaatgatcactggtgaaaattctggtggaagtctgttctttctaaaagcaagtctctcagttttctttctgctttctgccaaactaaacaggactccgtaaacatactgacgaactggcctatagagcagagcggccggaggcaggtccttgttggcttcatcttcaatagaaacagcaattttgatttcacccttcgtcaggacatggaagatgtaggggtacatcagccccttcttgtgcctgtgctcggccactctcagcacctcagcctcgtgccgaattcgccacccaggcctcgctc

SEQ ID NO: 443057 - DNA, 502 bp, Homo Sapiens
  misc_feature (15)..(15): n is a, c, g, or t
  misc_feature (49)..(49): n is a, c, g, or t
  misc_feature (74)..(74): n is a, c, g, or t
ggaaatggtgggtgnaatcccagttccaaatgcaggtgtctcctgtccnacctgtttcgaaccacaacccagtncagaaggtttccccttgcccagctgggcggtgggttaaactcaccccattacccattcccaggcccaggactggaacacacaaatttgaggaattagatttttttaattggcctacttagagctggtctttcagaaatatcttcctttttttttttaagcttctctcataatagcaagtagcacgcatcatctgtgcccagatttgcattaattaccatagtttatttttgtgcatgccactcaagggccagatcctatttttagttagcctcagttgtattctgctcagcctttgcagcttcgtaggacttagtacaagaagtcacatgccggtggaaactgtccctccacataaacctctttgcacagatattacactcatacggctttatgcctgtgtgaattttcatgtggcccacgagatggt

SEQ ID NO: 443058 - DNA, 585 bp, Homo Sapiens
  misc_feature (132)..(132): n is a, c, g, or t
  misc_feature (443)..(453): n is a, c, g, or t
gattttatagtgtgttgtgctttcaagatctaaatcatatataataaattaagggacaatggggctgacagcactaaacttggtgcttattgatattctaagaaatatctgtgaaatatcatcacgtatgtnatacaaccttcatttaaaaaggtttaaaactagttagattcactttgacacttttcatatcatttcttaacccaagtgacgaaaacattgtccccaatgaatatactcattagaattaccatttgttaatatcactcattaattaaccccataattagatccattaatttaaatgatttaaatttaagtaagttttataaggtctgacatcagaggtatcttactttcctctgaggatgatgtacttgccctgaccatgcattttaccatcacacatgttcagaaagggccaaattcccaacctggctcannnnnnnnnnnatcagagtcatgatgaatcagtcctaggaatgtttcatttggcacaagtaggggctgcctccagggggaacctctggatttattttgtatggaaatatatgtggaagggattggatctggggagatgctgta

SEQ ID NO: 443059 - DNA, 659 bp, Homo Sapiens
  misc_feature (150)..(194): n is a, c, g, or t
ccccccctcccgagcagagaggttgtaaaaagaaaagctacccacccacgacccgcgcgtttttgatataaaaaacgatctccctcgctaagggggagccgcctctttttaacaaaaaagatagatgagggtaaacgcgaaaatcatgtnnnnnnnnnnnnnnnnnnnnnnnnnnnnnnnnnnnnnnnnnnnnncaatcgaattaggcaggagtcgactctttctgggttgcatgtgaatcgggagctaatcaatatgagtataaacaagtaggtgagatttaattatgtagagtggtgtggttagtctattgttgtttaacagaccaacatcatagtgttttattgacaaaaccataggaaaaggcagttttaggatgtaaagtaaaaatggttctctgaaatatctacacaaacgtgaattctgaaaagttttcattaaaatcgtatttcatacaattataaactaatgaggaacaaaacaattttcaacttctccataacccagactgagcttgatttatgcttgccatacagaagcaggaactcttcccagagagggtggtggctcccacacagctgacagccaggtttggctgttacctaagccccatcttcccagtcggtgttcaaaacaagggcacaaggtctgggcttttc

SEQ ID NO: 443060 - DNA, 986 bp, Homo Sapiens
  misc_feature (160)..(161): n is a, c, g, or t
  misc_feature (163)..(164): n is a, c, g, or t
tttaggaaaaacccgggtttttgaccccctggtttcccctttctcccttaccgggggcccccgcggccccacaaaaagaaatggttttaggaaaagtttttttgaagggcccgaaggcggcccccccaattttcttcttctcgggtgcccgctccgtggnngnnaggcccccattaggaagtattttattttaaagtacacttgaaattttaaatgtgtacaaattcagaggtttaaaaaacttcgaaagtcacagacacagaatttaggaagctgaaggctgagagtctcccttctcacttaatccatgctttattttgcattcctcacaggtaaggaggcagtgcctgttatgctgtggaccaaaaccagccccacggagctgatcttcaaaaaaatggaatttactctggcatactcctatgtatgatacctttccaaggccaaatcccaagagaccagcaagtgcaactttgggcaatgatccaaatctagaattagctgccaaataaccttggtagactagtccctgggtgacaagcatgcttacaagagaaaaaggcagagctctcttccagaaactttcttcctgacattctcgcataatctttgagatctctgctctgtggatgtgcagttttgattttggacaaaacaacaggctctgcttgcttggtggtggaaaatgggcatctttatcttggtttccacgagcagacgctgaagccatgatgactttgtgcttgctctccttccagttgtttatcctctgcttactccttgacccagtgtctgtgtggtctgggtcgcctccgaggccgagtccctcgttgccaagcccagcaggcctcgctcccccgtgactgcaccgccggcccgctccagcttcccgagtaccccacctgtctccccggcttccttccggccctttgtgttttcttctcttccgctctcgacgaattcgagctcggccgatttggcctgat

SEQ ID NO: 443061 - DNA, 840 bp, Homo Sapiens
caaggcttctgtattttgggtattggatttttaggtagtcagagggggaagagggggaccacagttatcaagcccctatctgtatcaaacttcagagtcgatgttcaaagaatgaggcctgcgagggggacacgagaaactattctcaagagcaaagcaacaggccttccatgtcaaatcgaaaaatacaaccaagttaagcacaatcatgcacccgtgcacgtccaccccctacccacatattctgatgagactcaacatccagggggagagagaaaactgcgcgagcctggagctgcacgggaatgcggacagagacatcctctccagcagacgccagccaaagtgggtgcaacgggcggggagggcttgaatggttcagcatgaaaatcccccacttgattgtaccatacctgaagcacagcctcagttcctactcaattccaaccaggaaaaaaacatgcattctttaaaagctcttcccaaaaaacaaacagcaacggctcttctctccacgcccagtttcaggtgtctaaatctcccaccctcacccaggacctgtcccttgagctgggaggaggatctcagggctcacagcagaaggcaggaaagaaaagtgacctttggcacaagctttgagacatcctgaaaagggtcatttggacaaactctgctgccgagtttccaaatggtttcatctgggcacgagaccccccgtcccacctaccccagggtttgaggcaatgaggagaaaccaacaggctgagacgacaggtcccatgctttccatcaccacaaaagtgtcatagacgccatgaagggaaggccaggacaaagtcc

SEQ ID NO: 443062 - DNA, 655 bp, Homo Sapiens
  misc_feature (520)..(550): n is a, c, g, or t
ccttcttgcttcaatttaattgaagttacttagaaaaataatcaggcttgaatggcttttcctggaggaaggttcatgaacattttcacgcttttgttggcaatgtggaattcagctttctttaacagtacagcaagatacagggagcgttttctacaacaggctctctactgcatacaaatatgtgaaaaaagaaaatcacactccacaaagatgtgacattacatgtccatatgccatactgagcatgctcataagaaagtagtatgggcagctccttctggacctaacaacagtgtagcagactgagatttgcctgttatcacgccaagggttaagcggatttctagaaggccttgttgcctgtatgggttctacactgtttgtgatggaaaaaggttggaggaaatgctggtggtgggaactcgggggagtgatagtggtcagtcctgctgacatagaggtgggcaaggaagggatttggtcactgggattgcacacgaatggcgcagctgagatnnnnnnnnnnnnnnnnnnnnnnnnnnnnnnnaggggaggatctggctaggaaagcaagcagagtgcctctgcttcttctgccaaccctcgtgcctgattctaacacccggcatcgtacctatgacattaatctcgg

SEQ ID NO: 443063 - DNA, 426 bp, Homo Sapiens
  misc_feature (34)..(34): n is a, c, g, or t
  misc_feature (41)..(41): n is a, c, g, or t
  misc_feature (68)..(68): n is a, c, g, or t
tcaacccataatggaacccctgaaaacccccagnagccgancagtctggatggtaatggagaaaaggnccaggcaggcaggtggaacagaatctcaactggcccaagacctggcaaagattagaatacccccggggttgagtaaaaggagcacagggaaatatttattttcaccttctgaagacactgtgtgcatgtagctctgacttcccacttcagggaactcctgctgccgcccagttttatctgggcaagtgatatattctcgtgggaacaagtggtggcgaagcctctttctacacatttcccctccttcctccagtcatctgtggggctggcgggtgggacacactagtgaataagcattgtgtgccacaagtttttatgcagagaagatggaaggaagtttcctcccacaggccccaag

SEQ ID NO: 443064 - DNA, 486 bp, Homo Sapiens
agaatacaatcagattttatttaagttcttttttattttcctccacactggcaaaagttccgagggagcctaaagttttgtaaacattttaactatccctcttacccacccccaacttttgaatttacaaagcaaaggagagtaggagccccaatttttaatggtttcctctcccctcatgctatttgatccaaaaactatatacaattttgtagcagtctctgtatagttattacacatgtttagaagggagggaggcaagaagggatagggagaatggtgatccaaaataataaaaatagaagccaaatataatactccaaacccaaactgctctcagagcaactccagccttcttcaggcaacaatgacaggcagcaaaggtgcttttccaggggctgcccagaccacagcacctctcgcacaggcacagctgcccaatgactccaacccagtgtgagtggcaattccaggtgatgttctgta

SEQ ID NO: 443065 - DNA, 670 bp, Homo Sapiens
tggtggaccgtgggcacaatgcctccaaagccacaggggctttctttaatcagaaagaccattaaaacaaacgttcttcttttaatacagccattgaaaagatgacacattaagaaacatgtaaacactgcagctgcttaattacaagttgcactgcttgatttagtacctatgcactcccaggtttggggaccttaagagagggggacaggagcctcccctcactttcacagttggatagagaaggcaagaatgtgggtagagtaagaaagagaaaacagaagacctggcttgtgcacagcgcctgagagaatcaaagcaaattctgtcttctagttctcccagaagaaaggtttaagatgttaggaaggttggaaaatgaacgtgtgttgtcagttgggaggcaaaggaattgacaaatgcttctagttagaatatcagctaggaaaaggagggatacagagcctgacctcatgctctgaaaaggcaaggaacccagaacttgcctcccttatccacttaagccccaaccttgatccatcaagggcagcgcatgggtgatcctgttcccatgaggattgtgtgtcgcacctgaacacaggacacagcgtgggggaaacaaccttgccttcctcggttctgctgccgccagtcgccctcctaggctacc

SEQ ID NO: 443066 - DNA, 602 bp, Homo Sapiens
  misc_feature (396)..(396): n is a, c, g, or t
ttttttttcagttgagcagacatttattaagcacctatcaagtgcaaggcactgttgctaggcgccgtgggaaatacagagaacacaggcggtccctgcccacgaggagctcacagtctagaaagggcagcaagacagtacacaatcagtggcagcagcaccagccagagtggcaagtgctcaaagcaagacacaaagtgctgtgcggtcacaacatcatggggatgcttctggcagaagcactggaaaggagacgaggactcaggctgggccttccaggagggaagccatttgggagaagggcatctctagcggagagaggtccatctgcagagcccacaggtcatgggaaacatgtgggctgcagggagagtttgggggacagtcaagtatggnctgggaggtggacagccacggacattaagctcaggagatttgaactttgtggtctggtcaaacagccactgcagatcactttcgcaggaggaggggtgactagaagtatgttactggaaggtaaatctggccacactgcagcatctggacggcagagggcagcgctgggagttgccagccagttagggcccaccacccctgggtgt

SEQ ID NO: 443067 - DNA, 341 bp, Homo Sapiens
tcgtgccgtttaacaatggaagacactttattattattatttttaatcatctctcaacatttcaactcttggtagaaatcaaatgtaaaacatctgcatttttaaattagcatgtatttaactatctcaatcacagcaacctcatccagtaagatgcacacctgggagcagggctgtagtatttcgtattccagtctgtgaccacagtgcgtccgtgatgacaggtacactggactttccctcctaggatgtgttagtcattcctgcttttgtccatagggtaagttacgtggcatcaggttggttagaaagagttagttactgtaatgctggcgcaatct

SEQ ID NO: 443068 - DNA, 595 bp, Homo Sapiens
ttttttttatgttatgttcgtttattgttgtaacattttgttttgaacatcaaacactgcaccaaaatattagccattcatcttgcaacaattgctttactgtaactaagagtactgtactgatgatgtttacaattaactttggacaacttaaaacttattagtgacattgctgtctaataatcaaatacttcatcataggctgaacataattattaaaagagcaaagtttcccctccctttcttactttcaaacaaaaccaaaagagtagttttcatctggaaagagcacttacttcagggaaagactcaatttttaaccagttttattaaaccctggaagctctacaacacgggaaaacatcgaaattccccggaagtctgtttttgccaacttgtaaaaagtgaaagagctgacttccttgtttattctttaaagggttggcctgcacctgcagtgccaactgtggaagggctgtgtgcaggccccacagttgcaggggctgttccgggccagcgcttcccagtcatccaatctcctttgtccctcggttgttctgtgactttgagcagctttcattttaggacatccccc

SEQ ID NO: 443069 - DNA, 1357 bp, Homo Sapiens
  misc_feature (562)..(562): n is a, c, g, or t
ggggcttttttttgggccgttttacacagtttattcagaagtttaaaagttaaaatgtgggcattttcccctgaaacaaatcatcccctgccactccccaacacaaagactctcccaacaccgcagttccttctctttacccaggcttaccacacattcttgcaaaacacacaggagtcaacaccccaactatttggtaatacaaagagactacaaagtcacacaaaagaatctcatttacttccttttcactagcaggctatgaatgaaagactgagaggcaaacacatcaccttcatccagagttgacacttccctaaccttttttcttcctctaagaggttaaaatccaaaaatagtttcactgacaactgtaactctgatattccatttttctcttctgaatggctaagctaggacatactttcctttcaaagctgatcttcagaacctcaagactggcagaaagcaggctcccagctgcagctcggccacaatactttgcaacaggcaaagttcccacataggtgcaaatgatgctttaagagttatcaaaactttntaaaaaataatgcattaatatggagcctccacatttttctgacgaaattcctctaaaaggtggtggcagctgtgaaacagaaggcactttgtgctaaaattcagagggtctctcaagagagaacgccacagcagagagacccaatccgcctaagttgcaggcgaccctttagggtggggaggagtatcccccaggaaggcatctgcaaaggaaaaaattgtaatcatgattccaaggcaaaatggctaaagttgggagagaagaaataccaagagagaagacaaaacatggctgtgccaaggactgaggagtgagctttacaaggacttgtcagctggctctgtacttctattgggctggttccttcaccatttccaaaggggttctggagaccttgcaggaacaggaacagcaccttagccaagagggttccaggcctcctgcctaggcctgggctctcctcgttaggttcccaggaataaattgagttcccattggcagcacttgcaggtattgctagtccacggcaagatctgtcttagggattttctggtacagccgtgaagagaaagtgagggttttccacataatccgggatttcttggcaatgcccaaagactttctgggccttctaagagcaacagtggatcaagctggtaacccccatcaacactcagaaaagcagcatgggtattttagatgggggacaggaggagataaatcaatggattgacagtctttatcttagtaccataaataaagtgcaccatgaatggaggctataagccactcgcc

SEQ ID NO: 443070 - DNA, 485 bp, Homo Sapiens
  misc_feature (436)..(436): n is a, c, g, or t
  misc_feature (470)..(470): n is a, c, g, or t
cactttatttatggtactaagataaagactgtcaatccattgatttatctcctcctgtcccccatctaaaatacccatgctgcttttctgagtgttgatgggggttaccagcttgatccactgttgctcttagaaggcccagaaagtctttgggcattgcaagaaatcccggattatgtggaaaaccctcactttctcttcacggctgtaccagaaaatccctaagacagatcttgccgtggactagcaatacctgcaagtgctgccaatggggaactcaatttattcctggggaacctaaacgagggagagcccagggccttagggcagggagggctggggaacccttctttgggcttaaggttgctgtttcctgtttcctggcaaggttttccaggaaccccttttggaaatgggtgaagggaaccaggcccantaggaagttacaggaggccagcttgaacaagtcnttgttaaaggttcat

SEQ ID NO: 443071 - DNA, 431 bp, Homo Sapiens
  misc_feature (397)..(397): n is a, c, g, or t
ttgtttttacacagtttattcagaagtttaaaagttaaaatgtgggcattttcccctgaaacaaatcatcccctgccactccccaacacaaagactctcccaacaccgcagttccttctctttacccagggttaccacacattcttggcaaaacacacaggagtcaacaccccaactatttgggtaatacaaaggggactacaaaggtcacacaaaaggaatctcatttacttcctttttcactaggcagggctatggaatggaaaggactgaggagggcaaacacattcacctttcattccaggggttggacactttcccttaacctttttttctttcctctagggggggtttaaaatccaaggtaggttttcactggccaactgttaactctggntatttcccttttttctcttctggatggggctagg

SEQ ID NO: 443072 - DNA, 901 bp, Homo Sapiens
  misc_feature (40)..(40): n is a, c, g, or t
  misc_feature (595)..(595): n is a, c, g, or t
aaagactggtctccacaggtcagcaaacataaatgaaagnagggagcaggggatcagcatggcctttgggtaacagactttattttccatttacaaaagaggttgaattgcatgcaagctgtaaaggatgctgtaattccctgtggagggcaagcatgatccagcacagtcctctcctgaaacacaggctggaaagtacttatttgctcagtctgggctcctggattgctcgagtccacctcttgcttaatactgttcacgttggggactgtagaaaccccagcaaggattctgcacactggcacatctcagtaacacctccaaacacagactcagaaatcaggaaagccacaaatgcatacaatctctttaaatgaaatcaccaatgtattctagaggggttgttagtaagtagagccaaatgcaaagaactgttctacttttctctctctgtgcacacatgtagatttcctgatagcaggttccttaaagcagggcacaacctatttgtattaaccccagaggccttgtatgacttctgtcctggggaaggttgtcaacaagctgataagggctgccctggctaggacaagantctttgctaccaacctgctgtgtggcctcaagcaaagcattccctccttgagaactcattttcttcatcttggcaaattaaagacttggagctctggttctctctgacggtagctggccaggacggtagcggggatggagtgagggaagaacagaagtagaggtgtgtgagtcacgcaatgccatcatccagtggtagcccctaagcccagcacagtgcctgctggggcgcttggcagagtaggtgtgaggctcctaatactttctggaagagctgcacccacagaactgggctgcagaaaaatac

SEQ ID NO: 443073 - DNA, 513 bp, Homo Sapiens
ttttttaaggagctttaaatgtttatttaaaacagaaatgccaaaccactccactctcaacctttcaagcaacctggctaacaataaactagttcttctgcaacaatgttagagcagaggagtaactcaggttatactgtaactcaaaagcaatactactagaaaacttaaaacacctagcactgcataaagaaaaaaagcaggacaaaatttaaagagaattagctacagaaaaccattcaaaggcatttctactgcctcatcttttactccatccccctttgaactggtttctgtttgcatacttgtttggtggggaaaaaaaatcatatggctgtcccaggcacaatatgggaaagtgcaaactgtctctaaggcacagaacttagattctcagccagattaatagcaaatctagacttcccaagggaatatgctagagaaaatgaccacagcgttccactgctagggaaaggctcccctatgaacaagaccagggcactcacccacccc

SEQ ID NO: 443074 - DNA, 817 bp, Homo Sapiens
  misc_feature (563)..(589): n is a, c, g, or t
ttttttttgagaaccagagaacccatataaaacaaaatcagaatcgcttcccattacagtacataacataacatcaatggtttggggaccatcatcatgtctagctataaggccagattttatattctagatatagaattatccagaataattctattgaattgactgattacaaaatgttaacagctggataaacggtaaaatatgcattatcttcacatgagaaggtttcagtttataaatgcttaaatactgtatctattggcatttaataaaatctttccctgatcctgatttctgcactgggtgggggaagaaacaaacaaaaggcaaagcaaaagcctgctctcctgagccttttatatctccccaatcaaatgtctgaaaccaaccaaaccaaaactcgcctttattttcctagtgttagatccttatcaatttgcatatctaacaactgaacgtagggaagttttctgccaatcagtggtcccctctgctcatcaggtaaatacctggctctttcagctttggaggtattttccacacagtgatacagcaaaggnnnnnnnnnnnnnnnnnnnnnnnnnnnaactggaaaggaaagaggaaagaagggaaggaaggaaacgtgtcttggaagaggagatctcctctggttcttcagcggttccttcaggcctctagacactggcttatcccaatatccaggcatgactcttacttaggtttggctaagttctgttttctgcaaaggcaagtaaaggtgacttccaagtgttcagtatattaaagcaaaaggaagaaaaacttaaaggtc

SEQ ID NO: 443075 - DNA, 677 bp, Homo Sapiens
  misc_feature (586)..(630): n is a, c, g, or t
  misc_feature (657)..(657): n is a, c, g, or t
gatctctatgctgacccggacggaagtccagcaacccttcctgggagggaaggacaacgaggagacgtcctccctgtcccggttaaagcccgtatctccaggcaccatcacctgtccactgcgaacaccaggcagcttgctgaaggactctaagatccctattagcatcaagcacctgaccaaccttccatctagccatcccgtggtgcaccagcaaccctccaggagtgagatgcccagaacaaaaatcccggtttccaaagtgctggtccgcagagtcagcaaccggggcttggctgggaccaccatcagagcaacggcctgccacgacagtgccaaaaagttgtgaggtcttccaggccaaggtggatgggccccatgccaaggaatacaacttttccctgggaaaccactaaagtaagttttgcttttcctaaagaaagtcttttaggacaccacccgtcccccgccctgctccagagcgtggaccgaggaggtctttgtgccctgagcagggaccggataacaccagaaagagggatgctacacgggggtttcttctcttaagataagtccctgagattannnnnnnnnnnnnnnnnnnnnnnnnnnnnnnnnnnnnnnnnnnnnatatctgacattggagtaccttaattnctttcagaaacagacttgcc

SEQ ID NO: 443076 - DNA, 454 bp, Homo Sapiens
  misc_feature (426)..(426): n is a, c, g, or t
  misc_feature (441)..(441): n is a, c, g, or t
ttttttttgagaaccagagaacccatataaaacaaaatcagaatcgcttcccattacagtacataacagaacatcaatggtttggggaccatcatcatgtctagctataagaccagattttatattctagatatagaattatccagaataattctattgaattgactgattacaaaatgttaacagctggataaacggtaaaatatgcattatcttcacatgaaaaggtttcagtttataaatgcttaaatactgtatctattgggcatttaataaaatctttccctgatcctgatttctgcactgggtgggggaagaaaacaaacaaaaggcaaaagccaaagcctgctctcctgagccttttatatctccccaaacaaatggactggaaaccacccaaaccaaaactcggcttttatttttccncggtgttagggtccntattcattttggc

SEQ ID NO: 443077 - DNA, 549 bp, Homo Sapiens
aatttgttcaattatttatttattgtggagtattttacatgcaagaacccaattagagagagggtatctggaaggagggccagtggggtggatggatgctctgagcctcgggtgcactgacccaccctccagaaccagctctgcccacagaaacacatgacagtgacaaaaacactaaacttctaggacgagtggacagcaaacgcgacattcaacacattcctcttttcagtagcccccaacaatcctgagaatcctcacaattaagtgcaaactttaggaaataaatatccgtccccctctccgggagagcctggaggtatggacagacagaagcagttctgactcgggggctgatggctgctccctatggctggtggccgcaggggaagcctgacttggaccccacagataggaagggctggtgacgggcactgggggaggcgagcacttcaggggctgacaggcaatgtctctggggtggaaacacttctctctgggtggggaaggcctactgtaacccaagtgggtgagacgtccccacagccg

SEQ ID NO: 443078 - DNA, 235 bp, Homo Sapiens
gttcaacaacaccatctttattcaaaaatatatatctatgagacatttcagaatatactgctgccgccaacgacagcctatacttctaaatagtcctaaattaatatacaaatttaagctttgaaaatattctttaagaaaaacaaacaaacaaaaacaagggaagattgaagactttctgaggaatatgacctaaaggaaaggtcctttgaggcctacagatgccctaagaaag

SEQ ID NO: 443079 - DNA, 1352 bp, Homo Sapiens
  misc_feature (944)..(944): n is a, c, g, or t
  misc_feature (1321)..(1321): n is a, c, g, or t
tcaagtgacatctttcaatataatctctaaaactctatgaattgaacagataaaatacctctgggctattttgttacaaaatatttgccatttggattagttgctgggtgcagccaccctgcctttccctagagaggtttctctctctcatgggtgacgggtgtgcggggagagggtgcagcaggagttatgtacagcaaaaacagggacggacagacagatggtcatcagggaagcctagtgggtacaaagagactcctggcgggccgtggggaccggtggcacaggggctcgaagacgcagggctggatcaagacacctgtgcagacgggcaggcaggcaggcttccaggacacgctgctggtagagcttgcttcagatctaggggtgggacttgtccaaaagtgggtggaaaactagtttcatctcccattcccgactctggagttggggccgaatggatcaaatcaggagagggacccagatttcccaaaggtctagagagtggatagagtggggccatcttggggtgactgggtctggggctcagcactctactgtccccgcaaccttaggagagcaggaaggcccgagagcaccccccgccggccctctggggggctggaggccctgccctgtctgctgccgtggggagggagcaggaggcttttcctaggtccctgaggtctaggctctggggacagggatggagaggggtcccaaccttggcctggggactgagcagggaagggaggttacagatgttgggcacttgcttcccctgacaatgaggagggccagctgtgtcctgccccaggccctcaggggtgttaaatgcccctcccagctcaggactggctccacggaatactgaccccggctgggctgcttcctggacagactccctgtgctgcccgtggagcccagggcagccactgcaccanaccacggggtgggcctctgccctggggcagggcactgaggtgcctgagagtccgggttctcagctagaggcccagatgcgtgccagccctaagacttgctggttccgatttggaagattggggcttcagctgaggtgggagggagggcctggggttgctgtgccctcaacaggggagagggcacttggtaagtttgaagagctgtgtgagcaggggacggggtcctgcctgtccttggtaagcttgaagagctgtgtgagcaggggacggggttctgcctgtccttggtaagcttgaagagctgtgtgagcaggggacggggtcctgcctgtccttggtaagtttgaagagctgtgtgagcaggggacggggtcctnctggcgggtcagggctgtctgggagagtgtc

SEQ ID NO: 443080 - DNA, 1632 bp, Homo Sapiens
  misc_feature (1548)..(1548): n is a, c, g, or t
cacttcctagcttaactccgtggaagttgcaagatgcccccacgaagtaagtccttcccaagatctcagtaccagggttcccgatccgcctgtgtaaacacgtgcccgtccttgccgtataatcggaccccctataggggcccctttgtaccagaaacccggtaatcgttaagcttgggccccctcgagaggataccttcttgaccggcccccccctgttgcattgtcagatttgtgttaaaaatgaaacgacacatttattttcccttttattcaacaccctccccacccagtctccccgcccccaagggtccgacacgaaaggtccaggccctcctcgggcgcgacagggagccgatccttaaaagcaaaccctacaaataaataagcggggtcgggggcgggggtctctgcagtccagggcctacggtccaacggcagtcaggtcgaatcaattcaccagcagcgaatgctcctccgaggggtcccttccgcagcagcagagaaggctgcaggccgagccgctcccgcggcggaacttgccggaggtggggctgtcctggcactgtgcgatgtaggcctgcagctcgctctcctctgcgcctgcgccgccgggatgcttgatggtgtcgtaggcgccggtgatgagcgcgatgaagaggctgagcaccatgtagatgaagaggctgatgaaggagtaaaggtagagctgggagaagagccacaccaggctgctgcggccctgctgcgcctgcatggcggcgaacgtcacaaacatgtcgtccccattgatgagcgagaacaggcactcagacaccatggagagtgagcggaacttcacatgatagggccccagcacgatccagccacagaagcagtagcccaggtagatgacagccacgcagcagcagaagcgcatgacgctgggcagggccacccgcagtgtggcgatgaggatattgtagttgtggaagaaggtcaggtagcggatcacgcccacccacaccagcagcgtcgaggtgcccaggaggatgctgcagacgtcgtagctcgccaagttcttggcctcgatgccgatcttcatgatggtgcccgagatggtgagcacatcgctggtgacgagcaggatgtaccagccattgacaaattccagccgctcccacaggctgatgacccgtccccgctgccgccacatgaaccccacaaactcgttctgcagcaggaagcctcgaaggagtgagcgggcgcagaggaggaaggacagggagcaggtgaggatgaccaccacgtcaaacaggagccggaagctgttgtctccgtgctggaagacactggggtgcttacactcctggatgtgggcctgggtctccaggctgatggggatccgcccactgtgtgctttgttgtcaaacgtgatcaggacgctgaaggtatagcagtccgggatctcattattgatgaggctctggaggttaatggtcttcagccggaagtggatggtgacattgaccagcttgtggaatttgagcgtgaggttcttgtaactgnagctgctttccaagagggtgagatcgtcgctggggggcggagggcgccgctcggggggatccacctggatgcagtcagtaacca

SEQ ID NO: 443081 - DNA, 1213 bp, Homo Sapiens
  misc_feature (1144)..(1144): n is a, c, g, or t
atcttggtgaggcagttcacttccaagtcgaacaggccgatcttacttcggggatttgaggtattcatgacactccggagttctctgccagtgtaaagaacaacacccacaacagtacctgatgcgaccacagtgccagcccacagcgtgttctctatgctcaggctctcgctgatcggggggtcgctgtcttctcgggtaaaagttcccacgaagttgtgaatgtcaatatttggctcttctgcgtacacatacgatcgaatctgaagaaggtcctcatcggggctggatgcctggtatacgcggcaggagtcttcgtactgcttctcggcctcagcctgatcagtcacaccgttggactcatacacgggagtcacgttgtggcagagcgcgatggccttcacggcttcgtgcacgcggctgctcatggtccgccggaccttagtggtgagcgttgggcccttctgagccggtgggtcctgggattgctgggcgtaaatgctgaaaatgtggctttgtacttcgtccattgagtcgaggccgtaggctactgttccgagatggagccgcttgaaaatcatctcgttctgggtaagagtgcctgtcttgtctgtgagtaagtacgaaatcctgcccagctgctcaggaatcgtgctggagcgaaccacggtcccggggatttttgagtcccttcgaatcacccagctgtacacgatcttgcccatgtccaggttcacgcgcaaactaatggggatgatgttggaaaacaagaggaggaagcggatgatctgcaggtaccaacggcctgcaaagtgctgaagggcaaccatgaccagcgagaccaccaccagggcaccaaagaggatcttggtgaggcagttcacttccaagtcgaacaggccgatcttacttcggggatttgaggtattcatgacactccggagttctctgccagtgtaaagaacaacacccacaacagtacctgatgcgaccacagtgccagcccacagcgtgttctctatgctcaggctctcgctgatcggggggtcgctgtcttctcgggtaaaagttcccacgaagttgtgaatgtcaatatttggctcttctgcgtacacatacgatcgaatctgaagaaggtcggcgnccgtggggagcctctgcgtgcaggccacgggaagccgcagcttatactccgtgctccccatccgaagca

SEQ ID NO: 443082 - DNA, 270 bp, Homo Sapiens
tgggtgttgttctttacactggcagagaactccggagtgtcatgaatacctcaaatccccgaagtaaggtgtgtacgaggtcatggggtacattgaccggctgtgggctggttggttctggtgggtgagtgacgagatattaaaataggaacacctaagagtgatatttatacagacattttatctttttatgcatatgtgtgtgtgtgtatgcaagtttatacatatactatacacatgtataatacagtactgaagtatgtaggtcgg

SEQ ID NO: 443083 - DNA, 989 bp, Homo Sapiens
  misc_feature (147)..(155): n is a, c, g, or t
  misc_feature (379)..(379): n is a, c, g, or t
  misc_feature (410)..(410): n is a, c, g, or t
gcccttgtgaccccacacaccccgtttttcccattaagccaaagaggggacccaaaaggggaaccgaatccggaggtgccccccccaacttttttctagggggccttggctctccagttggagctcaaccccaggccatttgagagnnnnnnnnnttgtcctgaagggcaggtgccccgggccaggaggccccaaagggcacgggggagtttccggtccctggcagcaatcaacccccatgcctgaggagctcttcccccttgctggtcacggaagcactgcaggcagtgagggcactgaaggtccccctgccctctttgggccgcgccagggatgccccgccctctgcaggggggttctggctgctgggacccagtcncaggcctccagccaccaggcaccataagctntaatgcgtcggcggccaaatacttggcagttttgctcccagcgtgaatccggccggcgtctggctctcgagaatcctgtctccaggacacctggtgcagcaaagaggcgaccttttcctccagttcttgaatcctactttgagcccgttcccgatcggccctttctgacatgaagtcatccttgtaagcgagaatctgaagagaggcgagacacacatttctgctcaaggaaggaggaagcgcccccccaggcttctcccacccccaccgtgaccactgcccactcagtgccaccaagccttcagcccagcctgtcccatgatttcggccaccaccggccagcagacatctggtcagtgccgtccggagcccgagggacagacacctgctgttccagcatctgcacccgctccaacgcagcatcccgggccgtcctggaggccgccagctcctgcttcacttcgggacagtcatttattttctcttccaactgtcttgttgagccgggagatctccttcctcatcagctcgggctcgtgggggatctgcagccccctcgtgccgaattcgccacccagg

SEQ ID NO: 443084 - DNA, 661 bp, Homo Sapiens
  misc_feature (634)..(634): n is a, c, g, or t
gaggttcagctcagatatgtttattggcaagcaggcatgaaaatgaaccatacagcttatttctgtaaactctgaagtccagttctctgtgcgtgaggtgctcagacaagtgccatgcacagaagaatccagaggcaggcttgatgctgttcaagtggcaggatcagctcacggtctggccagctcagcttacatgccttcagtgaggtgacaaaggacccaacggaaccccaggattcccacagcccatctgcacaaaggcagagggggctctatgataatgaccagctaatctcttacctcaccacaggaaagccctctctttaaatcggttatgctcccctatgctcctctctggtacccacccagggagagactgcagtgcctgttacagctgccttccagatgaccgcactcagggaactcctcaatgccagtgaagagcttgctggaggaattttacctacagcgtgcagcccgtcctggcctatcctcaggtgtgctctggacggcatgacctcaagaccgtgccctcctgcatggtctccacgagcccctccaaaggagcaagttactgtctcataaccagatgctaatgaacccacagtgactcgctgtgcaccaagagtggggncgagagcaacccatgcagcaagtgtgg

SEQ ID NO: 443085 - DNA, 1090 bp, Homo Sapiens
  misc_feature (745)..(745): n is a, c, g, or t
ttggaggccttcctggaagtggttcagtcacctgagtgctgtgctgccttcagcggcagcgggtacctccacgcacctaggtgccatggagcactctgggcctcaggagttcctacctccagcctttgggggtctctttggattgcttggtgggagggttttgccacactggatcagatgtaagtgcagcctcggttcagacagggtggggttctgccacctgccgtgtggggtcagattgccttggacctttgctgaagctggtccaaaggaggtgggcagaggagcggatattggaccctcgtaaagcagtgtgatgttcactcagatgatggcagctctccagagcgagtgccctggggcagcctccgtcctagcatcagccacaccatgcccagcagagcgggccccatctcctcagggggagcggcgcctgtgtgcccatagccctttcccggttctcatgaagcgtggcctggaatcagcctggggcagctggcagggtgggggtgcttccagcttcccaaaggtaaagcactgagagtttggggcctgggcctcctgtgctgctcctaaccactcagctgactcccctggccctgatgtgtggcttgatttttaaacactaaacagcttgtggtgcctaacctgtcagttgctggtaactttgtaggccgtttacgaatggacagagcgggtgcccgggtaagtgcaaggaaggcgcccccaggctgtgtcctcaggnccgctgtgctccttcacagatggccactcctgatgctgggtggagtttttgcccccactccttgccttacaggccatctctttccttttaattaacttccagcctaaacggctttgttcttttggatgttgacgtcacacaacgtgctgtgggagttatgcacgattttctactggctgttttgggggagaccaggtgttgtagacccaaatttagacttaatttcagtactactagtacatgcccttagggtgacagggcagacttctcgtcacataatgaaagcgggacgtcgctcctttagtcgtcctcagcttgtgctgcagtctgtctttccggcggggg

SEQ ID NO: 443086 - DNA, 708 bp, Homo Sapiens
  misc_feature (52)..(52): n is a, c, g, or t
  misc_feature (169)..(169): n is a, c, g, or t
  misc_feature (669)..(669): n is a, c, g, or t
ctctgtgatcacagagctgtcagcaggagaacccacaggaggtctgatctgncccttggcatgggctgaggggagaatgtcccacaggtaaaatgcaggctggctgccagaggtcagcaccttttcccggttgaggctgtatgctcactcagctaggtggtatggcggncttttttatggacacctggcttctggaaggtagctgccaacgtggtacttggggaggcgagccagctgttagggtgggagcagaggccctgggagctcagaaggatgatgatagctgctggttcaaaatacggacctgctgatcctaagctattaatcttaaacttctgaaataaagacagagatggaaggagttagaatagtgctggtccatattttccccgaaatgagaagtagacttggaatccttttctatatccaggatcctagttcctgcattttttcctctggttcttattagcatttttcactttaaaaagtaaaaatacatattacagttgccaagtttaaattattgggataaaatgccctaccacagaattaaaaccaaaataatgctcatgtgatgtcccttaaggtggtgagtgggttcaggaccctcagccacctgctcagcagggagaaggcagggagggaggggtccctactcgcacaggacancgggggacaggccagggcataccattcgagtccatcaca

SEQ ID NO: 443087 - DNA, 637 bp, Homo Sapiens
  misc_feature (98)..(98): n is a, c, g, or t
  misc_feature (222)..(222): n is a, c, g, or t
gaacactgaaccccactcatgggcctggtacctttctatacaagttatcctatttaatctccacaacaagcctactagatgctgagatctcaatgtgnaaataccccagaacagcacctagatgaggcacagggactcactggaagccttgtcttccttgggcccatctgtgaggagcagaacagctcacctcttgcctgacaggctagtcctgggtaatgnatccagcctacctcttgttggcaccctaccccaccgtcagtgccacatacccgtgaacacaaacccactgggggtgagctgctgtgccactgtcacaggatccttagggtgtcacttcaccagctggagacttctgtggccagtggcggctttacctgagttttgcttgggcccactgggctccttccacccacttggcctggcaggctgtgcttgtctttcactactggtccagatcccatgcctgccaagggcaagccaggtgcagagcagcaagggttgcatgagcaaatgagtgtggggtctggccattgggcacagccaggcatgccagctgtggcagggcaggcagctcccaggcacaggcgctggttacctgctgtggctgtggctagaccaagcgtactgcaagcag

SEQ ID NO: 443088 - DNA, 350 bp, Homo Sapiens
  misc_feature (58)..(134): n is a, c, g, or t
ccttacatttgtatttataagtacacacatgtgaagattcaaatcccagcttcatcannnnnnnnnnnnnnnnnnnnnnnnnnnnnnnnnnnnnnnnnnnnnnnnnnnnnnnnnnnnnnnnnnnnnnnnnnnnngtgccattctgagatacggtcccctcctgccagtgaccaccccaaacacagctgttggaaacatgacacataaaagttgtaaactcccattcattgtaacactctaagaaggagactcatctgaggttttatttctatagaatttagggtgcccttgtgaaataaacattcaactactctaaaaccctggaaacaattagtataaaagtaatttat

SEQ ID NO: 443089 - DNA, 771 bp, Homo Sapiens
  misc_feature (62)..(351): n is a, c, g, or t
  misc_feature (638)..(714): n is a, c, g, or t
catgccttgtgtgtggttcatctcctctttccatgttcatctctctcgtggcattctgcttnnnnnnnnnnnnnnnnnnnnnnnnnnnnnnnnnnnnnnnnnnnnnnnnnnnnnnnnnnnnnnnnnnnnnnnnnnnnnnnnnnnnnnnnnnnnnnnnnnnnnnnnnnnnnnnnnnnnnnnnnnnnnnnnnnnnnnnnnnnnnnnnnnnnnnnnnnnnnnnnnnnnnnnnnnnnnnnnnnnnnnnnnnnnnnnnnnnnnnnnnnnnnnnnnnnnnnnnnnnnnnnnnnnnnnnnnnnnnnnnnnnnnnnnnnnnnnnnnnnnnnnnnnnnnnnnnnnnnnnnnnnnnnnnnntaaacaaactttttgaaaagctgtttctaaaagattccttaaattcagatatgacagctaattacctcatcataaattacttttatactaattgtttccagggttttagagtagttgaatgtttatttcacaaggcaccctaaattctatagaaataaaacctcagatgagtctccttcttagagtgttacaatgaatgggagtttacaacttttatgtgtcatgtttccaacagctgtgtttggggtggtcactggcaggaggggaccgtatctcagaatggcacnnnnnnnnnnnnnnnnnnnnnnnnnnnnnnnnnnnnnnnnnnnnnnnnnnnnnnnnnnnnnnnnnnnnnnnnnnnnntgatgaagctgggatttgaatcttcacatgtgtgtacttataaatacaaatgtaagg

SEQ ID NO: 443090 - DNA, 623 bp, Homo Sapiens
gagtcaattatgtattagcagcgattcgctgagagagagtttcctcttaaatggaagctgcccctccctgttctgtagagagcagacactaggcccgctagagaatcctgaggcagcacgatgacacccgtacgcaagcagcatgaacggaggtggactcggtgcagctttgctgtcttagaaaatggacctcctgctgctaactcttgcatctcctttactgacttgtggattaattttagggggatggagatggacaggacatgtcccgtacgtcgttttaagcaaaaaagtccagtctctagggactgtgtgtatcaagtcctagtggccagagggcggggggcgactctgggcatcagccaaggaaagaaccctcacttacagtttgtaagccatgtgttcttctcaaacgaaatgtgaaagacactcacgtgagtcaccttctgttttaacagtcgattttcttcctgcaacttctcaataacactctggacagaggtgtgcccatctgtgtgttccgactgcatgaggaagggacagagagaagacactctgtcacatacagcaagaggggagaaagctagacccagaggctgaggcacagatatcactgcgtcccc

SEQ ID NO: 443091 - DNA, 1030 bp, Homo Sapiens
ccagaaccattgggggtcacggtccccgttccggaagccccgggggggaacaaaaccccctagtggtttcacagccatttgcccccccgcttccaaagggcaagcaatcccggggcccggtccttgggagggccgcccaggttcggggtttccatttcgggccaccggccattttatttttctctttcccaactgttctgttgaggccggggagattttctttcctcaatcagcttggggctcggtgggggatctgcagccccctgaggctgcgcatggagcccccctcaggtattcgtccctgctggcgttgtagcgctgccacttggcattgaggtcttcaacgtgagtcactttctggttttaatagtcgattttcttcctgcaacttctcaataacactctggacagaggtgtgcccatctgtgtgttccgactggtcaggacttctctcccccacattcctttgtgcatgctgtcgttcatccagacacttggccagatgctgacacatgtgggcggtggcggtcagcgtcctccgcagctgatgggtctcgttggccaaggagcggcacaggacgtcactggcggcccgggcgcgctccccttctgccatgctcctccgtagcaggacgacttccttctctcgctcgtgttggggctggctcagcagctgctgcatctccctctctttttcttctagtcgctcagtcagcctctcaatttcctggcgcatctgggcctcggcggcgccgccctcctgccttcgcagctgctcccggaagcgcgcaacctgctccagcagcgcgtccactagggacggcgcggcgtccccctccagcgcggccaggcgggcgcggaggcgagcgatgagggcgtcgcgggcagcgagctggtcctgcaggcggcgcagccgctgtccggcctcgtggtacagggtgcagagcgcggcagctgcgcgcggggcctcctcccagccgcccgaccccgggtcccgggacatggctgtaggcccgcccgggaggccgcg

SEQ ID NO: 443092 - DNA, 744 bp, Homo Sapiens
  misc_feature (73)..(73): n is a, c, g, or t
ccaccagttacagctttgtgtgctctgtcccagtgatattcagatgtgggtgtgtgtcactgtcacctggggncttcctgaacgatagaggtagggtccgtaccttctgaacaccatgctcactgcgagtgctgcatccaggtgtcattagcagagaataccactgtacgctgaccccagaggaagagagcttgaccacctggacagaaatccttgttccacctttgtgttttctctacctccttatatctgaagtttacttttgcacccttgatctttatcccactctggctaaaatatccctctttttggtgagaatgtgctttggctccatgggagtcctttactgggcaattgttccacttcctttcatgtgaacctcaaagcacagacagtcttgctccttttggaacatggagctgcatgttgagaagttgagtttttccttgaccaagcaaggacgactgtgtcccacacactcccctccccagtgaggcgagtgcgtggatgcctgcttcccatctgagaacctgaagaatgggtatttgggacttagggagctggggcttttctggaaaggactttcctttggcttccatttctccctcactggtgatggccattcccacagtgcaagtgttgccttctgatagaagaaggaacagtaatcacagttcaaacaggagttcgcagcccagccgaaggctgtgttgactttgttttgggcagcataacatgtaacct

SEQ ID NO: 443093 - DNA, 958 bp, Homo Sapiens
  misc_feature (163)..(163): n is a, c, g, or t
ctgtgcagaagtgaacggaaagactcatcattcttagagagtggaattaagactgcgagcaaattggccctttccatggctcccaagggcaacagcgtgctgcacctgccactgtgggtgtgcccggactgccgcaggaccgtggagaaggaggagaggcatngcggccttgaccagccagtgagccaagattttcttcttcactcctcgcttggtggctcccagccagaggccggcagtggtgggaggctcgctctgggtgcacagacgctgccttcagacaccgcatgctccgtgcgaggcctgcagtgagcgcagagaaatttcggcagaggcggaccgggaacctcagcagctccataactactggtcagatgtgcgctacgcggtgcgctgcatccctcgccaggcaggaaccccggtggcagatgcccaggaccagtctgtggtgcctgacaaggagggagtgaaggagctcgtggataggctctgcgagagggacccctaccagctgtaccagcgtctggaacagcaagctcgagagtatgtgctggagatgaaggtccgcctgctccggcagctgtcggctgcggccaaggtgaaggcaccatctggcctgcagggcccgccgcaagcgcaccagttcatctccctcctgcttgaggagtacggcgccctctgccaggccgcacgctccatcagcaccttccttggcactctggaaaatgaacacttgaaaaagttccaagtgacgtgggaactgcataataaacacctgtttgaaaatctggtcttttcggagccacttcttcagagcaacttgcccgcactggtgtcacagatcaggctaggaaccaccacacacgacacctgcagtgaggacacatacagtaccttgctgcagaggtaccagcgttccgaggaggagctgcgcagagtcgccgaggagtggctggag

SEQ ID NO: 443094 - DNA, 1142 bp, Homo Sapiens
gagtgagccactgtgctcggctgcaacatatattatagtgtggaaattggcaactattctctactcagttattagcaaacaacatatatgccaaccccgatgctaaattaaaacatggactatgattagtgattgctgtctagtttatttcttataaactatatggccttctaatattaaaacaatctgtacacattaaggacactgagtaaacattcatcatgctttttgtaatgaatgttttacttattaatcattcatccttatcttccttccctaccaaatcagagtttctacctgattttgacttccccctctccgccttctaggatgtgctttcagcacagtctttggtggctgctgtgcattctgacccccctctctcctccctcacactgactgtaagtagaagagcagcaaaatgtcgccgtatttaccaggaggcaggggctgtgtgactgggccaacctcagccctccttaccttgcacagccatgctggatgacctggctcctgacgcacacctgggccatggctgccccactctcaagctttctccatctatgagtccctgcagcttcactaccctggctggccacccaactctaactgcttcttcagccttcttcatgagcttttgctcctcttcctacctccttgaccaatcggcacccacctctgcctgcaagctctcatcatgcctatgactgcacagatcacaggggcagggctcatttgggaatcgtttgtccatctctcttattaggtcataaactcctgagggcaagaactgtgtcctgttcatgactcaacagtagacagtcaattaatgcaatcaacctcactgattatatgaactcaaaaagttacgctagactctgccttctctgttcgtccctgtgtcactgattgagtctactccactgactgactatcgcgcccaggcagaaaaccctcagttcctcctttctagcggacaatattcatcccaagtgcaaagaatttcagtaagaacatttaacatagcctgaatcagacctatgaatactttttattccaaaccttcaggaaagttaaacttcctgcctcctgaagccaccctgcttcctgaagcaccatctcatctgtgatctggtccaagg

SEQ ID NO: 443095 - DNA, 447 bp, Homo Sapiens
  misc_feature (402)..(402): n is a, c, g, or t
gtagaacctactgtagtaccaaccacttctgcaagaatggaatcacaagctactagcgcttccattaacaattcaaatccatctacctctgagcaggcctctgatactgcttcagctgtcaccagtagccaaccttccacagtgtcagagacttcagctactcttacaagcaatagtaccactggcacttctataggaggtatgtaaaaaagtgggggaggggagactttttgtcattactttcgttaggaaaagtattattgtttttaagtctaagattttagctatgttaataagcgggtattcttacattataataaacttcatatgttatcaaggtagtctttattataattaggctgatttcatatttgagtttgtgtgctatatgtaaccagagtnattatagctcaacataagatccggagaattccggaccggtccagc

SEQ ID NO: 443096 - DNA, 514 bp, Homo Sapiens
tcccttctgatactgcttcagctgtcaccagtagccaaccttccacagtgtcagagacttcagctactcttacaagcaatagtaccactggcacttctataggagatgactcaaggagaactacatctagtgctgtaacggaaactggccctcctgcaatgccaaggttaccttcctgctgtccccagcactcaccatgtggagggtcgtcacagaaccaccatgcattaggacatcctcatacaagttgctttcagcagcatggtcaccattttcaacaccatcaccaccaccaccatactccccacccagctgtcccagtttctccttcctttagtgatcctgcttgccctgtggaaagacctccacaagtacaagcaccttgtggagcaaatagtagttctggtaccagctatcatgaacagcaggcattgccagtagacttgagcaacagtggtatcagaagtcatggaagtggcagttttcatggagcatctgcatttgacccctgctg

SEQ ID NO: 443097 - DNA, 969 bp, Homo Sapiens
gtatgctccgccctttatataccacttactccgcttgttcattatgtaaaaatgttatgtgtcttgttagtaaaatgattttcagctgtaaccctgtgattttgccctccttcaacgtaatcttgtccctctaaatctgtctgcctctctgagacacatacaaggctgtaagcttacttcaccttacgattagaacttatcataagcagatgagacagatggaacttcagccaccctgtttatttgaaagttttccatactgactcagcttcatgatatgttcagcccctcaaagattaatgcctctcctagccattgattctagaatgtcaaggaaaccagttcctagtacatacagtgactgtgtagccaacttaatagtcaacattattacattaagaatattcaagatgtatgtaagcctcccaacaaaaagttctagttgtgctttgtacaactgagtgaactatttatctcacaactcttcacctacagccttactatgcacactttactttctccttcctcatctgaaatcaaatttaggcagcatttctttgatgttaacaaagccattaaaaatgaacatatttcagtatattacatgtggtctctgtgaggacaattgctttaaaaagtcttgtactattctagacaaattaatggatattttggcatactatgtacagtattaatgttgtgatgaggatatagtctcattaaaaattgaaaataaatattatgcacttgagttattttcccttcaatcttcatccaagatgaaaaagatatacaggttgagcccgtcttttaattaactgggctagtcatatctaatttcctgatgttttgcttgtaccggacgcgtgggtcgacgatatcccgtacatccggaccggttactccagtccctgcatataaataaacaaacgcggcgggtttctatagttccattaattttgtctttta

SEQ ID NO: 443098 - DNA, 945 bp, Homo Sapiens
  misc_feature (33)..(33): n is a, c, g, or t
ctcccaaacatacacacacaacaaaaaatacgncttttttccaaacaaatacactccccacagaattcccccccaagaacccaatatggttcctccatccctgaagggtggatcccttaaattgaggatccactggcttaataaaatctcccaaagaagatcacagtttaaaagatggaaagactttattccatgaataacctggtattcctcctgtctccctcagtcactcacagatgtcaagcttagtagttttctcttgtgctgtatgagttcctttcaggatgttttcaaaccgctctggcctcctggttaggtggcactcacgacaacaccactaggtccaacccagtttctcactggcaatatgtaggtactaatgctgaaaccaaatcctattactgacatttaacctaatcttaccaataacagcttgctagggacttccaaaacccatactatgcatctgtttgtgggatgaattgggatctgcttttctctgctactgactatgaatttcaggggtgttggaaaggactgtacttgtgatttgggcctagctgtttcagggagcctgagggaagctctcatttgtgtttagccaaggttggtgacatcaggtttcatcaagtcttcatatctatgcactacatagaaagcctttaaaaactcattaaagtcaatgcttccatctttgttcaagtccattatgttggcaagcttattgacttgggaatcatcaatgtgaacattgtagtgagaactaaaaagtttccacatggcacgaaattcttccacggagatcaggcctgagtgatcagtgtcaatggcattaaatatgatttccaggtcagatctgtatctgtacagagtttcaactagagtagaatgagcctgattttctgtggtcttgaagttggaaagcacgagtaaggtcactttttc

SEQ ID NO: 443099 - DNA, 543 bp, Homo Sapiens
  misc_feature (19)..(19): n is a, c, g, or t
  misc_feature (57)..(57): n is a, c, g, or t
  misc_feature (64)..(64): n is a, c, g, or t
  misc_feature (71)..(71): n is a, c, g, or t
  misc_feature (95)..(95): n is a, c, g, or t
  misc_feature (109)..(109): n is a, c, g, or t
  misc_feature (142)..(142): n is a, c, g, or t
  misc_feature (526)..(526): n is a, c, g, or t
aaaagctcccctggaaagnagattcaatctctggggaaatctggaagaattcaccantggaatngttatcntccagctccaaaattcttgggaanaaaacatggcaaanggtaatatccaaactcgtcagggtcacctggtnaatgggtttgttgaacaaaagcccccacttttcggacaaagatggtctccaagacatcgtgaggggaggcccgtccctcactgctgtttgatacggtttcagtatcctcactactggagggtgtggcagcacagtgggttctgtcagaaggggtgcaggttgccagtctctcctggtcagcctgggtaccatggacaggctggttgggagcaaggggtaccccaccttccttcccaggaaccatcagctggtgagggtgtgtagcatttaagccagcagcaaacactactggataagccaggtcagctgatccaacgcccagggcagcaggctgataggaaaggcgagagcttgagagctgggatggtggggaggtggaaaaanaggtggtacacacttct

SEQ ID NO: 443100 - DNA, 467 bp, Homo Sapiens
ggtcccatctgctgctgagtttggttaaccgttgggggggatgcaggggatccctgctggaaggaggagggtgaggaggcaggagacttgttggtgaggtggggctgctgcaagggagttgggaccctagagggccctccctgcaaactcttcatctgaggagctgtgaactggcctgggttgctcatctgaggaaagtttgtgtgggcttgtgaggcttgctggctgccaaagggatatggagggggagggtgggaaggcgtctgtaccgtggctaaggatggtcttgcctggagttgctgttgcattgggccgggcaagggagccttcttccacccttggtttgctatgtcattctgcccacgagaaacgtggactggaggagattgaagggctccagaacggcaggtggttccagcctggaggaacaggcacctgagttgggtcagtaaactggggtcgtattg

SEQ ID NO: 443101 - DNA, 835 bp, Homo Sapiens
  misc_feature (337)..(337): n is a, c, g, or t
tcaccaaggagtttccttgaataatagggagggaaccattcaggtatgcccagggaaactttaggacgctgggttccactggtctgtttgcccaaaccctgtagaagacctttccctggtttccaaaaggaatttgaaagcttcttcctgtaccaaattttttaatacgttctccatctctttcttttcgtaatctccttatttcatcagttaagcagacaatgtgctcttgcattctgcgtagccggatttcgtaacgcacatctttggcttgagggtggtagttcctggcataaaatccccgccaacaggcctgaagcttggtggctgcatcatntaatttctgaagggcaactttgtcttgtcccaaagcaacagatctctgggttaaaatcatgggaagtttctctgaagttgcttgagatatggtttctttattttctggttgtgtattttctggtttctttatgtctgattgtttctgctcagttgactcaggaaaaaatgtaagactgtggttatcatccttcaagatagcactgattattgttggctcaggacaaggtaatagtccagctttctcatttacctctgtattgatttcacttctcatcatttgaacagaattctcatttgcagcccataaaggctgttcctcttccttatccaacacctggctttccagccctttcacagattcatctgcaacaccatcatcttctaggcccaagttaatgccctgcagcctcagctcaactgtaggtgatagtggagacagtcctgatgcaactggcataaaagtagactctgaagagagaagactacagtttaactt

SEQ ID NO: 443102 - DNA, 1086 bp, Homo Sapiens
gttccccagggttagggtttttccccaccaccaggggtccagcgtttactgggtgggagagcttcaggggaaagtttctgccagcccaggggagaatgggctttcctgctcttttagagatgggcccgcagggtggcttttccggcggcctttggcctttcacaatgtaactccaaccagctttctggttgggccccgtccccgggcggccccgcgagcggtcggggagcattttccggcaggggctgcttctgccccaggggggcaccccaccacgggctcctcgggggctccccttgctcagttgaggaaatgcttggtccccaagacgtcctgctggatggattttcggacaggatagcttatatcagccgcgtaatattccaggaaagagccagcaaaagacccgcagcctaaccggaccctgtagtcggtgatgagggagacacaccagccgatgtcctggttgaagtcctccctggcttgattcagaagcgtctgtttctctttacaatcaaagtgctttaaacttttaagagacactgtgaaacctttcattttcgggttcatgtgtccttcgatgtatagcacacttgctttcttatctctctgcctgacgcttttgaccactgctggccagaaggggtattttttatgtttatgccagactagcattcctacttcaaacgaacgtggttcgtggtataaaaggactcttggtggctcctcgtcttcctcgtcttcctccaggatagaacgcatggaattagaccccatggactcttcggaagactggcactctttctccagcttctgggaatccgggcaaggaagacatctggttgcatccgcagaggcgtgggagggaggcgggcccagcctggcggtgctgcgcggggtcacagactctctgggccctggccccggcccgggggatggtgcggcccctgctgccatgggctccagctgcacggcaggcggcctttggctgccatccaggcgcggcctctttttcgcagggcattctccaggctctgagcaggccgagggctcaggggcctcgtgccgagaaacgccacccaggcc

SEQ ID NO: 443103 - DNA, 643 bp, Homo Sapiens
  misc_feature (484)..(487): n is a, c, g, or t
  misc_feature (491)..(495): n is a, c, g, or t
ctgaattgtacatcatcttggtgattattccttgtcagtccacagaaagcatcttcactgttttcctcagccgtaatggtagacggagtgactttaagcaaatgtagatataaaggctcatcgtggagaagtttccacagctagggtgatgggtcaagctgaactgatgaacaagaatggagtgggatagaagattctgcatccactggggctcccaaaccatttgcacagatcattttgcccgtggctggggtctggacttcataagaagcttcttctggggtaggtgagagtggatgaccaggactccaccaccctgccgagtcctctcatttccatttggcttccccaggtaggacaaccagttcatttgggtttactcccatctttcctaattttagcactgggtatgttttatgtggtgaataaagctagcccttaaaactcagtatttctctaatactgatgcttatgacaaagttcnnnnaagnnnnnaagagtgagttagtttaaagaaagatattagcacatgtgttacataacttggtcaagatagcgagaggggagattttggaggcattagcctgggggtgctcagcccatttgcccatagccatagggacctggaattctggggtaactg

SEQ ID NO: 443104 - DNA, 1822 bp, Homo Sapiens
tcccgggatgaaggggcctggggcctggctgttgctgattgatccaattctgggtgatggatctcggccgcgacgccacccgccgcttcttcaactggttttactggagcatcaacctgggtgctgtgctgtcgctgctggtggtggcgtttattcagcagaacatcagcttcctgctgggctacagcatccctgtgggctgtgtgggcctggcatttttcatcttcctctttgccacccccgtcttcatcaccaagcccccgatgggcagccaagtgtcctctatgcttaagctcgctctccaaaactgctgcccccagctgtggcaacgacactcggccagagaccgtcaatgtgcccgcgtgctggccgacgagaggtctccccagccaggggcttccccgcaagaggacatcgccaacttccaggtgctggtgaagatcttgcccgtcatggtgaccctggtgccctactggatggtctacttccagatgcagtccacctatgtcctgcagggtcttcacctccacatcccaaacattttcccagccaacccggccaacatctctgtggccctgagagcccagggcagcagctacatgatcccggaagcctggctcctcctggccaatgttgtggtggtgctgattctggtccctctgaaggaccgcttgatcgaccctttactgctgcggtgcaagctgcttccctctgctctgcagaagatggcgctggggatgttctttggttttacctccgtcattgtggcaggagtcctgggagatggagcgcttacactacatccaccacaacgagaccgtgtcccagcagattggggaggtcctgtacaacgcggcaccactgtccatctggtggcagatccctcagtacctgctcattgggatcagtgagatctttgccagcatcccaggcctggagtttgcctactcagaggccccgcgctccatgcagggcgccatcatgggcatcttcttctgcctgtcgggggtgggctcactgttgggctccagcctagtggcactgctgtccttgcccgggggctggctgcactgccccaaggactttgggaacatcaacaattgccggatggacctctacttcttcctgctggctggcattcaggccgtcacggctctcctatttgtctggatcgctggacgctatgagagggcgtcccagggcccagcctcccacagccgtttcagcagggacaggggctgaacaggccctattccagcccccttgcttcactctaccggacagacggcagcagtcccagctctggtttccttctcggtttattctgttagaatgaaatggttcccataaataaggggcatgagcccttcctcacgaccatggtccatgacaaggggcagggcagagggggcctggatgggagtccttgtggtggaccaggcaggggacttgcatcaacaagcaccagacgagtggcgggggcaggcgagaggctcagtgggacctccaccctcgttgccccagctggtggctgaccaggtggctgtggagggtcaggagctgccccggatcctctccatgtagttgcgaagctcctcagggtccttcagccccatgtcctcacacacccagcggatgtcctcctcgcctgccacaaggatggactgcacagcaggggcccctacaggctcctcaggtgactgggctggaggggctggcgcaaatgtcacaaactctactcgcttccgccgccccccagcctcctttcgggccagggtgcttgaggagctggtggtgcccccaggagggccagcggcccgct

SEQ ID NO: 443105 - DNA, 674 bp, Homo Sapiens
  misc_feature (279)..(558): n is a, c, g, or t
  misc_feature (600)..(600): n is a, c, g, or t
tttttttgatatttaattatttattttggaaaataagaatattttaagttcatgagacacaaacaagaccctatttaataattaaatttatttcagaaagcccacaataaaaatatttccagttagcttttccagtaaatttacttttccctcacattgactgtgatcaaaaccaaggaagagaaaggagaaggaataaaggaatgagtgaaatgtgctaataaaaatattaaatttatctccaaaatattgtcagtctcttaaatatagtcatggtannnnnnnnnnnnnnnnnnnnnnnnnnnnnnnnnnnnnnnnnnnnnnnnnnnnnnnnnnnnnnnnnnnnnnnnnnnnnnnnnnnnnnnnnnnnnnnnnnnnnnnnnnnnnnnnnnnnnnnnnnnnnnnnnnnnnnnnnnnnnnnnnnnnnnnnnnnnnnnnnnnnnnnnnnnnnnnnnnnnnnnnnnnnnnnnnnnnnnnnnnnnnnnnnnnnnnnnnnnnnnnnnnnnnnnnnnnnnnnnnnnnnnnnnnnnnnnnnnnnnnnnnnnnnnnnnnnnnnnngccccattaacatattccatcacaaaacacaaacgggctttngtctggaaggaatatttcaaggatgttaaaaaggcatggctagtggtctttaatactctgctttcagttagagt

SEQ ID NO: 443106 - DNA, 271 bp, Homo Sapiens
gctgaacagaacgtgaagttcttcgggggtgagggtgttttgggggattttgtgtgtcttccccccttccagagagcctggtactatggcaggcaggcctagcagagcccattcgtcctgattttccttccagataacggaagcttggagggtggcggtgctgtgagggtgttctatcctggagccaagtgtgcaggcgtcagacccgtccgggtctttttgaggttctcagtggcggtagtgcatcccgggttggtctttgtgctgtggc

SEQ ID NO: 443107 - DNA, 377 bp, Homo Sapiens
  misc_feature (336)..(336): n is a, c, g, or t
gggttttccattataaaaatttatcaagggaataatttgagtttttagaggcttggtttagcaaggtaaaaaagacaaccaaattattaaaacactttataaattattttaaaacctaccaactggggcctaaatgaaataaaccccctattaccttaggaaagagacagctttcctaaatcacagaagttggtttccaagctacactcttacttctaatgccttggaaccctaaggagaactaaagctcaccagcgatggctgctctggaagtcaaggtgggaagaacaggcaatatcctgacacaggctaagataccagactctgagccaaaangcagactctgtggacatgggaaagggaccacacaattttaa

SEQ ID NO: 443108 - DNA, 854 bp, Homo Sapiens
aaaatataactttttaattattcaaggcaatgcagaattacttgttcttgaatcactgatcagattccctataaattaccagtagagattaatgagattttttttaaatcaataatgatacctctggatacaacagaagattgaaggccagttttgcagacagtctgttattttattgcacagatttcacttcaagaataaaatgcaccatcagtatttggagagtttggggtctcagatactgatataccatcagtgtttacacccgtaaagccaaattcaacagtacaatttatgttaaacaacatcacttcaagatggctaacaatacaaatagagagaaaagtgggggaaagctttaaaaatgtgttagtttgaagcatatgaaaatgtacgattaaaaactacatcatacaaacctgaaatcaaaaatgttttgtggaacatcagttagagttatactcacttgcactgttatttattgcataaagtctatgtggttcatttccttcatattgatgaattgaggatttcaggaaaaccatggttataaaaatgatcaatcttgaaaaagtatgtacagataaatgtaaaatcacaaactaaaaaatatccctacccctggccctcaacttacaaaagggaaagtttcccatggaaagttcgttccactattgccctccctcccccatcccatgtccccaatgctatctttttctgtctcgtacaagtaaatgaccttgaagggaagaaacaaaagccatctttatgaggctcccattgtcatctgtatcagtttgaaaagcatcttggctggtgtggtggctcactcctaatcccgggaattccggacc

SEQ ID NO: 443109 - DNA, 406 bp, Homo Sapiens
  misc_feature (169)..(169): n is a, c, g, or t
  misc_feature (260)..(260): n is a, c, g, or t
  misc_feature (267)..(267): n is a, c, g, or t
  misc_feature (365)..(365): n is a, c, g, or t
  misc_feature (373)..(373): n is a, c, g, or t
  misc_feature (379)..(379): n is a, c, g, or t
tgttattttattgcacagatttcacttcaagaataaaatgcaccatcagtatttggagagtttggggtctcagatactgatataccatcagtgtttacacccgtaaagccaaattcaacagtacaatttatgttaaacaacatcacttcaagatggctaacaatacaantagagagaaaagtgggggaaagctttaaaaatgtgttagtttgaagcatatgaaaatgtacgattaaaaactacatcatacaaacctgaantcaaaantgttttgtgggaacatcagttaggagttatactcacttgcactgttatttattgcataaagtctatggtgggttcattttccttcatattggatgganttgagggnttttcngggggaaaccctggggttttaaaaaat

SEQ ID NO: 443110 - DNA, 440 bp, Homo Sapiens
  misc_feature (278)..(278): n is a, c, g, or t
gcgaactttccatgggaaactttcccttttgtaagttgagggccaggggtagggatattttttagtttgtgattttacatttatctgtacatactttttcaagattgatcatttttataaccatggttttcctgaaatcctcaattcatcaatatgaaggaaatgaaccacatagactttatgcaataaataacagtgcaagtgagtataactctaactgatgttccacaaaacatttttgatttcaggtttgtatgatgtagtttttaatcgtacanttttcatatgcttcaaactaacacatttttaaaggttttcccccacttttctctctatttgtattgttagggcatcttggaggtgatggttggttttaacataaattgtaccggttggaattggggttttcggggggttaacaccggtgggggtattccggg

SEQ ID NO: 443111 - DNA, 1120 bp, Homo Sapiens
  misc_feature (911)..(911): n is a, c, g, or t
  misc_feature (1013)..(1022): n is a, c, g, or t
  misc_feature (1039)..(1039): n is a, c, g, or t
  misc_feature (1064)..(1064): n is a, c, g, or t
gcatccacaggttgcactattgaaaaatcgagattgtataaacctggtaaaaagctgcaagatgccaaaatcttgtagatgtcaaataaaaagttattatactaacaagaagtgggactcttgtttaggccctcactgggtgaccttcagaagtagtctgtgacggggactcagcagaatttgtgtgttgtctcagcattccaggtagccttatagtttggcttaaaacttatccctaaaatgtaagatggcattgagggaaagggtataatgatagtacttctgaatgttttttaagttgaattgtttgtaaacttcttgcagaattgggtgagatgtgtgttaaaactgacaaacctggctgaaagcttagggcgttcatcctcttgtgtctcctttagcctgagtttggttatgtcaagcttaccgtaagttttcttaggatttatttattcttggtgcctaaaagaataaattgaaagtactttctgttctttggcacattttgcccagcggatgcaacttctatcctcagtccagttcatatatctcaggcagtgatccattttgtatcagccagtttcccttgttagggccgctagacccggctggcagccaagagcagcactctccccaccttcagcagaacttctcagctcatgtgtgtgtttttaaaagcagtaggcagcttccatcagcaatggaagtgtcccccactccagtggtggaggtgcagtcgctggacctgaggaagtggggaagcattacaaaccctcctgcagtaagaatggcagagttgggaaggatcttctctcgcaggctgttgggccaactcctcttttctgtgtatgagggcatcttagttttttatggcgttttcaaagcagcatatgaggattcttagcatgcanctaagtgacaacccccatggcctatgatgtaatgtttgctctggactagccatctcgataaataggaatgtatgtatcttaagttctttgtagaacagctannnnnnnnnnctcattaaaaagggctnttgaaagccttttaaaatggacctnacaaaggcaccagtgtgaatggatggaacttggggtgctgatgccagctggcatgg

SEQ ID NO: 443112 - DNA, 704 bp, Homo Sapiens
  misc_feature (637)..(637): n is a, c, g, or t
  misc_feature (647)..(647): n is a, c, g, or t
  misc_feature (652)..(652): n is a, c, g, or t
  misc_feature (685)..(685): n is a, c, g, or t
ttttttgcaccttttgctctcagctgtagccctgacatgaaacgcttgctacgtttctgcagcaaagtgggccgagcgcagtacgcacaggtgtggtgttagccagggagaccgaagccacacagaaggggagtcagtaaatgtccatctccacggtgtctgcctttgccattgggaggcctgaactaatcaaacgttcattaataggatcccagcctaacagcaacgcttatgtagcaccattcttagaaactaccaagtatcacacaggtacatgtgtatggggaccttcctcttgactgcttgtcaagaaaaggatccagagggaacttctgcccctacttccatgaagtgagatgcaacaatcatttccaatctatttttttatctcatgctaaaatgaaagtggaggggagagggaagaaggctcccattctacaattataaatgctgtcctggtagcctttcttctcttgccggctaacaattgttctaacagcatcccatggaggccagcaaatgaatgccccagggactacaagccagaaaattgtgcctgtaaaatatcatattcctctggagcttggtaatatagaaattttacctttacagatgaggcaaacttaaatattggtgnacttaaaaangcttntgaaggcttagttagaataatttttttgatccntcccccactacattgcttt

SEQ ID NO: 443113 - DNA, 691 bp, Homo Sapiens
  misc_feature (679)..(679): n is a, c, g, or t
gtgtggcttttttttggcttttactttaaaagtgcttctcggtatagaacaaagtaaatattacagttttgttcaacagcagccaagatttaattgtctgtgaaatataaggcttacgacctgagtcgagtccactactgttctgctgatacaaactaggctggcctacgaggtgaccgaacgcacccagcagctgatttacacagaagagccatctccaaagaattaaaagtgggccagggacagccacacgcctgcaggagtccatccaaagggctaggtgctttattctttctgcagcagatttaaagtgactttgtacaaaaagtcaaacaagaataaacagctgtggaaaatgtaacaaatcatgctagcagttgaacagcgagggagaagggaaatccagcaaaccgctaacatgcactgaagaaaagcgaaacggaggtagaagagagagggaaggtggacagaaaaggaagctggtaaggacacgacactggtttccacacgcgaatcacgcactttattattgcgtatagctcagtgactgtcaggaacctgaaaagtatgtccttcaacacagctctgcgtgcccgcggccctggggtgcaagcgagtctcctccgccctccgccgcctccccccgcgcgcgtcccctctcctccctgcaatgactccnccggtcccttcc

SEQ ID NO: 443114 - DNA, 1943 bp, Homo Sapiens
  misc_feature (285)..(285): n is a, c, g, or t
  misc_feature (582)..(597): n is a, c, g, or t
  misc_feature (1496)..(1504): n is a, c, g, or t
cacattactggcttaccccaaaaagcatggcaatatacattttcaaaaacaatcttcccctgtaattacaatgaaaaacaagaagcagaatacccatcatcattacagaaacaatgattgtatacttttaacataatattcaggtatttttaatcactatcttaaaccaatttttaattatataagttaactgtatatgcttactggcttgaaaaaataattggcacaacctacctactgcttttattacacaacgtggtaacttgtgtctttctgcctaatagncacaattatcagaaaaaagaatgcaaaagggtatattagagaaatgaagaaagcatcagaaaaatttcctcagccttggtttatcatctctttgtctttcctttgtatatatactgaagttgactggtcctctttcattactctattcctacccaaagaccttttgggtttcaaagtgacagcagccatatcatgttgtctattgttgctattgaattagcctcaattacaggcccccactaaaaaggataaagaaatacgtgaggttaagaaagataacacagaaaccaaaggagnnnnnnnnnnnnnnnntatgaggaatagttatgacccacccaataattatctggcaattctggagcagaggttcctatctagctgtttcattaaagtaggatgaaaagctgaagtatagctctccaattatcaggctttagaacgtttttttaaaataaagctcaatttcatctctaactagtttttgtgtcttttacgagatggaggtctcagtgttacctaggctggatttgaaatcctggcctcaagtgatcctcctgcctcactctgtctgaaagagccaggaggtcaaaaacaaagtaccgtgatacccatgattcttgctaccttcccccacccccacataaatactaacttcacaggaaaccaagagactacagagtacaattaccccataaaagaagacaattttagcttatctccctgactcttcccaccccaacttccctcaaaaacacataacagaaaagtctgtgttgagtttagcaaggacaataattaaagaaggtaaagtgaaggctcacagaatgcctcccagtttaagttaaaattccaacatcataacatcagggtgtcaattcattcaacttttaacccatttgagaaggtttaagttattaacttaaaaatatggcagtatttcttttgtaactataatctctttatagcctcttaattgctcatgctaatagctttattacatactactgcttcttataagaagtaaatccaggggccattccattttatcttagacataatatttactagttttccaagcacgacagaaatgaaaaaatatatatattagaacaagaacaatttatgttaatctctacaatctgtgttccttctgcgagcagtgcctgattctactaaaattaacacatttaagttcagtcttatgcttaagnnnnnnnnntctaatgagggactaatttataaagtatacacaaatataattctttaataaatctttccagtgttcactatatctgcattacatgtaatgtttccatccacagaaactcaggatagttcttgtaaaatgaaacagaacattctgtgttcatctctggcaagcaatgaacaaatagaacttgctcacaaggatctaaaagtgctgcctcaggaacataaactacgtgctatatgaatgagtcttggttaactggctactatctgggatctcttcctctgctcataccactgaacccatctcttataaagcctatgagaaaatgaaagctattgcagaagtgaaattcaacatgagccacccaaattcttctaaggtaaccattcctaagcaaatcagcagaagtcatctcttctataataacaaacaaaaacccaaaggc

SEQ ID NO: 443115 - DNA, 694 bp, Homo Sapiens
  misc_feature (174)..(547): n is a, c, g, or t
  misc_feature (566)..(566): n is a, c, g, or t
  misc_feature (610)..(610): n is a, c, g, or t
  misc_feature (624)..(624): n is a, c, g, or t
  misc_feature (646)..(646): n is a, c, g, or t
  misc_feature (667)..(667): n is a, c, g, or t
aaaaaaaaaacaatttttatttcagattgaaggggtacatgtacaggtttgttactttgcgtatatatggtacattgcataatggtgaagtttgggcttttagtggacccatcactcaaacagtgaacattgtacccaatacatattttgtcaaccctcatgtccttcccatcnnnnnnnnnnnnnnnnnnnnnnnnnnnnnnnnnnnnnnnnnnnnnnnnnnnnnnnnnnnnnnnnnnnnnnnnnnnnnnnnnnnnnnnnnnnnnnnnnnnnnnnnnnnnnnnnnnnnnnnnnnnnnnnnnnnnnnnnnnnnnnnnnnnnnnnnnnnnnnnnnnnnnnnnnnnnnnnnnnnnnnnnnnnnnnnnnnnnnnnnnnnnnnnnnnnnnnnnnnnnnnnnnnnnnnnnnnnnnnnnnnnnnnnnnnnnnnnnnnnnnnnnnnnnnnnnnnnnnnnnnnnnnnnnnnnnnnnnnnnnnnnnnnnnnnnnnnnnnnnnnnnnnnnnnnnnnnnnnnnnnnnnnnnnnnnnnnnnnnnnnnnnnnnnnnnnnnccaaccttctcactttggnatcctgtgtccacatgtacccactgtttaactcccacttataantgagaacatgtggnatttgattttccgtttctgaantaattcaattaggataatggnttccaactgcatccaagtggctttaaa

SEQ ID NO: 443116 - DNA, 702 bp, Homo Sapiens
  misc_feature (80)..(206): n is a, c, g, or t
  misc_feature (607)..(607): n is a, c, g, or t
  misc_feature (684)..(684): n is a, c, g, or t
atctcgagcacgttggctactggtatttttgtattttctcaatttgtggaggcctttctatttccttaccgcctctaatnnnnnnnnnnnnnnnnnnnnnnnnnnnnnnnnnnnnnnnnnnnnnnnnnnnnnnnnnnnnnnnnnnnnnnnnnnnnnnnnnnnnnnnnnnnnnnnnnnnnnnnnnnnnnnnnnnnnnnnnnnnnnnngacagtttaccacctgccctaccccattattgggcttctttgttgaattcattctttcattttcttctggtccccatagcttgtgccgtaaaaatatactccagatctgactactgcttaccaccacccttgctgctattaccaccctgatccgagctatcagcatctctggcatgacctatctccctttgtagttgattttgctagctttctaaccagtcttcctgctttcacttcctacagccctatagctatacagcattcaaagtgatccttagaaacataagttaaatcatgccgctcttctcatcaacattctaagtggctccctgtcggacctaaagcaaaactgaagtccttatggtggcttcaagatcttatattatcctggtcctaattantacttctactgttttcctccttactgtgctctaaccacatctacttgcttagtaactcaaggcaagcatgactctantttaggattttgcattta

SEQ ID NO: 443117 - DNA, 669 bp, Homo Sapiens
  misc_feature (530)..(562): n is a, c, g, or t
  misc_feature (634)..(634): n is a, c, g, or t
  misc_feature (636)..(636): n is a, c, g, or t
ttccattaaggagaacatgaatttccttggaggtgaggctccaggtagggacagggcctggtctgctgaaggccacaggaagcaaatggcccccagtccacctttctgtccctgccatgaagggccattacactggggtggggaggtcctcaggagggtgtcacacatagccttaggcaatagcaagtctttcctattcagctctgtccagcctccaattgaggagggataatgggggtgagacagggttgggggtgaagtggccaccaaacccggcaaaagtgagcagctccatcttgtctgaagttaacatcatcccctcaggtataaagcctcctcctcacatcgactttggtaaaccagtcagtgacaggccttggccaagctgagacttgggcaaaaacctgaacgagtgccaccggaaagccatcatcctagctctgtccttccaatgctgagagtcacatgttcccccatgggcatccctctcctgagtcggctatgtgtgtgaagccaagccaagccgtgtnnnnnnnnnnnnnnnnnnnnnnnnnnnnnnnnnccaaccacaagagccatctcacaaggcttcaaggagaaacttccaattactcaaggacaagagctggcaatnancatgtgttggctctcaataaggacccaactgtc

SEQ ID NO: 443118 - DNA, 875 bp, Homo Sapiens
  misc_feature (270)..(270): n is a, c, g, or t
gggggttcttctggggtgctaatcaggcccctgttatgcttagggggagccctggtgctacttgcttgaagttttcagtgtaagtaccctgatgccttttggaccttgggatcagatcaagagttttggagatcaggtaccaaggaaataaggacagtctagctgcctcaagtgaggggccctttgcatagctctccttccccctcactgaagctgggtagcctattggggttgagagggaaaatttgaattctcagaatttatctcccnttaggaggagagccattaatttatgtacaagggttgaaggaaagttcgcagcagtagttttggggaagggggggaggatatggcatttctccaaccccggacaacattgcttttgaaaactgctgataaaatatgagccggttattacttctgtttgggagactgtgctctctgtggtgcctctcttggctctactccacagataccagacctcttctaagaggatgagcagaccagctttgaggttgacctgtttctctttgtctgccttcccaaaacaccagcccccaggaagacattaagcagccttaagcttaaattcctactccctcttccaaatttggctcacttgccttagatccaaggcagggaaaggaaaagaaggggggtctctggctttattactcccctaagtctttactctgacttccccaaacccagaaagattttctccacagtgttcatttgaaagaggagtattttgtcccattttccccttcctcattatcaaacagccccagtcttccttgtctctgctaagaaagtagaggcatgatgatctgcctctcaactgccctaggtcctagttaagtatcagggaggcc

SEQ ID NO: 443119 - DNA, 985 bp, Homo Sapiens
ctgcaataaaccagctttttgctgaggctgctgtaataagggctgtggttgagtctgcaatagtggtgtaatagaagctgctgaaatctgtgcctgcagcagtgactggggctggggctgagtctgaacaccaaatgttgtctgtggtgcaattggctgaagtacggcaggaggagtcttcagtaatggctgggtttgcgactgattctgatttggtagtgtttgaattctctgtgcattccatttaaaaggcatattaggattataagtagcttcaaccaatacttctgtcacctacttggggggttttccctttgacagcactaagctgaaagaatacatcttcatccacaaatccaaatgtatcatgtagttttgtaaccacccctgtgaaaacacgctgcttctgaggctgggtttgctgttgactggaccttggtgttggatatgatacagttatttgtgcttgttggctgaggagtagacaggttaaggcttgtaggcagtgcaacagctggctgtgttaagagggtttgctggggttgctgtaactgttgttgcacactatacagggcctgctgaggttgtgaatattgctgttgtaatgcagctgctgcagctgcggcttgttgctgcaatgcagcagtttgtgttaactgatagtttgctggagtttgtgtggtaaggcctgctgctgccaatgcagtttgctgtgtataaatggtaggagatgctccaaggagtgatggctgttgaacacccagtgcagctggctgtgatactgcagtggctgtaaactgagtagcccatggcggattcttctgtcctccaaattgagccatgatgcaaaaggaaaaaaaaccttcccttgtttgtcttctatagcatcgatcttcacctgagtcgggtcccggctaacatcgaagccatttcaaacccgtcagctttaggcgcatgcgccaacttccccctcttcctccacccc

SEQ ID NO: 443120 - DNA, 686 bp, Homo Sapiens
  misc_feature (447)..(447): n is a, c, g, or t
  misc_feature (530)..(530): n is a, c, g, or t
  misc_feature (575)..(575): n is a, c, g, or t
  misc_feature (578)..(578): n is a, c, g, or t
  misc_feature (583)..(583): n is a, c, g, or t
  misc_feature (610)..(610): n is a, c, g, or t
  misc_feature (622)..(622): n is a, c, g, or t
  misc_feature (632)..(632): n is a, c, g, or t
  misc_feature (653)..(653): n is a, c, g, or t
tgggctttttttggcctgtcttaatgtctttgtttagttattctcttctcctgtctctcctgcacgctcctccctttccacttctttcttctctcttcggtcctccccgtgggaacctaatgtatacgaaaatctagtggtgcctccagttgtattttcccatgaatgctttattgactttgcttcaagcctttcaaatggcatctggtgcttacctgtgagacatcccacctgacctgccagataaagacgattaaccctattttgaaactgagataaacctggcttggaaaagtttacctaccccaaggtctcagcactaagtaatttaactaggactcgaacccaggcagcgactcctgactgcttaagacggcatggtaagaagcaggtccagaagtcgagagacctgggtgtgcaagttcctaaggggatgccaagaacganagaaaggggagcaagtgtctctgtgaaaggagtgttaaagacacaaaagtgaaccggagccgcaaaaccctgtgagaaaaagnatgaaaatgtgtcccttgtgtccatgaacccgaaaacatgacaanggnttaancacaagaaaatccttaactttgtgaancgtgcttccacnggagtaaaancaatcaaggaacaatgggttnaaaaggaaattgaggtgaaggaaggaaacacaa

SEQ ID NO: 443121 - DNA, 880 bp, Homo Sapiens
  misc_feature (693)..(693): n is a, c, g, or t
  misc_feature (720)..(720): n is a, c, g, or t
  misc_feature (754)..(754): n is a, c, g, or t
  misc_feature (766)..(766): n is a, c, g, or t
  misc_feature (769)..(769): n is a, c, g, or t
  misc_feature (775)..(775): n is a, c, g, or t
  misc_feature (803)..(803): n is a, c, g, or t
  misc_feature (805)..(805): n is a, c, g, or t
tcagtgataaaatatcactctccctccctggggcattagaggagtcctcacccacccacctcctacacaagtatcttttagggacagtggctcaccattgtggactttttgagtgtccacctgatattacaagttgcattgaccagaacacagattttgctcttctgtgtcaatacccatttcttttctgaaggtcagaagttggttaagggtttgggggaccagctagacactcttcttagtcccatggagctgactggaagttccatgaggggaggaaattgatgtcaaagtgtcattttaaagcttaagctgaaagtttattttttaaattctcattcattcatttagcatatattgattgagcatctacaatgtgccagttgtagaattccatctcagaagagacttgacttgtggatggtggaggggcagtcctgctcggaagcagatgatgtgaaatgttcctttccagtctggttcacgatgtttaacagatttgtcaggtcaccactgtgaccccaagctttgctggcagattgttatatagtatttactgagagccctgctatctggtaaaggcagttaaaaagcctgcaatctcgactcatttccagcatgaacaagactgggtccttgctgctttacacaataatcaaagctaccttttatggcgtgctcgccactcccaancactggggcgaagtgctttacccgtcntcccctccgcgatgcctcatgcccactttagcanatatactgttancantcccantttacaatggaggaagctgaggccaaanangttaagcaacttaactgaaggcacacaacagcgaaatgcctgaaccaagattggccccagtccatgggaacccca

SEQ ID NO: 443122 - DNA, 460 bp, Homo Sapiens
  misc_feature (181)..(181): n is a, c, g, or t
  misc_feature (375)..(375): n is a, c, g, or t
  misc_feature (434)..(434): n is a, c, g, or t
  misc_feature (444)..(444): n is a, c, g, or t
ttttttttagaagtgcacaatcagttttttaataaagtcattacaaatatgtacaaagcgtctccaaggtatgaaattcctcttacaaaagagcacaacgacgtcagaaccaacaacgtcagaacccagaacggaacgtccccaagcttattgcctctctggctaggccgaggctcaactnaaggttctccagataccctcccagccgcccctgccacgcacacgggctccttggcgcttatagtgcaaagaccttcaggagaagaaacttgggagttcaggttggagaagagggtagaaaggaggtaagaaaagcttcccgtgtcctagggaaataagttcattacagggccctattttggcaaatttccttgncacctttccccgggggccttattaggaaaccgggaacacagggtttaggggcttgagtnttttaaaatnccacaacgaaaccaac

SEQ ID NO: 443123 - DNA, 1086 bp, Homo Sapiens
ttttcttatcaaccaacacttttaattgcaaaaagtaaaaaccttcattacaataaactttaatttacatacattcttcacatggtggaagtctttaccagtttgtagtatcctgcacttgaacacatactaaaagctcaagccattcagagccgctgtggctgtgacagctgcctgcctccctctgctccctgggaccatccagggccaccacaccctgctcccggaaggagagctgcagctgaccctggcacctgtccccgatgatggcgggagcactgcgctgagtccctgtcttgcctgtgcctcctccttccccgaccctcggcattggttactgacccttccccagggtggaggtgaaggaagggaagactgcagccaacatttttctgagggtaaaactgtggaaagaagtatggagggaagcctgtctggataagatggggctttctgggaatgtcatgtgtctgctggctcctgtcacctccctggaagggtccacagtgctggggggttgcagtgtgaagaatgggatgctactgtgagtaagggtggctgcacaggtgagccccctgccccaaggagctgctgtggggagcgatggtgtcaatgaagcctggcacagagaagatgtcccaactccccagtttctgtctgaaactcagacctcggctgggttcctttctccacacagtgcttgccgccatggctcattcttggattgatggctgctgcctgcctgacagacacactaggcagaggcggaagggtctctggtccagccctgtcaaatcctgacagttccaggcctccacttagttatgtaacattccttccctccactagtctgaaaaagtctggacatttcgcagtctccagggagaggaatatgacagatgtatttggcactaatgcttaaattatgcagggcagggaaaccagagacactgagggacctggacaacagacaagctggctgagggtttctcttcaaggccagcatttagtcatcactgcgtccacggtgggtggacttggatgtggtgcacgagaaggcctcgtgccgaattcgccacccaggcc

SEQ ID NO: 443124 - DNA, 714 bp, Homo Sapiens
tttttttatggtttaatacatttaatttgttttttcaggtggttcacagaaccagtacactcaaagtttgactagatattgcaacattaaaatttcccaatactgacaaggattctagttcatcagatacattctcattgttttcctcaaatagaggtgaatgaagtgaccttttattgacagtgattagcagtaataaggctattgtatgtaactggcatccccaagaattctttcctcactaccattcagtgtcatagggaggattttgaagctgttctctcgtgaagctttcctgagcatgtcttagtaaagattctaattctctttagcaccctcagtgggggaaacagaattagatactgaaagtatcttacattaaaacccatggctttaaacatgtacttagccaatggagaagacacttcagtggggcattccacaaataaatgctttaagactcaggctaaatcttgaccaaaaattaataaactgacaaaaaagatactgtctcagcattaacaggaatttttttagaagtcacaggaactatatctattgcaattagagatactgaataaggcttaaacttaataaataacaagtgaggaagatcaaatcccaagtctggccacttagcaaagcctcattgttgaaggttatccaagagtgtttccccttgtgccatggggaaaataatccccgttcaatagc

SEQ ID NO: 443125 - DNA, 669 bp, Homo Sapiens
  misc_feature (305)..(305): n is a, c, g, or t
  misc_feature (425)..(425): n is a, c, g, or t
  misc_feature (462)..(462): n is a, c, g, or t
  misc_feature (528)..(528): n is a, c, g, or t
  misc_feature (542)..(542): n is a, c, g, or t
  misc_feature (554)..(554): n is a, c, g, or t
  misc_feature (577)..(577): n is a, c, g, or t
  misc_feature (606)..(606): n is a, c, g, or t
  misc_feature (633)..(633): n is a, c, g, or t
  misc_feature (636)..(636): n is a, c, g, or t
ggccttttacatcaaaatgtttattttttggatatagacatttaaaacattcatctccaagaacagcttcaatcaggtatacaataagaaatagactttaaatcctaatacagaaaaggtaacagaatttttttgaatgctgctgtagacactagtgttagaaaaaaaagtttataaatggttttgccaccaaaaaaatatggcaaagcaaacttgaaaatagaaattgtttgccatttgttgctctggttgctgtttaatatagacccagtgactgattgtcttcagcacacatctaatttggnccatttactgcatttgggctaatgtgatccaaaatgtgatctaaatagtgcttttcactgggaggattgacaaacacgctacatacattagtgaatcctcataccacctcagtgaggtancttaagaaatattatacagaaattgaggcacaaagangtaagtgacttgcccaaagttcccaacaagcacagtccctggaagaagaggtaactctccacacangactcatgtgccanaaagctgggcanggacaccctcatgtagcatttantaaatacttagataaagctgtagctgatnctttgagttttcaataccctaaagtantangggaaatcctttgggcaactctcccaaccctgg

SEQ ID NO: 443126 - DNA, 1765 bp, Homo Sapiens
  misc_feature (28)..(28): n is a, c, g, or t
  misc_feature (96)..(96): n is a, c, g, or t
ttagtgtcatacgtcgtaagctgctgcntggtagcgtcgcgagcggtttcatgtgatgcgtgctgatggcgcattggggtatagcggtgggaatgngcgcgggggttcgggcgcggttacatttccgctgaacgggctctcatgggtccatcgtagcggtgggtttcggacggcatgttctcaagcgcgatgttcattgatatacgagggcctggtcccgcctgtcgtgatcggtcgaggttgtaggatctggcgtcggcggtgtcgcacgtggggatcggtaagcaggcgtagtggcatagtcgggggtatttgggtgggatgagcgggctgctggggattgtgcgtgtaatgcccgacagggttgcatcatgcggggtcccggtaaaaaccaattctacagggggcgtgtacagcggggggtggtcgcgacaggaccgccgattgtcaaggggcggtggtcgcggcggggagggtcgggacggtggaagcgcaccggcccgacggcgcccgcgttgccctcgtccgtcgagccatggtgggtcctcgttgtcatggacctcgcgggtccgtgccgacgaccaactggctgggcccccctgtcttacctgattgttcagggcgtgttttgttggcagatggttcctggaaggagcccaaagaccttcctcttaatttccccctcctgtacgcccatccatcaacctctgctccaggcctcttgtccctcatctttctccttccgggcccctgatgagctggccaagccattcactgctgcctctcagccccggtgttttgacctcaggctgctcctcttcccacacacagcggagggccaggtgcattgcctgaagctctgccccatccagaagtatttgtgtttctttcaaaggtcatccctgagggaagcctgtggttcagcagctatccccctcaggttgtgctccccatccataagccatgctccagcttttttcttctctggcgtctggccctaccgagcttacatgtgtccctagatgtgagctgagggacactggagccgcaatggtgaatgaggcagggttcaaggacacctgctcatgcctgctagtcctcctggtgttccatctcaggtggccatcctctcttatgatgcagtcttgccaggcacatccaacttatgatgtggtggagctgatagaacccagctaacgatgggtggctgtggccacatgctccccagtcctaggagagggagggactgtggcaaggatttgggtggtgaatgaagcactggcccccaggaaggggagcccaagacaacctctggctctcagaacaatggtatcgtgtccaggaatgctcagtgctgagtcctcaaaacattcattcattcatttatctaacagctcccaaaaccgactttgtgacagggtctgagcagagtcctaggatgcagagaggaattcagcctagtccctgcccatgatgagagacaggcagtgagagtcacagggggacagacaccttgtggaaaggaaaatccaattcaactcacccacagtttgagttcccacccaagacttaaagcctggaagacttcctggaggagggagtggtctctgagtctcctgaaactgacaagcaatcccttccagatggattatcaatgacaaccgcatcactgagcactcactgtgctgaaccatttccgcccatttcctgctcagtcctcacagcaactcaccctcgtgccgaattcgccacccaggcctcgccc

SEQ ID NO: 443127 - DNA, 404 bp, Homo Sapiens
  misc_feature (71)..(82): n is a, c, g, or t
atgcttggaatcgaatttcatgaatttattctaacacataaatcaggtaagagagaagtagatggatagannnnnnnnnnnnaaagaaattagcctccctgggtacttacagtagattgagtattgagagatttacaaagatataattctttggaagattacagaagatggaaacaaaatcaaatctttcactttcaggtactggagttcattaattctttcaccaaaagcacatcactgaaggaaaatcagaagtggttttttagttattattaaagtagttcaagacccagggaaccccttgagatgaaaacaaaacagtattcaacttttcttcacaagactaccttgtactggcaagacttagaggacttctggcttgaaaaatattgcttagaaaactt

SEQ ID NO: 443128 - DNA, 667 bp, Homo Sapiens
  misc_feature (30)..(30): n is a, c, g, or t
  misc_feature (53)..(53): n is a, c, g, or t
  misc_feature (119)..(119): n is a, c, g, or t
  misc_feature (170)..(170): n is a, c, g, or t
cttgtgcatgtgaacatgtgtgcatagacntgtgtgaacacttgtctccatgnacgtatgcttgtgtgtggcacagatgggatactgcgggtgcatctgcatatgtgtgcacaggtgcntgtgcatgtgaacatgtgtgcatagacctgtatgtgcacttgtctccatgnacgtatgtctgtgtgtggcacagatgggatactgcgggtgcatctgcatgtgtgtacacaggtgcctgtgcatgtgtacatgtgtgcatagacctgtgtgtgcatctgtctccatgtacgtatgtctgtgtgtggcacagatgggatcctgtgggtgcatctgtacgtgtgtgtacacaggtgcctgtgcatgcatacgtgtgtgcatagacctgtgtgtgcatctgtcttcatgtacctatgtctgtgtgtggcacagatgggatgctgtgggtgtatctgtatgtgtgtacataggtgcctgtgcatgtgtatgtatgtgtgtgcacagacctgtgtgtgcatctgtctccatgtacctacgtctgtgtgtggcacagatgggatgctgtgggtgtatctgcatgtgtgtacacaggtgcctgtgcatgcgtatgtatgtgtgtgcacagacctgtgtgtgcatctgtctcccagtagggcccacgtgaacgaga

SEQ ID NO: 443129 - DNA, 771 bp, Homo Sapiens
caaaaccccattcctcccactgggctgagcttttcctttcctttccgggtcacccatagaccctctccgtctgtaccagtgcgtctgtgttgtgagcgtgacgaagcctttcctgtgaagagctttcatgaactcactctcatactccttccccatttccacccatggtgtgactgttttgctattcaagactatctgtaaaaatgtacaaataaaagtgaaaactgaaaataaaggggagggagattgagattaaacaaatgcaatgatgtagcccttagttttctgaggacttctgtggacggccctaaaatcctgagttagggtgggatctgaagggagggataccattgacacaggaggtttttttctggttgtttctctcacagtcatcagtgtctgcttagaactctctgttctaaaggtttttccctgtaaagtagaatgcacttcccccaaaataaaagtaaatcagcaatgtttgaagggtcatggcaagggtcatgacaaagacctgactctggggtggcatgagtggccctgtcaccggctcactcagggccttgggggagtctcattacctcaccttgtctccacgtcttctcagccaaatggggatcaggggcttccagggctctgggggtgcgcagtccccttgtgtattttgctgctatttctagagagactttgagcccttgctagtgcgtgcttactgcatggaggtaaattaggagatgttttctctctgctactcctgggctctgcttttcg

SEQ ID NO: 443130 - DNA, 1057 bp, Homo Sapiens
cttcgttttagcgtgggaggacatcttttgggatgaaccggctcagtccttgagctcaccccaaagatgatgaaattgaaactcagaggaaaggatttttacaggaccacgccccgggctttgaacccgtttttcccaaccccgagcattttctattaagcgttctgtttcaattattttattcgttcagttaattcgttcttggcgtcataagtatatgcccgccgttgttctggccgtagctatctagcagccactccgcgagtcgttcatttaacaaatacttactctgtgtcagggatatgaagatgggtaataccaggtgcctgtcctcactgtgtgagtggttctctagccagacatgaggagggatcctattgtttcccatagctaggcagcctaagagagtaggggaaagagctggctccagatgaaaagggcaccatctccagctcttggaagcagagagggtggtcctttggattcccagtggcagcagcaaccaacttggcccttagtagtttctaagttacaccatgttaatggataaaggaattactcagcttgaagggatctgtttcctttacactggcctgatgtgtggggagaaaggggccaaaaagtttaggatttggagttaacatcgtaatttctgctttgttggtcagggtttacagcattaatggacaggttcaccctgacctacaagtcggaacgtgacatggacaaactggcccatatcttcagttattacattagtgacatcgtggagcgtgagtgatcattgtagggtaacaaggtgtggtgctgggctcctgggggtttataaaagaagggggccagaagtactttaaaacaggtaccaaagggtcattcctttagcatcattcatctttggtttcttcaagttgccactgaaaagctagacctttgcctattatctgctaatctacccagtctcacattctattgactcattgttcaaagggggggcaggaggagctaatttcctttgcacatttgtattttatttcaaaataaagtattgccttctaac

SEQ ID NO: 443131 - DNA, 754 bp, Homo Sapiens
  misc_feature (146)..(146): n is a, c, g, or t
caggttgcagtcatgcttttgggaaacttgggacatgtttcttaacttctctgagcaactgtgtcctaatgtgtaaaggagatatgagactggcttgcagcattgttgtgaggattggtaattatttatgtgccattggaatttanttggttgttaccatttattattatgctcaccaacccattcgggataaattttaaagggagggtttgtaagcccatttgcacccttagggatatgctaccggaggttgttaacaggagatattacttaaatctcttccttgtcccattgtccagaccaaagttattcaacacttctggtcctctgtgcttaagataacattcttgtgcatccctctgctcttagagactttcaccttctctcataaatttgcccaagacttagatcccctttaaccatgagaataagtcaaaactttttaacatggaacttgagggtccttaaaatctcaaatcaaactagtttaacaacacttgacaatgtccattatgtactccgtgctctttttctattgagtccactatgggacaaccacctgatgtgttttcctgtaccacatgttttttgttcaagctaaactccaaaactgacatgtgttttaccattttgttcattggttacagaactgatgttcccattactgtgcttaacatgctgattcagttcaacactttactgtgctgaattaagtttagcccttaatatattccctcaaagagcacttatgact

SEQ ID NO: 443132 - DNA, 1059 bp, Homo Sapiens
  misc_feature (416)..(416): n is a, c, g, or t
  misc_feature (1037)..(1037): n is a, c, g, or t
gttaacaaactagaatttccattttattcagccgggccatcagaacaatagcatctataccttcgaaacctcctcttaacctctcccaggcaaagaaggaaaaagtgatcatattgaattcctcagaatggtgggatctcaagactttttagaaagtgcttattaagtataagaggcttgaaatataatgatgataaatggtagcctttctggaaataatttttgtgtaatctgtttaaaaagattttttggatgcattgtccccatttgtttacaggaagtgtattacttttaaatataatcaatgaggtatttatttgttaaataactgggtcaagatttcagattaaactaagaggtgtgattaactacacttctccaatcctctgggaagccaacaggtaccaggtttgtgnatgaacctgaggttcaaatgtgtccgttttagaagaaagatccctgaatcacagcagtgtgattggatggaaaaacacgtggagtagttgatttaaaatatggcagtgttttccatatcatccagagtaacagcaataataacttgactttattgtgttgtgtccatttacaggacactgtctattaggattgtgtcacaggggtggaaaaactaccagagatttaaagcaaaataagaaacgcaacctaatttatgcattcactagaaattatcccatatttttgcctataactataaaagaaaaagagcaaacaaatcataacatctggctctaattccccattgaggcgcttatacatatataaatccagtatgtttcagataaaacaggaaaaaatcttttgtaacagctggtcaccatggtattgcagctgatagttacagctattggtctaagactacatacgtggaacaatattagcttgtagaattcaatgaaaaatcaaactaccttccctggttctttaatgcctctctccagttgtgctgattgtgtcgttacacaccagggccatgcactctcttccttcaactgctggtatcagtcaggaaccccagnatgccagagagctggcatagat

SEQ ID NO: 443133 - DNA, 841 bp, Homo Sapiens
  misc_feature (44)..(44): n is a, c, g, or t
  misc_feature (336)..(336): n is a, c, g, or t
ggaactgatttattttactcaggtaaataaaagataatgactgnaagactgcattccttagaacaaaacaaaaccaatgaaacgaaaccctcttatattttgtggttctttacgtcacaattctatattacactggtgtcaagaaaccagcagacggatgccagtagacaaatggtttcattgttatcccaaggccatgcacgccttaataaactttctttagacttttaactcttaattaatcaggtgttattctaaattagggcatttcaagggtttttactgtatcagaggaatatgaacatttatttttgctttcaaagaaaaagcaaaccntaaattctcctctccattcttaaaattcactaacacaacctgtcagaaatagactacacacctgaagtacagaagacacatagcctacaggtcttgtgtattttagagaactttggtgtttatattaccactcgcagcccctttctcagttggccttgaggcttgcccattagcttggtaaacgtttgaaagggtcagtgtgtccagaactggaatttccactttggaaaaagcacagaggtacctgacatatgttcctggagggcctgcactataccttcagacctgcaaaattcctacttctgcttgatggcaggcaggtcaaagttgtaaaacctccagtgggtactcctgcctgcagaatagaacacagtgtccaaagacccctggtttctgactcctagactagagagtgtccaaaacatgaatataactttaataatactcacgaaaatactaccttggggaaaataaggaaagccagtaggccaacgtgctcgaggat

SEQ ID NO: 443134 - DNA, 682 bp, Homo Sapiens
  misc_feature (31)..(31): n is a, c, g, or t
  misc_feature (664)..(664): n is a, c, g, or t
ccagaaaacgttatctgccatccctcaacangttatttgataaaatattctacttaggttccccattaattattttcagaagtcctgaaataattcttattaacccttaaaaattatgtgatttaaaaatatgttaatgttgcatctcatggaaaatccatatttacatgtgaattgttcttcctctagaaagaagtaggtggtgtgtttcagtaagaaaaaaataacatttaatttacgttagaaaaatacattcaataacacttctagactgttaacctgtttggagttgcttcaatcatgtattcaagagtcccaattgaatcactgagtaatagggttaataaaaccgctgggattttggaagagagctacatatcatggctattttaatagttttcagcaaaatgtttattttaaaattacagtttgaaaattaacctgcccttctttagctcttactttttaaataatttttcaatgtctcattattttactaagtgttttaaagttgacttggaacccaaagaactcttcaactgactctgtattgtaaaatataagattaaacccatgaaagactgtgaatatactaagggttgagtaatttggagttccaaatagtgtagactacagatatccagtaggccaacaccagtaggcnccacagtgctcgagatcc

SEQ ID NO: 443135 - DNA, 1643 bp, Homo Sapiens
  misc_feature (1562)..(1562): n is a, c, g, or t
  misc_feature (1631)..(1631): n is a, c, g, or t
ttccagaagcttaataataatttatttaaccgtcactaaggtgtagggagatgtgcagaattccaggaaggagtcttttcctaattagacagtcagagcctcattccagatttattattcctttggtagggttccagcatgtatattttgatagagagctccccagattcagggatacgtccttgattcagaagattaattctcccatttattgttccggaaacttcagtttttataatcttcctaaattgatcctttatgttgataaacagtgtcgatattaaggagctcattaattttggaagatccatatctatccaaactggtaagaggctttaagataacaaatgctcagctttcaggagacgtctgggaaagcgtgtgtggggttgacagacaggttcttctccctctatgctgcctgtcttcataaattgctccatcaggacttgttcttgtttgcttccttttgtggctgctatggccatccctatgtgggggtcctcatcgccgccatttccagaagcttccagtcacagccactgccacggtcgccacaaatgctactgcagagcccgcttgcccagcagcgtcaccggcgcctgccctgcctcttcgcccagcctttgattccccctcctttgtcggatagtgtctgcggcggggaggcggtgacactagtccgagtggggcgtggagaccgaccagcacgaagggcggagttccggcccgcacccctccgccgcctgccgcttggtacgtcccgcttccccgccctgcggctcgcggagcctggctgagcagcaggagggtcgggcgccgggggccggggcggtcacgccgcccgtcccgtgcccgcggtagtcacgtgtccgcgggtgtcacgtgctcgcgtcgcagccaatcgcggggcgacgctgtcctgggagcgaggaggctgtggtgagagacggaccgagaccggagatgttttcaagcccgggctccggcggctttacaggcggctgcagcggcgacgaagacaacgacagcgacggctacgccgaagcactcgttccgggggtgaagcctcctgcgccggccttgcctcggatccaggatgagaagactgataaaagaagaagctagctgaacagctgtaaaatgcccaaatctgggttcacagaaccaattcagagtgaaaattctgacagtgacagcaatatggtagagaaaccatatggaagaaagagtaaagacaagattgcatcctacagcaaaactccaaaaattgaacgaagtgatgtgagcaaggagatgaaagagaaatcatccatgaaacgtaaacttccttttactattagcccatcaagaaatgaagaacgagattcagacacagattcagattcaggacatacaagtgaaaattggggggagagacttatatcttcttacaggacatactcagagaaagaaggtccagaaaagaagaagacaaaaaaggaagctggaaataagaaatccacaccaattagcattccttttggttatccactctctgagcgaaaacagatggcacttcntatgcagatgacagcaagagacaacaatccagattccacaccaaatcatccatcacaaacaacgcctgnccaaaagaaaac

SEQ ID NO: 443136 - DNA, 549 bp, Homo Sapiens
  misc_feature (513)..(513): n is a, c, g, or t
  misc_feature (524)..(524): n is a, c, g, or t
ctctccctttaatttgctctattctctatatgggcctcattccttctactgcaaataaggaaaatgaccacctggaaacccaaggcccaccacatcccagcagagccaccccagctgaaagaaacccagcttctctctccagcttctacacatcaatccaggccagaactccatctgacccttgtgagacatgcttccacacctcggtggaccactgagggctcgggaattcagcataatgatgggcacttctggggtcatgggccttccctgtagctaaggtgacaaaaggacagactgggtctggaatgtccatgccagctgggttaacatgcccagccattgatgctggctgttttctgggagctcaattgtgctctagaccaagaaaactccatgtggcctctccacatgacctcatttctcaacatggtggctgcgggccaacggggaaactctcatgagcaaagattccaaaaggaccaaagtggcagctacgaacctcctcaaggntgagcctcaanccccatgcaacatcaagagccactg

SEQ ID NO: 443137 - DNA, 1020 bp, Homo Sapiens
  misc_feature (394)..(421): n is a, c, g, or t
  misc_feature (689)..(732): n is a, c, g, or t
  misc_feature (738)..(772): n is a, c, g, or t
  misc_feature (894)..(894): n is a, c, g, or t
  misc_feature (913)..(913): n is a, c, g, or t
  misc_feature (948)..(948): n is a, c, g, or t
  misc_feature (950)..(950): n is a, c, g, or t
  misc_feature (983)..(983): n is a, c, g, or t
aaaaatggcaaaatgtttttggcaaatgtaagcaaatgacttggactgcgttgggtctcaccagctctgagccgggtcagtcatagccaggcgaggcctactgcttcctgaggtcactctgtggggctgggggaaggtggatgcccgccactgggaggtgctggccccccacctggctccccctcaggccctcagtcttgaacatggaaatggagctggtgagaggtgccaattacaaactccagcacggatcacccattagcatcactgagagaactctggggccttgaaccacatgcagactgggtgagtcgtctacacagtgacccatattgcgaaagtcagagagaggagtgggtgcttccacccctccgacttgtgcgcccgccgccannnnnnnnnnnnnnnnnnnnnnnnnnnnaggaaacttcttttaaaaaatgttttctgttttgtatgtgtatgtgtatccagaaatgtccatcctccaagctggccaccactgttccctgaatttggcagtgcctgttgcttgcagctgtcagcatcctgaaaaccatgaggtgccttcaaagtagactctgtggcccagccgcgcgagtggcctccaggaccctgccgcacgatgtcattctctccttattctgaatcctgtctggctctgatgctgagaaaaaggacaaagtcgnnnnnnnnnnnnnnnnnnnnnnnnnnnnnnnnnnnnnnnnnnnnactgannnnnnnnnnnnnnnnnnnnnnnnnnnnnnnnnnnaagaaaaaaatgacccttggattactaatacagagttcagccctcctttagtcactataaaacggactccatgttttcacaccactcatggtcttccaagttatagataaactttgtcctangtgtccggtttgcgggcanaaggtccctccccaagttgtctaaggtcagagtanangcaaagaactcactggtgctcaacccggcctcntgggttttgatgtaacgtttaaaagttttccccaagg

SEQ ID NO: 443138 - DNA, 684 bp, Homo Sapiens
  misc_feature (102)..(102): n is a, c, g, or t
  misc_feature (120)..(120): n is a, c, g, or t
  misc_feature (592)..(592): n is a, c, g, or t
  misc_feature (637)..(637): n is a, c, g, or t
  misc_feature (651)..(651): n is a, c, g, or t
  misc_feature (659)..(659): n is a, c, g, or t
  misc_feature (666)..(666): n is a, c, g, or t
acattaaaaagaacaatacttaatttaaagggcataaaaattcacatcatcaccataaatatagaacccagtttacagatgactacaatgaagaaatctgtnagctaattatgtagcagnctgactccggttctcaacattttatgagcttatgttccttaacaccatatgttatagggaacagtaaagacatctgaattcaaatattttgaagaaatgtgtatttagcaagtgaatacatgctaaaaggaataatttacagcagcagtttcattacatttttctctccagtttttctagttcccatctgaaatgcaatgataagtaaagatatggaacatatttcctacctggcaaaaaacatgcttattgaacgggcacgcaccttccgcccttaaatagtacataaaccaccttgtcacctgcgtggggaaaatcttgccttttagggatgatgttgaacacattgaaatgggggtaccttataggaaagttttattttacactgttcttccctctttttctcccaaattatttacatcttttttttgcctaatgtgtagggtaggcaaaaatattaaaacacataccnctggcaaattacttaaattattaccataaaatggaagtgtggccntttacctggctttnacattttnacatttnggtatccaccggggcctt

SEQ ID NO: 443139 - DNA, 1028 bp, Homo Sapiens
  misc_feature (28)..(28): n is a, c, g, or t
  misc_feature (34)..(34): n is a, c, g, or t
  misc_feature (39)..(39): n is a, c, g, or t
  misc_feature (46)..(46): n is a, c, g, or t
  misc_feature (95)..(95): n is a, c, g, or t
  misc_feature (142)..(142): n is a, c, g, or t
  misc_feature (154)..(154): n is a, c, g, or t
  misc_feature (181)..(181): n is a, c, g, or t
  misc_feature (208)..(208): n is a, c, g, or t
tttacaaaattaatttatcggcaaaacngatgantgttnaagtttnaggaaattgaggaggaaggcacctattggttgtccatgcagtcatgtgnacaggaggatgaggactttgagacggagaggcgttagacaaggggcnttagggtagttnattgttagtcatctccttaccgcttcnattgccagcaacaggacccacagatgntccacagtcagcacaaattgtccaaggccaaggtatctatgtccatccatcagagatgactctcagaattgcaaccaatgcaagcacagactgtgtccaggcagacatcccatccaactggagacaaattgtcttggccaccttgtggttgccaccatgcctctcatccctggtccctgttaagcaccatctcaaaacagaagcttctctacccggctagtctttccataatctcatctccacgtgaccaatttatttcccgtggcccaagctctctttgctttcctctccttcaagctcctctactgcaccctctagaatagctttcccaaaggtaaacacccacccctttgctgacatcctcgctgggctgtcacagtgcacttctcctgaggggtccttcctacctcatggtcatatcttctctacctgctttcctggacctcctatgtccctgacaagcctcagggctgattctgatgttctttcctactcactccctcattgtattagtttctgggggctgccataacaaagtgccacaaacttgggtgatgacagcaacagaaacatattctctcacagttctggaagtcttaagtctgaaatcaaggtgctggcagggccatgttctctctgaaggctgtgagggagaatcttttcttatctcgtttcaggtgcttgctggcaacactgggcattcctgggcttgagtggcatcattccactctctgccttcatcacttcaggttttttcctctgtgtatctgtgtccaaatttccctcttcctttaaggataccagtcatactggatttaca

SEQ ID NO: 443140 - DNA, 785 bp, Homo Sapiens
gtgttcctcgggctgtttgtctcttgtgtgttgataatggcatatcggaggcttctagtctttgttgcttagattcccagcgaccgtaaggtaaaccagtaccaaggtgagcatgctgtggatttttaacaatcagaaaagtacttttgttttggtcttctgccaaaacaaaatctaacaaaacgtaaatagtacatcttcactacctgaaattctacaatacttaaggctgtttttgtgataacggctaattttcctcatggaattacttcatcacattttgataaacactttcagtagtagcatcaaatgtatgatcagcctgcaggtgacagaaaaaatctcctcaacagggtggaagggccaaaagggaagaaattaaggggagataaagctaagaggctcagacattacaagtttgatactgtttacagagacaccgtccatgcagacaagtcttgtcgggggagatcaaaatttcaacactggaaacacaaactagaacccaggagttgcagattcctcaaaagtcacattacttttcggttatttttataaatttattttaaaaaataacaattgcaatgacattaatgatcgatcacctgtacgcccccatactgctgggggaaaaaccttcgatatagttgaatcccaaagaaaaatcacgacattattatcaggcaccctatagccacaaaatgctctgttggtccagtggcatcgacactgacatgttcaatgtaccagtgcagttaaaatatatacacttaaaattatcctgc

SEQ ID NO: 443141 - DNA, 676 bp, Homo Sapiens
  misc_feature (571)..(571): n is a, c, g, or t
  misc_feature (640)..(640): n is a, c, g, or t
aaggtggacaaataattttattttgtgcatgcaaatacatgtcaagtactgcaaactttttccatcaattttctctcaaacactgaaaatcatgatgctctattttgtgaacagccaaagctaatatctcttcacttcagtgctacagcaaaaacacacagaattcactcttcgctattcactatcatcacaaccctcattgttccatctctgccctccccccatatacaggccttataaatcctagtcttcccccatttaatcctattcctatagcacaaagggaaacattacaatttggaaattcaaattgaaataaatggaatagaatttattcccatatatattccccatttcattgtacagaattattttaaattatagttttaaatagaagctgagtatatgccttaaaaatgagcattaaatccatcttagagatggtgcctgctttttacatgatgggtgtacaccatctttaatttcatttacatttcaatcgaacaatagatttgcaaagaaaatgtctaatacagacgtaaaaatattcacactaagagcttcacaatcnggtgtcaattgacaaacaaggctcctttccaaactttccagctaagcaaatttataaaatgtatcatgnaacaagaaaacattctccttcacttcaagggaaagg

SEQ ID NO: 443142 - DNA, 941 bp, Homo Sapiens
  misc_feature (846)..(846): n is a, c, g, or t
tgcaaggagagcatccatctcttgctcaaatggtggctcccacaagcacgtgcagagccagattcacaggtcagccgactccggggggcggcagggcagagaacagaagcaggaccccctgcactcgcccacctccaagaggaagaaggtgcaatttaccacctttaccaccatccccccggacgacagctgccccacggtgaactccatcgtcagcagcaatgatgaggacatcaaatgggtgtgtcaagacgtggctgtgggtgcccccaaggaacttagaaactatctggagaaactcaaagataaggcttaggcccctctagccaaagggccctgcccagatgccttccttgtactggaaactggcccaagtggggcagaaggcgttgtcagtggggttaagaagggccggtcccagggtccatgctagaccagttggaaagttttgaagtcaggaaaagacgtttttgtatcaagggatttttagcagttaatggtggtggatttttaaaggtcaggggaataaagtctggggcatggggagtgcagaccaagttactgaactgcacaggcaaaattaggaaggttattttatgagtcaaaacatactacagacaagctaccaaaaattatttgttaaaaaatgcaacaagacaaataaaaagagaaataatcatctgtttatatttctaataaaggagcaaaatataaaaataggacctgctaagagacattttccattctaattcacgattcacttttccaaggacagccttcaactgtcaccacacagctgggggggagtcatttcttaacaagggatgcctcttgggatagaactanggagttttaaatccttacttgatcatcctttaatttcctttccactttttccttttttctctctctctgtgtcctaagacttccaattgcattta

SEQ ID NO: 443143 - DNA, 700 bp, Homo Sapiens
  misc_feature (14)..(14): n is a, c, g, or t
  misc_feature (564)..(564): n is a, c, g, or t
  misc_feature (668)..(668): n is a, c, g, or t
  misc_feature (675)..(675): n is a, c, g, or t
tgtggccttttttngccctttttgacttgtcaagccatgaaaagccttttaatgacaattgggcatcacaggtataaataaatatcttcttctttccatctataatatgtgctacaaatatatttttcaaaggtccaacccaggttaggaggcttcaaggaccctttcttagctactgattttagtaattaaaaaaataaacacaataaacacccctggcatctttgtgagcgcccccctgcggagagcatgagggctgtcaggcatcttcctcctgcagccgcagccaatggagcacacggagaactggagtcaggtgatcacgaaggggcttatttcactggcgtggtctacgttgccacatgtgtcgctttggatgaatgcatttttgcaatgtgctgctacacaattatgctgttcaaaaacacagttgattgacaatctaacatagattttatctttagagtttatgctggtataccccacccaacaacataagaaaaacaactcaaaaaccctccaaacagtttttatctttggtcatgttcagcatcagttatgtcntgtgatagacccagccaccaagttggctctgattacacctgggcgtggctcctttttgatttaacccaactttctcccatatagggacatccccacgatgacangggtggnatcccgaggggtcaagtggtcaagt

SEQ ID NO: 443144 - DNA, 678 bp, Homo Sapiens
attgaaactcaactttaagtgttttatttttatgtacatttcattttttccagaaataaaatatctaaatacagacagactgtaatgttgtatatgtatagctttcaacaatacttgatctgaataaatgctctgtacattaagtttgtctttttaatggccttcacagctacattgataaaatgaattcctcatatccttttttcttaaccaataacaagcagagagacaagtacaagttaatattaataagcagctcaaataacacttggttaaactatgtacaatacaaaccattcatacaaatgaagactaggatattgaatttgttacaatatgtgtagtaaagataagacagacacttataacttacatggtgtctgccaggcatttcccttcttatataatgatcagaacttattttaagcagccttagctggtgtcgacttcacaaaagtccaatgattggtgatgaaagttgttatcccaatgtctgcccacatgtaaattccaaatgtttgctcatctttactgagaacaggcccctttcaaagaaaaaagagccatcttggaccactttgaatgtgcctactgtatgctggaaaaaagttactacattttgttgtgtttgtaaaataaagaatactgagctctaaagacacatttttccattttaac

SEQ ID NO: 443145 - DNA, 729 bp, Homo Sapiens
  misc_feature (52)..(52): n is a, c, g, or t
  misc_feature (508)..(508): n is a, c, g, or t
  misc_feature (526)..(526): n is a, c, g, or t
  misc_feature (537)..(537): n is a, c, g, or t
  misc_feature (548)..(548): n is a, c, g, or t
  misc_feature (636)..(636): n is a, c, g, or t
  misc_feature (662)..(662): n is a, c, g, or t
  misc_feature (684)..(684): n is a, c, g, or t
  misc_feature (709)..(709): n is a, c, g, or t
  misc_feature (714)..(714): n is a, c, g, or t
aatggaaccagtattcatgggtctctttcaaccttattttgttgtatttttnatctagagtgtcctgttttatttgacttgttagtaaaattatacttttctgtttctctgatcttacaggaaatgtttttatacctctgacctgtgttcttattttttccagaatcacaactactggagagaatatcatcagccaaaagaggagtgacttggctgcatttatttttgctacttccaatttcataatcagtgagtccttctgtagatacatccttgtaatctgaaagtggtcccatgcaaatgtcttcctgcttctgctgagaacaaagatcttttaagtctggcttatttttatctagattattatttactttagtagacttgaagtcaaaacatagaggattacagctataggaaattgatggtttcgtagttgtataaaccagcatttctgatggccactgaagaactgtagatctgtgtttgttaaggacaggtacaaatggcntcacattgtcttttgcangaaatttgttnttcttatgtantagttatgttaaccctcttcagtatttgaaggggccaatgtctcgggaccatttttattttcaacctcagttgtggatgcctcgttangcttaacattttcctctgtgggaacntgcacagatatgcaatcattanacatgtcaagaactgtgggatttanttccnaacaactcaaaactg

SEQ ID NO: 443146 - DNA, 1411 bp, Homo Sapiens
  misc_feature (98)..(109): n is a, c, g, or t
  misc_feature (1231)..(1313): n is a, c, g, or t
aaaacattacatttactaagattctggcaataagacacagcataccaggcttgccactcaacttgttattgtaagtctcagcttcaatatgaagccgnnnnnnnnnnnnaatcaaaaccctgctttttacatgctaaatatcttggcaagtaggccattaaacatagtaatgaacttaagacagcaagagtgaggagttaacaaaagctaaacattgcagcctaaacaaaattcatacaaaaaaataaactatcactagttacataaaattttcctgactggttaaaacttagtataaaacatgcattttagaatctttagctatcaagttcaaaaagtaccaatgtctatttaaaataattcctctcccaagccaaagtgtagtcaaaattaattcaaatgacataacacattctaatgctaaaaaatattcattattactaaagtggaggtaaatcccagagcttttggggctttctcatgctgcaaatggctgtttctctggttcactcaaagcagcatatgacagcatccaaagatgacactaagctcagtaaagggcaagactgctggtagccagctctgacctccccgtgaagcatggctactgtgtccatgataacaggatgtgtgaggatcaaaggcacacttttctgctagctaaagagctagcaaaccaccccccaaccctaaaagctccttccccaggtaaataaaagtatacgaggggaaaaaattcaaatacacttatctacagagtaagggttttgaaatattaatgttaatccctccttcgaaatttctaactagagtcatctggtcatttctgattacatcttaaagatgtatcccgattccatttctgttggtttatccttagacgcttctagtcaaaagtattaattttattcccagatatcttcaaccactagtacgtactgcagctgtattatctcccagagttatcaagcactggaagagaacagaaatagatgcttcaagcagcaggcaacatttatggccctttcacacacgtggcatcgtgacgtggcctactgaatagtccaggcaatcattcctatacacaagacaaattcatgcattcttagtaacatatgctctgtagttttccacagtctgcaatttcctccgacattgcgacttctcgtttataagggcaatcctgatttttcttaatgttatggtcgagtccggacttgaactagcagcnnnnnnnnnnnnnnnnnnnnnnnnnnnnnnnnnnnnnnnnnnnnnnnnnnnnnnnnnnnnnnnnnnnnnnnnnnnnnnnnnnnctgcttttcttcttttttgctcgcacctcctcactatactctgattctgacaggactcagactgataaggtttatcttcagaatactctttctctttt

SEQ ID NO: 443147 - DNA, 1564 bp, Homo Sapiens
  misc_feature (1032)..(1057): n is a, c, g, or t
tatgaactctaactttggtgctgaatatggtagctgggagaagtcagatgggaagtcatctgccgggcacagcggatagagtacgactgtgaactagttccccggcgagtgtgcatcttcattgagaagacgaaagatggacagattctgcctgtaccaaacgtggttgtacgagacgtggcctgtggcgctaaccacacgctggtcctggactcccagaagcgagtcttctcctggggctttggtggctatggccggctgggccacgcagagcagaaggatgagatggtcccccgcctggtgaagctgtttgacttccctgggcgtggggcttcccagatctatgctggttacacctgctcctttgctgtcagtgaagtgggtggtctgtttttctggggggccaccaacacctcccgtgaatctaccatgtacccaaaagcagtgcaggacctctgcggctggagaattcggagcctggcttgtgggaagagcagcatcattgtggccgccgatgagagcaccatcagctggggtccgtcaccgacctttggggaactgggctacggggaccacaagcccaagtcttccactgcagcccaggaggtaaagactctggatggccattttctcagagcaggtcgccatgggctactcacactccttggtgatagcaagagatgacagtgagactgagaacagagaagatcaagaaactgccagaatacaagccccgaaccctctgatgctcccggagactcctccgactccacacctctcgcggcagctgtcatttccatgtgcactgggacgggaagtcaaacgaggaatttcaaaaagcacaagttgaccgaaggtgcattttgtttagactccctgaggttccgttttacacatgatccaacgttaactacctttttttctgtatgctttccaaagtccttttttttcccttaatgttgaattaaaatacttgctcatagttgatttaccattcctacaaaagaggcagaaactttgagcaatctaggnnnnnnnnnnnnnnnnnnnnnnnnnncttccttccctgaatacagctccccaaaacacccctttccagttacaatcagcatcgtgatccaagacagatgccacatggaagaggaatcgccatttactcagaaaaaatgtcccttacaggaaccggcagacagctaggcagtcaccggccgcctccatccaaaatcacgctcgcgtgcttcggaagcatccgggtcactccttctccgctttttctgtgcagtatgggctagcgccggtgtccggtctgtttctccccttggctgctgtacccccacagccttctggctgcgacattattagaatcggcgtgtccccctgggggggcatgggattcggcgtacgcctttatctctcttagctgtacgggccatgcaatcgtgttgtgccccggcccttgggggggcaccggcacttgttctggaacctgggcccctgaccaggtgactgacgccctccataatgctccgccttccgtgcaagtcttggccactctgtggcttcc

SEQ ID NO: 443148 - DNA, 772 bp, Homo Sapiens
  misc_feature (28)..(28): n is a, c, g, or t
  misc_feature (39)..(39): n is a, c, g, or t
  misc_feature (48)..(48): n is a, c, g, or t
  misc_feature (56)..(56): n is a, c, g, or t
  misc_feature (60)..(60): n is a, c, g, or t
  misc_feature (127)..(127): n is a, c, g, or t
  misc_feature (634)..(661): n is a, c, g, or t
ttggggcaacttgagcttgtgttccttngggcagttgtnttgttggancagggatncaangcttgttgagggcttcatggccgcagggaggagttttggttttttctccttgagggcaattgggganccacagcagagtttagagcagaagaaggacacaattttgtgccttgtgcccgagttgagcggcgagcagggaggcccgcttggaggcgggtaaggacctcagagcggaattctgccacagtgaagctttggaggaaatctttcttccttttctcttcttttcccatcacgggttgagaaattggagggaggggcattgctggggcttcctgtgcccgcgtgtgcggggggttctggggccttgctgcctgcctgagccagccccttttcccgccagaggcctctcgtcagtccccgggggggcccagtggtgacctctgggcctcggggaacaatccagacctgggtcagtggccatcggcaggtgcccgggggatccgtcctccaggtcccccgtgccagtttccacagcgggacaggggggtcccgggggccagggagtcacgcagccccgaagacctacgctgccacacagcacacacccctgggggtccgaccctcctgggtnnnnnnnnnnnnnnnnnnnnnnnnnnnnggtgactctgatcttcgcccggcactgagtcgcggggactggaacccgcagcgtttgccgattcccagggcccgagcgctaccggcagagtgtgtgtgtaacgccctctcc

SEQ ID NO: 443149 - DNA, 700 bp, Homo Sapiens
  misc_feature (11)..(11): n is a, c, g, or t
  misc_feature (470)..(482): n is a, c, g, or t
  misc_feature (500)..(524): n is a, c, g, or t
  misc_feature (596)..(596): n is a, c, g, or t
  misc_feature (622)..(622): n is a, c, g, or t
  misc_feature (641)..(641): n is a, c, g, or t
  misc_feature (651)..(651): n is a, c, g, or t
ggccttttttngctttaaagaaagtttactatgtgtaatgcaaggcacttatgtctctgcttaaagctacaagggaaaaaatgacaagcccagtttttttcaagggaaatattttttctctgtgaaaggtcagtagtaaaagagctagtttaaagtcatggagtttttgccaaaaaccatgtctcgaggttttatgcatttctaatggctttgcccataggagagatacccagagtggcaaacagaggctaaggaaaaaaatgctgttcatttagatcagaataacctcgctccaatctggaaaccactcaaatgacacatacaagtctgtatgaaaagcaaaacaaactcatggtgatatgcagttattccattcaacatgttaaaatgaagacagagtattttaaatgcactctagtttcctgttccatcttcaaattaaacaatcatcctgcttattctagaaaacnnnnnnnnnnnnngagacagggtctcatttnnnnnnnnnnnnnnnnnnnnnnnnntaaaatcataagttcactgcagcctcaacttccctcactcaaacaatcctcctggctcaaccacccaagtanctaggactgcaggcacacaccaatantaatttttgtaaggatganatcttgctangttcccaagcttgtctaaaactcccgggctcaagtgaccctctcacctc

SEQ ID NO: 443150 - DNA, 851 bp, Homo Sapiens
  misc_feature (501)..(516): n is a, c, g, or t
  misc_feature (738)..(747): n is a, c, g, or t
ttccatcctaacacaaattacttttattgtaaacaaatgcttgcaacaaaatgcttttgttgtaaaatgattgatgttggggtaaagtctacttagcttccccacaaggtctttctggctagtctgcaggtagtagatgatggttccatctcggcattgtctatcctctccatattcagactgtgtgactgagcttccttgatttatatagcatctgacccaaaatcacaaaaaagtcactccttgatgacatttgcatggggagtctttcatttggacttcagttcttaattgccgaaataagtactagtgaattatgtagcgtttttacccaaaactaatcttctgtacaaagttgtgtgcatattgagatgattagttaaggcagtgtagttttttaaattttttctgtataaatttctttccttcttccccacctcaggcacctaccctactcctttcaaagcactttatatccctcttgaaatacaaagaaattgnnnnnnnnnnnnnnnngtaactgtctttaaaggaatttgtcttctattaggagacacagacttttattttgctttattctattctctttgtacttggagagcgtaatcaacttgtctcataatgggctagtgatgaaacaagggtgatagttggaaacagtcattacaacatggttatttttgttatatagaagactatcatgtaaataagtgcaatcgtgttcttacgtactggctnnnnnnnnnntattgcaactataaggatttttaaatgagggttgtgaattccaggaaatttccctgcaaaatttcttttggttttgttttttaataaaatgggccccgaaaaaa

SEQ ID NO: 443151 - DNA, 310 bp, Homo Sapiens
  misc_feature (212)..(225): n is a, c, g, or t
tgttgtgaatattcttaatgcatttcattatttatatacaatatgatactgatgaggagtcattatattctgagtagttttcctgaagaccacaagtctcaagtcaaggaaagtatccttaatctaggggaaaaaaaggaagtttctaaattgttccacaatacacttcactaagaattgtactgtatgacaatgctaatttttaaaaatannnnnnnnnnnnnnttttgtttctgttaaggatggtggtatttgcttaatactggttttcctgtatagcagatattttcttatggctatatttacttcc

SEQ ID NO: 443152 - DNA, 891 bp, Homo Sapiens
  misc_feature (481)..(489): n is a, c, g, or t
ttttttgttccccttctacataaaaacctcagtcaccactcctgagtggagatgggcagaggctctggcccctgctcctctggcttctcagcagctgctttcttattgctgcagcaaggcttgaagagatgtgtgtcaatgaggacttccccaaaacggcctttatagatgatcccacaacatatcttctgtcttttccagtaagtgagatctaaaaaggaaaaaactggtgttctgttagaaccagaagccatctctgtatctgagccgtcatctgactggttactgtaacaaggagattgagctggggaggcacttgaggtggtactgtgagcatcagaattatgacgtttaaattccttctgcagtttactgatctggttgctttttatcctgttcccagatagagttttcactttctttggtttcaatgtagtctttagactgggtccagcccttgcatctaccacatgattccagnnnnnnnnngatcctgctggcaacttcttccatcttttcacaagcaggacacaggcattgcagatgtctcctgaacgagtctcatgcaatccaaaacagctctggaagtccttttcatagcgtttactgtcagtgaatcgagaactggaggacttagctctgcaaatacagcagccctctatacttcggtacatctttggcttgtgaaaaccaaacatcttttcttctgggcaatagtcttccaaaagcagccgttccacgcgcaataatgtccccgaggtgcggagtgcacgccaggccagtccccctcaagcgctccctcctcctcaactgccttgtctagaaagatagtctcctgcagttctgcagttgtaccgctggccgggaaggtgtagattccgctttcccccc

SEQ ID NO: 443153 - DNA, 691 bp, Homo Sapiens
  misc_feature (60)..(61): n is a, c, g, or t
gttaaattctttctgcagtttatgatctggtggcttcttatcctgttcccagatagagtnntcactttcttttggttcaaatgtagtctttagactgggtccagcctttgcatctaccacatgattccagtttttttttgatcctgctggcaacttcttccatcttttcacaagcaggacacaggcattgcagatgtctcctgaacgagtctcatgcaatccaaaacagctctggaagtccttttcatagcgtttactgtcagtgaatcgagaactggaggacttagctctgcaaatacagcagccctctatacttcggtacatctttggcttgtgaaaaccaaacatcttttcttctgggcaatagtcttccgtaaatcgtgcttccccctcgggcactccggtgactgccgagagagacgccgagccagcaagtaagaatgctccctggtggatttgttggtaaataagacatctcgcgtcgggaggaaagttcctgcgggggccgctcgccggggcgagggcgagggcagcgggaggtgaaccgcgtcgctcgccgccacctccctcacctgcgccggaacaacgggccccgcgccagcccggcccggcgcctcccgcaggccgcgcctcccgcacgccgcgctgccggggcttgttcctcctcatggctttgccctaacgtaattcc

SEQ ID NO: 443154 - DNA, 466 bp, Homo Sapiens
gttgaggaggagggagcgcttgagggggactggcctggcgtgcactccgcacctcgggggacattattgcgcgtggaacggctgcttttggaaggcacaacttcctgaatggaccatgactcccaccaaagatccctgtctctgattcaccaaacagcttcaaccctgaaaccaggacgagaagttgacaacatctgagtggacagctaattgacctaagacttcagaccaggcctactattgcccagaagaaaagatgtttggttttcacaagccaaagatgtaccgaagtatagagggctgctgtatttgcatagctaagtcctccagttctcgattcactgacagtaaacgctatgaaaaggacttccagagctgttttggattgcatgagactcgttcaggagacatctggcaatgcctgtgtcctgcttgtgaaaagatggaagaagttgccagcaggatc

SEQ ID NO: 443155 - DNA, 1834 bp, Homo Sapiens
  misc_feature (534)..(534): n is a, c, g, or t
  misc_feature (1591)..(1599): n is a, c, g, or t
tttgatttcctttctagtaagactagatttattcaataccctagtaaaagttttgattataagtatccaacagtataaaaagtacaaaacagatctgtagatttctaatatattaatacaaagtgcatgactacatacagtacatcctacaggcaaagagaggtggaaggggaaaaagaagactgtggttgaggtctagtaataaataaataaatacagaagtagagatgatccatattatagtatattctaccaccaatactgcagccaaaatgtacaaaaaaaatcatttcaaataactcaggaggatgataatggctggacttttgtaattcacctcaaagactgtgggagagccaacctcaactcactgtatagtctgtgcatatggtggcttgtagcatgtaggttttttccaaaagaaggaaatataaaatgtttagattaagaactataaaactacagggtgcctataaaaggtggcttactccttattgttattatactatccaatttttaaaatgcagtttaaanaaataagcactgagtcttgttattaccagggccggcaaatgtttctccctctttttgaaaagactgaactggcattgcttttcctgaacatttagaaaagaggcagtaagagtactctggtttgggttcaagtgagaggcttttcatgaatgttcagaaagcctgactaaaagaagccaaaccaaaaccatttaatgtgaacacaaacctcttttcttttagtaagttttacttttaatacagagtgaaagaaaataaaaatttaataggctaaaacaagtcaaacacccattctacacagataaaaactttcacaaaggtcaactgaagtaatccagagctgaaactgaattgtgcagattttcaatgaagtcacagaagtcatgtaacacaaacaaaagtcgattatatttacacactcagcaagccctctaagaaatgtgccccaagaagcattaacctttgttttgtgccatcctgaagacttgcacattttatttttcagatagcttaacatttttaatcgagtgtgttctctaccatgcggtaatgctttggtactattcatacagggtcttgcctatcctgaagacttgccatttccccaagaggagctttgattctgctttagaagttttacataaattaaaatctttatcaaatattaatatgaagggaggcacaggatgcaacatatatagtcaagttacctctctgtatatttagaaattactttctcctccaaggtatttgcaacagaaagctcagtctgtcctgcttaataatcagtagtacaggtgtgaatcatcagaagcttggcaagaccttaatatttccaaattattaacaactacctctaggggcaagttcatgttactgagttatgacaaatttattatcatgagggaaaaccagagtagccagccatcttaaaaatgccccaaccactgcttctcaaaacagaaagactaaaaactacatacagtttatcatacaacaaatcccatctctgtcccctgaaattcccctagtttcattcattagaaggggattaacnnnnnnnnngacttaaagagcactttacagcagcattcagctttcctatgaaatactcagcatcttaaatattatatacaactctttttttagtaagctagacactggcttcagagtttgtgggagtgggggaaatcaacccattcaaaactactctagaaattgtcttttggcaagaatagcaggtatccaagttaaaaataagagggtcatttaagaccagcctgccaacgtggtgaaaccc

SEQ ID NO: 443156 - DNA, 1051 bp, Homo Sapiens
  misc_feature (78)..(104): n is a, c, g, or t
  misc_feature (401)..(406): n is a, c, g, or t
attttgagtactaaagtcctttattcaacaacacagaaatttcacaaaaacaactttactgggcaaattgaatgtgannnnnnnnnnnnnnnnnnnnnnnnnnnacagttttgtacatgccccataagtaattttctttaataaatacactgttttccaaaaccgttttttaaataattgcacaagcatacatacaccttacacaaatatctattagaaaatttaatagataactgcacagttcagaagaggagaacactgtgaaaggagtacattttgtggcccatgttcctgaaatatctgttttgcaattgtgaaaatggaatccctcctaatatagtagctgtcttttattcactaggaatacagatctcagtgtgaaatgccaaatttaataaaannnnnnaaaaactgaaacatttagctgttacatgagaaccaactgtttgatatcactgtgaatctaaccatgatcaaagacccgctacggctttttgctgaacatatttgaccctgaatagtgtgttcatttaactgctttccttttttcattatttgattacagatacttatcagcttaaagactttatatgctttagcattaattgcacaacttacatatcagggtttctgattgaaaggaagagaatattcctttcttttagtgattgcttaatattaattcataataagtgcaccatctcttgctccttataaatgtgtttagaagaaggaaattgagtgttgggaattaagcaaccaggagacatttttatatactcctacagtgggggaagacttcctattttctttcccaaggatggatacatttctactttgaatctgactccacttgtaggacagacaggcagagtccatcaggaaagccactttgggtctgaagggcttagtgaggaggtttgcattaatggatgttctttcgtgatgttatgggtgctgaggtgacaactgaaaagggaattgggctcactgcactatgtattcaccgcctcaagtatttaccatgatctccccaaatgctggcagatta

SEQ ID NO: 443157 - DNA, 628 bp, Homo Sapiens
  misc_feature (561)..(561): n is a, c, g, or t
ttttgcaaaataggtttctacctgttctaaggaggagaatagtggtagatggcaaagttggcaacaagtatgtttctagcaggtgaaagcctggtatgcattgccataaagtgcatcttttacataaggaaaacatgcttattagatgtatacagtacttttcaggcacttgacctcacttggtagctaagttggtgttcagatgtttgtttaatggaaaaacattaaattacatattggcttcaagccatgttcccatagaacatctgtgtttcataagctaaatccaaatgttccctgctaaaatcaaataatgatgccatatacccaattcagagaaaaaatttaatagattaaatagattgaattgtctcaatttttaaggttttccaccataaatttttcttaaatctttgttgcctgttacttgtctgaatgttagcagaaaaaaaggcttgaaaactatgaaatattatgcctaactgatgttaaaatgagagctgctgatcaagtcaatatactggtaatggaaatatgcttatattttcactcttacactgnttaagagccatattttctcatagtaaatgcgttcctaggtcatattacagaattcagtatgtaaaca

SEQ ID NO: 443158 - DNA, 721 bp, Homo Sapiens
  misc_feature (21)..(21): n is a, c, g, or t
  misc_feature (23)..(23): n is a, c, g, or t
  misc_feature (357)..(396): n is a, c, g, or t
  misc_feature (569)..(569): n is a, c, g, or t
  misc_feature (623)..(623): n is a, c, g, or t
  misc_feature (675)..(675): n is a, c, g, or t
  misc_feature (680)..(680): n is a, c, g, or t
tttttgtggtgttgttgttgngntttttggaaatccagtttattttccatgtcgtggacagatccagtcagtgtgatcagtttttctgcgtgtgtaataatttatcaaaataagttttctcacaagactcttttccatcaactctgaaaaccctggtctgacaacataccccaataaagcttttgaaaatcacctcttgaaatttggaagaaaatgtgccaagtcttttcctgtaacatttactgcactacaaatggctaaagagcaatttatggtttaaaaggtgaatagtacaacaggtgagttcaggaaattgttttagtgcactttgctccagttttagccaacatgctacannnnnnnnnnnnnnnnnnnnnnnnnnnnnnnnnnnnnnnnggggaaggagagggagaccgcacaaagtggacttgaggatttccattgtacgaaaaagatatgactctgcaagcaaaacagtgtaagctgccttttttcctaagacctggacattttaagacagaagctttgcaaaacattacacaattttttaataataaatgagaaaatcncaattggtacaaccgtcacaatggtagtcaagagaaatgttgcaatggatgaanaaagtcaatggttgggccaaaccaaagtcctcaatcccaaaacaatcaattncaaanggaataatggtcaacacaagccaacaaaacatcctgggttt

SEQ ID NO: 443159 - DNA, 789 bp, Homo Sapiens
ggtaataaattttaatattctattcagaataagaaaatatagcatataagcatttgtatctttagtaaagttactgccagtttgatttcttttttgcaagttacttagcagaacatgtaattcacagtaaagatgattctgtgttgtaccacattttaatattcctgttttgaaagaatagtagagagaaaatgggtggcctgctcagtgattgcttttcgtagtcttggtgaatgttacaggagattgaatttatagataaaagcacagtcatcatagtttccacagtacattgcagcacatttagcttgctagcctaaaaatctgatcatgctgagtttcttttaaaggaagttaattttagaacttcaaactagaaccagtttgaacctcaagttgaccgttgtctgagttttaaaaatctcttcccattttcaaagatttttcaaatggatgtaggagaggaccaaggaggtaggctatagctgtagaacaacacagtcctattttcagaaacgaacagacacacgttttaggtcaggcacagcccatgtatccaggtgcatcaaactggggatgctaagttcaaaagtgcgtctgttttgaagatttcatctgaaaataatgtgtacactttcattactaccagtttgcattcaaaatagtttttgagactctttaaactcttctggatactttaattttcccttttggaatagtgtggtaaacacagtccgggatgaacttttactactggatacctcactttgaggtttgaccagaagtgga

SEQ ID NO: 443160 - DNA, 968 bp, Homo Sapiens
  misc_feature (214)..(224): n is a, c, g, or t
  misc_feature (336)..(437): n is a, c, g, or t
  misc_feature (945)..(945): n is a, c, g, or t
agaaggacgcgggggctttttattcttaataaaattcacaatttcccccggtgagcatttccccccagggttttggagaaaggccaatcccctggggcaggggccaccccattttcttctgtaactattcttttcaaacccggagatatttaaatatgggtccaacacagaatcatctttactgtgaattacatgttctgctaagtaactgccnnnnnnnnnnntcaacttggcagtaactttactaaagatacaaatgcttatatgctatattttcttattctgaatagaatattaaaatttattacctctaagccaagcacagtggctcaaccnnnnnnnnnnnnnnnnnnnnnnnnnnnnnnnnnnnnnnnnnnnnnnnnnnnnnnnnnnnnnnnnnnnnnnnnnnnnnnnnnnnnnnnnnnnnnnnnnnnnnnctcaaatttatatctaagaattctcccccaaagaactttcactaaaatttatatctaagaattctcccctaaagaactttaaaaattaggctccactctgaagccagccagggtcccaccagtttccacttatagtgccacaattccagaacaaaggagaagccattctgatgagaacgactttgtttcaattttgaaaaaccacggatcaggaaatacctgaagtataatttttagaatccgagttgtcacatcaccttcaggatgttttcttattgttaatgccatgtgacaataaaagataacaatttttatataaataatatttctgttaaaattctgatctcaacttaggctattgttagtttacaaataggaaagggtaggatatcattaaattagggtaaggcaaaggcatgccaaatcttaaaggcttctcctattctggaattcctaggattaggcggtttaaaacccattcaccggcaaccaattacctccaacggtntggcctcgtgtggcgggaagggg

SEQ ID NO: 443161 - DNA, 583 bp, Homo Sapiens
atgagccactctctacttctatgagatcttttttaccttccacataagtacagtacatggagtatttatctttctgtgcctggcttacttaacataatgtcttctaagatcatacatgttgctgagaataacagaattttgtttttttaatggccaaatagtattccacggggtatatataccacattttatctgttcatttgctgatagacacaggttgattccaatcttgggtactgtgaatagtgctggaacgagcatggcaggtgcagatgtctccatatatggattttcttttggatatatacccagtagtgggactgctgaatcatatggtagttctatttttagtttgttcaggaacctccatactcttctccataacggttgtacaagtctacattcccactaacagtgtttaaacgttcctttgcctctgcattctcgtcagcatttgttactgtcttttggtaactgtcattctaacgggggtaagacaatctctcattgggggttttgattctctttggaacgaatatttctcctcattcctctactcctaataatggattttctgaaaaac

SEQ ID NO: 443162 - DNA, 711 bp, Homo Sapiens
  misc_feature (40)..(40): n is a, c, g, or t
  misc_feature (118)..(118): n is a, c, g, or t
  misc_feature (149)..(149): n is a, c, g, or t
caacttgtgatgttagagagtaccaggggttaccaacacntcaattaatactagcaaagaggtccttgttgccaactgagggtgagtgattcctttttcccaatactatctcccggcntgttttctagagccacttctagtaccaacgnccttggtttgtgttcttgccaaattaagagaaaaccacttgggtgcaagtagcttgcaaagggtgaatccagaaagccagagtgtggaagtaaggagaggagtcagaagggtgcacacttgagctgcttaccagacttgagttaggccacaatacccagtccttctaggatccctctggagaagcacggagaacacacttcagagctgtccctttggagggaagccacatcattcaacaaccaaagcccaccccgcactggctgagggatgccctcagacacgtaaactcctccatgcttgtgaagtgtgtcgacacaagctaagcgaactcccacacatctgtatcaaactctgaggaataaaagcaagcacttgaggtggaataaacaatagaagaaatgagagggaaagaatgagaaaagaaaggggaaaagccccttactaagcagtgctttacagagagaggatcttccctgtgagcccccacatcacctttcctacactgcattctaagcacttgccacattttataaattggttaagtatttgcaagtctgtctg

SEQ ID NO: 443163 - DNA, 806 bp, Homo Sapiens
  misc_feature (91)..(110): n is a, c, g, or t
tcggctctacctgttttgaacacaaggggagagatagtgatttttctccatgtagcagctgacatcaatcttccacgtgccagctcttaannnnnnnnnnnnnnnnnnnnaacggattatacaagtcaagcagcaccatggttagctgcccagtttagaaacaccatgttctattcgcatcagagtgggtcaagattccccagttgtgagtccagccttgctgcccattctgggcactatgtctaccttgtctctgatgattaactgccaccaactggcctccactatctcagaatcctatcatcctcattgatacttgggaacctagtttcacagtaacatctcctaaggtcaatcttgtcctacagaagacagccaacactgagcttctcaaagatgcaggtcccctcactgggcattccacattagcagagtgaaaggaataggccctcccaggaaaacaggcaggaggtgcaggtgattccttcctcaatactctgccaaaatagttctgatgcctccaccgcatttattgcagtccaaagtgacttaaccttagcactatgacattttaggccagataactcttttttgtggggagctattctgtacattggaggtggctgaatagcatccctactcaagtagaagccagaagcaaccttcagctgtgacagctaaaaatatatccagacattggcaaatatcccttggggaggcaaaatcagccctggttgcaaaccactggtatgggtcgttgtgtccaacttcaaggacctgccagccgcatccaagactggttcagt

SEQ ID NO: 443164 - DNA, 723 bp, Homo Sapiens
  misc_feature (438)..(486): n is a, c, g, or t
  misc_feature (571)..(571): n is a, c, g, or t
  misc_feature (644)..(644): n is a, c, g, or t
  misc_feature (656)..(656): n is a, c, g, or t
  misc_feature (697)..(697): n is a, c, g, or t
gtatgtgtgtcatttcaaacaaaaatagccctgaagcaaccctagttttcctgtggaacagttaatgcgtgccaaagtactgatgtggtagctctcccaaaattccctcatgttattcatgaaccttaaaaccttggaaaagaaagattgtaaacagatgcaccattggggtctacagtccccacctactgatttctttttctgataccagttgcagacaataatttatatggcttgctatgactaaatgtttctgaaggaaatatttgggtaaaactttgccatgaactgcaacatgggcctctgaattcctctcctttcctaattttattgtcacattctgagaaaataaacagggcatctattatgctaaagagaaagtataaactcataaacaactacattctatctgcctttaaccccccaccaggcaaaatnnnnnnnnnnnnnnnnnnnnnnnnnnnnnnnnnnnnnnnnnnnnnnnnngaatctcaaaaagtaaagtctacctgagaaataacatgaatcttccccaacagtcacaaatctttgccagagagaagaacactgntattttctttcacattcagagtgagaattttcttgccccaacttgctttcctttcattttaatttgacagttnctcaagctaatncaccatgggccccacataaacaagaagagtcttgatgctgngaagtgagagaaaaatacctgagcat

SEQ ID NO: 443165 - DNA, 383 bp, Homo Sapiens
  misc_feature (232)..(260): n is a, c, g, or t
gtaaataaggtaactgggcaatcaaacaccttttggggattctggctttagtattttatcagccattttaaaattaaatataaaaatcctttgtaagaaacttgcatcctaatttttctttattgcaattgaaagtgtaaataataagacaatgtaagtaagaccttcctaatgtctaatacaaactgggctccagcaagtggccctatttttattagggttttgaaggttnnnnnnnnnnnnnnnnnnnnnnnnnnnnnttttcttttttaaatgtatagtagagtggtgtctgtataagtgttacctgtagtggggttttgtccagcaagcctgaaatttatactttgaaataaaactactgggtttttaaaaaagaaaaa

SEQ ID NO: 443166 - DNA, 937 bp, Homo Sapiens
accactgacatcaaggtttactgtgaaatgcagcagataaatattttacaataggaaatttaatgaaattcatacttttaagcaatcatttcagtaaaagaaattgttatagatgatgtgtatgtatgacgatagattcagaactggttagagttgaatttcagcattacattttaaaggtatttgccaaaccctaaagctcattttatttcaagtgaaaacatcatcatgaaaaaagtcacgtcacattgactaacaaggttggtaacaaatgtaatgatcaactttatcatttaacatttcacaagactttttattggtttctaaaaagcagttaatattttaaggtacggtatataaacaaaatagccatatctgatttttggcaacatgaaaatgccaatttcctttcaaaccaattcccggactacagctacaaatgtggtcaacaacgtcatcctggagtaaaattcagctcctgacacacacttctatggcaattataacatagttaacacttggcctgtacctatatgaacactgatccattgggggccactgaataaaaatttcttcaatctcatttgctattttagttgaggattctaatttacagaagagctgggcctttccttctcccattccttttataacttcctatccagtttcctgcagtttgtttttcctcctatttgaattgttcttataatctttaaacgtttctgtttccattcactttatgcgtgcatgcttctctatgacttatcaaacgtagcactgggtgtaaagtggtatttttccaaggtcaaaaaaagtatacgaattcatttattaggattaggcttaaactgctttcattgagattattcaaaggatttttgccctcattaaaattatatcaagtaaatccagtaggccaacaggccaaggaatccaa

SEQ ID NO: 443167 - DNA, 604 bp, Homo Sapiens
cccctattaacgctgcacccgaatggctcctggctgcctcacagtccgcctctctcctcacagttcagcactttattcggaagagcattagacctgccatccagacagcttgtccaccttcactcacagcctcacaatcccagaacctgtgctgccccctgcagaaatcctgcatgtcctgggggcagccaccaccccagcccatgatgatgctcttcaaaattaacttttgtttcagaggaggtgaccaaatgcgcttcggtgaaatcaggtaaaagctgtttgcaaactgtgcagggtctcggcagatgccctgggaatctttagctcttccgtccacaaggattccaccaaagttagttggtttatcagggcctctttttcatccttcatatgagacaccttttgaagcacagcattagtctcttctatgaaataatagcatattttctgggctatgtccaaacttgtcttctcattcgtatctgaaattacctccccaagaagtacttttttccagcatgtaaatttctcagcttccagacataaccacttaagggctgtgagtagcctccaagatggtccatcccatccaaatgtcaaa

SEQ ID NO: 443168 - DNA, 704 bp, Homo Sapiens
  misc_feature (558)..(558): n is a, c, g, or t
  misc_feature (576)..(576): n is a, c, g, or t
  misc_feature (595)..(595): n is a, c, g, or t
  misc_feature (652)..(652): n is a, c, g, or t
  misc_feature (657)..(657): n is a, c, g, or t
  misc_feature (680)..(680): n is a, c, g, or t
cctcagggttggttggttatttacttatttatttacttaatacacttcattttttagagcagctttagggttacagaaaaattgagcaaaaagtacagagaattctcatataaacctttaaccctcccatcctccacaggctccccaattattaacatcttgcatcattatggttcatttgttacaattgatgagccaatagtggtacactgttattaactgaagtccagagttgacactagggtttactctgtgttttccgttcactgttttccattctctgcattttgacaaattacagtaccctagagagtactttcactgtcttaaaaatcacctctctacctgccatccctcctttcccctcaactctcagcaaccactggtcctttcactggctcaatagttttgcctctcccaaaatgtcatataattgcaatcatacaaaatagaaagccttttcagattggttttcacttaacaataagcatttagggtttctccgtgtcttttaatgacttgatgccaattcctttttatcatctacctgaggactgnatcctgcaatcctgctgnaattgcttattaatgtcancagggtttttgtatttagaattcttacaagacaatcatgtacttgggaacaaagtgnatttnatccttcaaactattggcctttnatttcttttttttaacactggctt

SEQ ID NO: 443169 - DNA, 925 bp, Homo Sapiens
  misc_feature (781)..(781): n is a, c, g, or t
  misc_feature (811)..(811): n is a, c, g, or t
  misc_feature (864)..(864): n is a, c, g, or t
  misc_feature (886)..(886): n is a, c, g, or t
  misc_feature (898)..(898): n is a, c, g, or t
tcgaatgtggctagacaacccaactgctttccctgtgcagctttgtagaaggacattggcacagtgacttctgcggcggggatttattaatggattttacaatgctaacgtggtttcccttcggggataaaactggcaactagaatccttgtcactgataagcaaaggaaatcctgatttttttgtaaattatgtgagacaagttgtttatggattttgatatgatgtacaatttactgtacatcaaatcttagtctcagaggagttaatttatgtaaagtgtttaaaaatttatacttaaaaataaaatgataaaaacgtgaactgtgtgattttttttaaaaggattgcaccttttgttatctgttatagctgtacagtatgaattattatattgtagagatataacaacttatgcctataatgtccagaagtgttaatatttttgtattaggttgaaaaaatgtgcaagcttctatcactagatggataggaccgtgcaattctaggtgggtggcgaatcagagagctcctttctcttccctctctcacgcatcaggccagtgtcctcagcattgtcaactgagaggcacagtagacaactagggctggtggaatgtaagggaagaagattgaaaaaacgggaggaagggttctctggccctctctcaaccttgcaagtcaatggggagttgttgatataattaaccccgaggttttttactgttactgttccaaagctctgtctcttgatgggagggagagaccaccttcagatgcntggggggaatagggagggaggaaagggttntgatgttagtccgtgatccccaaacacgtgttctttaaggtcttggggaaggncagccggaacccagccgtggtngggttagcccanttggagccccttcagggttacttttag

SEQ ID NO: 443170 - DNA, 534 bp, Homo Sapiens
aaaatttattatttattatttctttttgctcttgtttcgtttctcttccttgagcttctttttggagactttgggtctattggcctttctgtataggtgatacccaatgaggcccaggagggctggcaccatggccatccctaccagaggcaaaatgcccttcaccagctttagccagtagttggctcggattagtgcaatcagctccacgtcatactgcaccactgcatccgctgggacagatggtggaaatccccgttttccataggccaagtgagaaggaatgattgcccttcgcttctctcccacacacatgtcgagaagactctgctccagacctggaatcacctgcttttggccaagttctataaccagagggtctctggtcagggaggtgtcaataatacgtccatctaccaagcttcccgctgtaaggaacaggaagccccagaaggctggcgcttctcggagatctctccaccctgcacttctccgtgccaggtaggaactggcagaaaagcaaggagggaaaag

SEQ ID NO: 443171 - DNA, 531 bp, Homo Sapiens
tcacatataaagttaagaaggcaaatgacaagaacaatacgaatcagacaaaattttcatctcaaaatatcatgaaagcattttgactggctttgcctaaaatactttgaatatcaatttcttttttgtaagctaattcttttcattatacagtcccccagcccctcctctactcttgtctaaaggaattcaagcccacatttaaatcttgtcagcttcatagttgttggctttgctgtggcctacgctccctattttcattcagattctgagccctggataaaatgcagagagtctaaccctctccacccctctgcctctccagcggatgcagtggtgcagtatgacgtggagctgattgcactaatccgagccaactactggctaaagctggtgaagggcattttgcctctggtagggatggccatggtgccagccctcctgggcctcattgggtatcacctatacagaaaggccaatagacccaaagtctccaaaaagaagctcaaggaagagaaacgaaacaagagc

SEQ ID NO: 443172 - DNA, 1349 bp, Homo Sapiens
  misc_feature (137)..(147): n is a, c, g, or t
  misc_feature (277)..(289): n is a, c, g, or t
  misc_feature (1070)..(1089): n is a, c, g, or t
cccgtattcccccgcccttgggtaaccacgggccgtcggatccccctaggtttggggaattggaggccagacctggccccaccagggagaagcccccttcttttttaaagagtataaaatccccccgttaggggggnnnnnnnnnnngaattccccactatctcggggggcggaccaaggagaatcgcttgaacccggggggcggaggtttttggttagtgaagaattccactattggccctccaggcctggccaccaagagtggaactccctttcnnnnnnnnnnnnnggaattccgagcccaatcttctgtggagtacaccccattttagctaatagaacatttgttagacctgaaagcaaaaagatatgcatcttgggaaatctgtccatctcaacccttcaaaaatagacatcggcagtgaccaatgatggcttttaaagttatggggcagacttggctttaacagttgctttttgttttgttttgaatcacttgactgtgattatttttactgtctcttccctgatggaggctgaaaggaaggggtggggggtggctgtacagctgacacagcgtagagttgtagaaaagggcaggaaagaagtccagtgttctgggaaaggtggtggcacaggcagcagacccatgtggcccaagcaggtctcttccctaacaagttactggctgctggaggtcatgccaggtggcctcatcaggttgtctttagtccctgggacagatggtggaaatccccgttttccataggccaagtgagaaggaatgattgcccttcgcttctctcccacacacatgtcgagaagactctgctccagacctggaatcacctgcttttggccaagttctataaccagagggtctctggtcagggaggtgtcaataatacgtccatctaccaagcttcccgtgtagtgtatgtgaagcgtgtctccaaaagcagcgggctcggcacatggttctgggggctccaccagggtctccacttggagggtccggacgggactttcggtttggagcccagcctcagcccggcacaccgccgcactgnnnnnnnnnnnnnnnnnnnnatggagcgggaggagtgaggggcgcagggtcatgactgggcgcggggcagggagccggggcaccaggacaggctgttcgggtggcggcagccaggacagcgttcccgcggcgcccaggccagactggacgggacggggcgggtcgcgatgctagagctcctcctcctgcagcccttcctccaccttgtccccacctccgaaagggaggaggccgaggggcgccctccctcgtgccgaattcgccacccaggcctcgctac

SEQ ID NO: 443173 - DNA, 799 bp, Homo Sapiens
  misc_feature (50)..(56): n is a, c, g, or t
  misc_feature (58)..(60): n is a, c, g, or t
  misc_feature (64)..(65): n is a, c, g, or t
  misc_feature (68)..(68): n is a, c, g, or t
  misc_feature (75)..(76): n is a, c, g, or t
  misc_feature (652)..(671): n is a, c, g, or t
ggttttagaaaaggcttcttgaagggcccgaggccgggccgaccaagggnnnnnnntnnntttnnttnttttttnntttggaaaatttaatatttattatttctttttgcctcctgttcggtttctcttcccttgagcttctttttggagactttgggtctattggcctttctgtataggtgatacccaatgaggcccaggagggctggcaccatggccatccctaccagaggcaaaatgcccttcaccagctttagccagtagttggctcggattagtgcaatcagctccacgtcatactgcaccactgcatccgctgggacagatggtggaaatccccgttttccataggccaagtgagaaggaatgattgcccttcgcttctctcccacacacatgtcgagaagactctgctccagacctggaatcacctgcttttggccaagttctataaccagagggtctctggtcagggaggtgtcaataatacgtccatctaccaagcttcccgtgtagtgtatgtgaagcgtgtctccaaaagcagcgggctcggcacatggttctgggggctccaccagggtctccacttggagggtccggacgggactttcggtttcgagcccagcctcagcccggcacaccgccgcactgnnnnnnnnnnnnnnnnnnnnatggagcgggaggagtgaggggcgcagggtcatgactgggcgcggggcagggagccggggcaccaggacaggctgttcgggtggcggcagccaggacagcgttcccgcggcgcccaggccagactccc

SEQ ID NO: 443174 - DNA, 713 bp, Homo Sapiens
cacattgggttggcttttattggaatgcctaggtgcaatctatagtcatcaagttatggaaaattcaggtcacatataaagttaagaaggcaaatgaaaagaacaatacgaatcagacaaaatttacatctcaaaatatcatgaaagcattttgactggctttgcctaaaatcctttgaatatcaatttcttttttgtaagctaattcttttcattatacagtcccccaccccctcccaactcttagaaaaaggtcttttgtttacatattccccaaggtcactatttcttgtaaaagcatgtccagatcacaagtctttttagaaagaaataggctcattatacctactaacaggacactaattgggttgatttgacttcatcatctaaaataagcaccaggagatactccaaatctgttatttatcggtgcccgagtgaagaccagtccacgtcaagaagaggttaagactatgatctcacttctgtcatgtggcacaagcttttcatggtaatacatcagaaacatgtctgagaatttagactcagagcctatttcacccaaaagtacttacagcatgctaaatacaggcctgcagaagttccacggaacagaactgcaaatacctaacagttaaaaaattaaatggaaaacagaatcatgtttatgtggtttgaaatctcatagttttctaaattggggcgtacgggga

SEQ ID NO: 443175 - DNA, 574 bp, Homo Sapiens
  misc_feature (407)..(407): n is a, c, g, or t
  misc_feature (431)..(431): n is a, c, g, or t
  misc_feature (456)..(456): n is a, c, g, or t
  misc_feature (460)..(460): n is a, c, g, or t
  misc_feature (485)..(485): n is a, c, g, or t
  misc_feature (498)..(498): n is a, c, g, or t
  misc_feature (512)..(512): n is a, c, g, or t
ttttttttgtaagctaattcttttcattatacagtcccccaccccctcccaactcttagaaaaaggtcttttgtttacatattccccaaggtcactatttcttgtaaaagcatgtccagatcacaagtctttttagaaagaaataggctcattatacctactaacaggacactaattgggttgatttgacttcatcatctaaaataagcaccagggagatactccaaatctgttatttatcggtgcccgagtgaagaccagtccacgtcaagaagaggttaagactatggatctcacttctgtcatgtgggcacaagcttttcatgggtaatacatcagaaacatgtctgaggaatttagacttcagaggcctattttcacccaaaaggtactttacaggcatgctnaaatacagggcctgccagaagttnccacgggaacaggaactggcaaatnaccntaacagtttaaaaattaaaatgggnaaccggatcctgntttatgtgggttgnaaatctcataggtttctaaatttggggcttcataatacttggccaaggttttccggattaaa

SEQ ID NO: 443176 - DNA, 543 bp, Homo Sapiens
gcaggcgccgcgggccaagggccgcccgagacggtccccagagagccaccggaggagcagctcacctgagagacggagccccggctcgcccgtgtgcagagcggacaaggcaaaatctcagcaagttcggacctctagtacaataaggcgaacctcctctttggatacaataacaggaccttacctcacaggacagtggccacgggatcctcatgttcactacccttcatgcatgaaagacaaagcctacttcggacacctagctgttgggcagaagagggtgcagaaaagaggtcacatcagcgttctgcgtcatgggggagtgctgatcaactaaaagagatcgccaaactgaggcagcaactacaacgcagtaaacagagtagtcgtcacagtaaggagaaagatcgccagtcacctcttcatggcaaccatataacaatcagtcacactcaggctactggatcaaggtcagttcctatgccactgtcaaatatatcagtgccaaaatcatctgtttcgcgtgtgccctgcaatgtagaa

SEQ ID NO: 443177 - DNA, 593 bp, Homo Sapiens
gtcattttcatccatcacaaaaagcgagactgtagctgtggcagatctgggaggatctcccccatccacagccttgactctgaaagtgtatgtggtctgatgttcccggtcaaaagacattgtggagtaaatggtccccgtgtcattttcaatagaaaaaatgttattgttctcctctatgtacaggctcatctctgcattccgccccttgtcagcatccatcacggtgaccatccccacagggctgttgggctgcaagttttctttcacataaaaggtgaagacgtcctgcataaacttagggtcattgtcatttttatcagccacctgcacaatcaccgtagtgcctgccctgcagagggggggatgcctttgtctttggcgttaactttaaactcatacctgtcagtctgctcgcggtccagcacggtattgaccaggatgtccccagaatcgggatcgatggcaaagatccccatcacagaggagtccagcgagtaggcgatctcggcgttcttaccgctgtctgcgtctgtcgccagcaccgtggccaccctctcgcccgggatgtttgttctcagggaagtaaaact

SEQ ID NO: 443178 - DNA, 465 bp, Homo Sapiens
ttgatttcgtttctaaacctgtgaatgatcgacagcatctattaaacttccatgataatttcaaaacctaacagacttctcctagtaaacttagcaaatagattttgatgttaaatcttgtatactttcaggaaacatgttctccaaaaaacccaaattaacataaattaactaactcaaaggtatttaaaatcatcaatagtactttttctatctagggaaataaggcactaggaaaagaaaatgcatgtaagacaaataatattagtgaattagtttatttaaaaccatcagtttttccaatgtgaatggactggttcatatcacaccatatttagagatacaaggtgattataactaacgtgtctacaagacatactgggtcaaacaatgtgatcaatccaaagggtatctttttaaaaagaatttaagtactcagctgcaaagataagttcactaatgaga

SEQ ID NO: 443179 - DNA, 646 bp, Homo Sapiens
  misc_feature (24)..(24): n is a, c, g, or t
tagctgtaactacaaacaaggaanacataattaaggacacattttattctttaatttattatttgttaatgacttcaaaaagtaaaagccaagacacaaggatattttgtttctctcactaattttaatgtctgtatacaaggtttagatatttagttttaatttgtttaagctggaaggaaaaaaacacacacaaagaaatataggacaagttctcctggagaactatacccaaaagaggaacattagcactgatggtaactcaggataaaaagggagaatgagatccaagagtaaattagctgtgttgttacataaatagaatttagttagaaatagagctactactctatttcaaagatatgaaatagcaaatatcctgacaaaaaggttaacatactcttgttcttactgtgtaggacatgaaacaacaaccaattacatatcttttaaaactacttgaataagcaatacttacataaaacatagctcaatatatcagatgagaaaatggcttaatactggtaatcattcacaccgttatagagtacataaattctgggaaagacatcagtttcaaaaattaaaatgtaatgaatgacagtgacataaatttatctgaaaataatagtaaaattttcttata

SEQ ID NO: 443180 - DNA, 750 bp, Homo Sapiens
  misc_feature (557)..(589): n is a, c, g, or t
  misc_feature (642)..(642): n is a, c, g, or t
ggtttacaagaggaatcacaattgctaaattaagtcacttctgatgccatttctttcatttccactgctatgtgtctgggttttctaaggcaatgtaactactgaacatgttcaagtttaaaaaactatacttctctcagtgccgttccacccacaaacaaagaagaatcagatcagaccaacaacataaaacttctaatgaatatgtatgactgtaggaacatgaaattcagtcattattaagtacttgctatacttgactacacaccaattgaaatgtgcaaagaattccctgtaaataaaatctcagcgtgttttctaagaagctttctgtttggggaattcaaaaatgggcactaatgacttttgagcagtgctttccaggaggtcaaaggcctgtttcctcatacataatggtcatagcactctttttgtgatttaacaatctacacacttttataaataaatattatgtttcatttagtactttatcatccataatatcttactctctaatccacataatggagttgtgccagactccaaactgaacatannnnnnnnnnnnnnnnnnnnnnnnnnnnnnnnncacacatacataaactataaacctgaatatcttagcatacaaaacttatctanccactaataatttaggattcctttgagagggaggggttagaagaaactcttcttagtctttgaaatagtcctgacagtaagcaataaacaaaccagtaggcggaacag

SEQ ID NO: 443181 - DNA, 748 bp, Homo Sapiens
  misc_feature (53)..(53): n is a, c, g, or t
  misc_feature (57)..(57): n is a, c, g, or t
  misc_feature (62)..(62): n is a, c, g, or t
  misc_feature (115)..(116): n is a, c, g, or t
  misc_feature (609)..(609): n is a, c, g, or t
gactgatgtgagatggcatcttactgtggtttttgcttgcatttatttatttnatgnttagnaaggatgagtgtttttccatatacttgagtgtcttcttttgagaaaatatctnnccatgtcctttgcctttccttgatttaaattttaagttctggggtacctgtgcaggatgtgcaggtttgttacattgataaacatgtgccagggtggtttgctgcacctatcaacccatcacataggtattaagcccagcatgcattagttattttttctaatgctccccatccctcccctccaccccccatcaagccccagtgtgtattgttctccaccctgtgtccatgtgttcttaccgttcagctcccacttctaagagacaacatgtggtgtttggttttctgttcctgcgttactttgctaaggataatggcttccagcttcatccatgtccctgcagaggacatgatctcatttcctttttgtggcggcatagtatttcatggtgtatatgtaccacattttcttcatccagctttgtgatactaaagaggccaagttacttactacacattcaccaaaaatacagtggcaaaacaggaataatgnctctagacattcctgttgaaaaaaatgggaaaatgcacagactaaaagaatgattggtccaccacattttaaaatcccagtggtaaatgttgcaagtcatttgattatattcaacgcctgtgaataattattcatgcct

SEQ ID NO: 443182 - DNA, 197 bp, Homo Sapiens
aaatgataaattcttatttattgaaagacattcagttgaggaatagggatataactgtttgttaggtaagcttatatggcacatgattaagttccactaattcgtatttctgcattatgctttctgataattccggagcattatactcatgcagcagtggtaggaagtactgatgtttttttaaaaaatgtccattc

SEQ ID NO: 443183 - DNA, 650 bp, Homo Sapiens
  misc_feature (541)..(541): n is a, c, g, or t
  misc_feature (571)..(571): n is a, c, g, or t
  misc_feature (574)..(574): n is a, c, g, or t
  misc_feature (578)..(578): n is a, c, g, or t
ataaaaaacaattgttatttgtgtacttttaaaccctcacagtaatattttcacactaccttcttggctgaaagttcacactcggaattccagagcagtccatggccaggcccactgggctccccttgctctctccttggctttggtaaccactggccccagggactcagcctgctttcctatccatcccctcagtagctgtcaccatgcaggttaccccttctgtttcttctaccactaactccatgtctgactgcaagtgaaaggaacagaagcccaaacctttgggttttaaggagtttattgctaatctgtaaaacagaaagagacaggagataagcatgacaaaatatagggaagaaatgacttttgcctaaacttccaaactgtgtacaattgaagcctctgctttatagctcttagcacacctctcaaataagaaggccagtactgggaaggctctgaacctgtggcagaaccactgatagctgtggagctattccaaggagtctgggaatcagggggattatcaaaacattgntagaataaattaatcttactggatatatancanaaanttttcaagcatatgtaaatgctactaataccaaataattacaccttgttttctttaaaccggaactcttaaa

SEQ ID NO: 443184 - DNA, 1195 bp, Homo Sapiens
  misc_feature (996)..(1014): n is a, c, g, or t
  misc_feature (1110)..(1110): n is a, c, g, or t
  misc_feature (1125)..(1125): n is a, c, g, or t
  misc_feature (1141)..(1141): n is a, c, g, or t
gtgtattcctgggtggttaagggagacagggggaaaaatttttttgggtgggaggccccaaggggtactgtggctttttctttatccccaaagctagggtttctcaaaaatttcccttgggctttccaaaggtttattcccttccaaggcccttggggagccttcccccaaaaaggtggctttgggaatttaacaaggatggctgaagtccccttggcccccctggcgcctggggctatgttcctttaaaaatgacttggggtgggtaccgtcttagtttctctgttctccccgtttttctgccctgggggatgatgagaacctggagcgggtcatcctgagcttacaaggggaagcccttgtgttgaggagggctgattaactggacttggaccacgtgcctacctcgaccgttgtgagaaaaattaactgcattgtggtaaatcctttgcattttggactctttcttacagcagcttagcctgtacctcacctccacttatgagcctactcattctgcaaatatttcaccagcctagaaagagcttctccatcctctgaatccaaagccctttgacctgcctcttgtgtttggcctcactatttacctggtactacatttgtctgtgcatgaatcttacctgctctttgcaggccaaagaggacaggggtaaaagcttaatcgctttctattacacaatgcctagcatattgccttggacaatgattggttcccaataaatgtgttgaatgaagaaagatgattcttcattgtctgtatacatgaatgaattataacaaaattagaagctagtgatatttgattaaataaccatatctaaaaactactagataagagattactgtcaagctagagaatgaggtgccaagttggcaagctactggtttttctcctgttcaacatttgtatcaacaacttcaatgaacgatagtcaatatacccattgtgcctgtggataacacaacgggaagccnnnnnnnnnnnnnnnnnnnctagataagagagtcaaaaatcaaaaagatctgtacagacaagaataatggatgaaaattaaacattaacagaaaagttctgaatatcagttcaanagtaggcaaaggganataatggaagagaagnagtttaattaaagactatgaaaaaggcttaaggattttatttgagggaagtctg

SEQ ID NO: 443185 - DNA, 704 bp, Homo Sapiens
  misc_feature (527)..(527): n is a, c, g, or t
  misc_feature (534)..(534): n is a, c, g, or t
  misc_feature (549)..(549): n is a, c, g, or t
  misc_feature (608)..(608): n is a, c, g, or t
  misc_feature (641)..(641): n is a, c, g, or t
  misc_feature (645)..(645): n is a, c, g, or t
  misc_feature (670)..(670): n is a, c, g, or t
  misc_feature (680)..(680): n is a, c, g, or t
  misc_feature (684)..(684): n is a, c, g, or t
tcatcaaaggaaatgatttttattgttacacaaaacatttcttgtcagagcacacataaatctagacagcagctgcattttcagaacaaacagatgaaatacctttggtgaactgtgagttggggaaaacaagtcaccttattttaaaatttggtaatgtgtttactgagtttaacagaaatcaaaatcaggacagagtgagagaaaacatttctgtggaaacaaaatgcgttctcatgagcacagcctattgtgatgcttattattttacacagaaagaagaagaactgggttccatttcctgggcttgggaaaatgcagcaaaccctgaccaatgcaaagaagggcttcctgggtctgcctcttagtctctgagctaacagtgctccccagctgccttctgacagacgcatataccagctgacacatccgggagcacacagctacctgtgtgtgcacagggcagaaccaaccgggtttattctcatcacgttgtcgttccacagccgtcctttcagttcattctnctgcttncatcggggctactgnggtagctgcctgcttcggggcctcaaccccaccccaactacaaccacaccggccttgangcttaaaaggctgactttaccatccaccttgangggnccattcttaccattttcttggacanttttaaaaancggnggacacttttaagtccggcc

SEQ ID NO: 443186 - DNA, 591 bp, Homo Sapiens
  misc_feature (29)..(29): n is a, c, g, or t
  misc_feature (36)..(36): n is a, c, g, or t
  misc_feature (44)..(44): n is a, c, g, or t
  misc_feature (65)..(65): n is a, c, g, or t
  misc_feature (338)..(338): n is a, c, g, or t
gaacctgagggaacctatttcatattccntaatttnctggaatngattacttggttttccctagnaaaacttctgccatttttggttgcaaggtattctaactttattaatcatacaggttaacatgatatctgtttatctctaggtattccaaagaatttgtggaatttacttaatgctttttttaattgctcagacagaaaaggaaaatggaggcctaggggccatatccccttaaggatatgttttctttggcccataccaaaagtttttctaaatctgaataagctgtcacatttaagcatcaaaatctggatttgactctgttctgatagganagacatctgaggcacaaacttgcatttagttttggctacatcccttgtgttccatatacagtaatacataatagttggcttacacatcaagtgtttctaagaccctcacatgtaatccacaagaatcccaagtgcagcgtgcttctattaccatttcacaaaggagaaagctgaacgtgcagggaagtcactggctcaagagctcaaacttataaacacatggcctatccattttcctgtatttgtaattagc

SEQ ID NO: 443187 - DNA, 489 bp, Homo Sapiens
  misc_feature (290)..(290): n is a, c, g, or t
  misc_feature (308)..(308): n is a, c, g, or t
  misc_feature (369)..(369): n is a, c, g, or t
  misc_feature (377)..(377): n is a, c, g, or t
  misc_feature (421)..(421): n is a, c, g, or t
  misc_feature (426)..(426): n is a, c, g, or t
gaattataaaaataatagcttcatatgtcaacacattcaccaatgctgaggccgatttcctccaaatcattttagtatattaaaccgttataatacatggattttgaggaaagtccttcaattattaacagtagctagtgaatcttttatgtgaatattttcgcaaccatgaggagagaacaccaaggcttttgcttccccaccactgctccactggaataagcccatctcattaaggacattacctgccctgccataggacggtgagcagcttcagcctctgcctctgnttttccaaattactcggngaagatcaatattccaggtgtgaagatcccaggacaagcagtaaagatgtgaagagggttncattcacngggattcaacgtttaagccttcattagcacaacaacctttaaanggccnccacccaaattgccaatccaaattgccaatccaaattggggtgtgggctggtgaatcaaaagg

SEQ ID NO: 443188 - DNA, 1052 bp, Homo Sapiens
  misc_feature (318)..(326): n is a, c, g, or t
actttctgtgagcttatgaggccattctgcacattatcaaaatgaaatcattatgcagtaaccttatatatataaatccaattttttcctttgtagaagaaaaccaaaataattttacaaactacatttaacttagaatataaagaactgactagtgtaaaattttgaaaatctaccactttattttgaaggaaagtacacatccttcaaaaccccgctaacaattcctagttcagttttctattatacaaatcaaaaagttaaattccttgtggcactaaccaaaacttaaaaattaacagaagactgaattaattnnnnnnnnngcatactaactaatcaaaacaatccactgtgcaatgaatatttgaacaatgaaaaaaacctaccaagcatcctaatcaattatatagttcttgcttccatattttaattctggactttcaggatggtaaattattaaacaggtcgatttcatggactgtctaaaccttgtagtatttcaaaatattaccctttctaaaccaaatctgtggtcctaatcaactttttttccaagaaaaagaaacgatatgtgtttaaaatacattccgtagcagtagaaacatcttagtgtctcaaaatactatttacaaagaaccctgctgatcctgtgcatttcgctgaggtgctacttgcacccagacttcatcatctgaaaaagaacttgaacttcctgactcagagtccagctcactgaatccatctaagtcccattcagtactagaactcactccgtgcatcatcttcctcagtaataaaactctgaccaggttcaaggcaggaaggataaacacgagcacaaaggcaaataaagccagagtcaaactgcaaaaggcctaacatggtacctatattaatccactgatcttccctagtatcatactcatacactgtcactcggttctttttccattgtggggttgtagaagtgatgagaagcaacttttggtcatgattgacaatctggtagttgtgggtctctgaatccaaaggaatattactaatccgct

SEQ ID NO: 443189 - DNA, 644 bp, Homo Sapiens
  misc_feature (97)..(97): n is a, c, g, or t
  misc_feature (565)..(565): n is a, c, g, or t
ctagtaccagttttatttataactaaccatgtacaaatcacttatctataaaataatggttaacatttactccttaattcacaaatagatcacaaanagcaagatccttcccaagaaaaccttactgtaaaccaagacattcccactatttagactaggttttaactcaaaggttaagaactcaaaggttgagaaagacaaactggagcatttgtcttttatttaccagttgcataccttaattctgcagatggataatctggttgagataagcattgccatctctcaatttttacaaaacaaaaagctaccaacaagaagttaatggtgaagaaaaatttgtctcaaaaataacacaattgagaaatagctttgtattaagtgcagtacttataacatccctggatgtcaaatgtacaaaatttagctttaggtcactaaagcatgtttacccttttgaagaaacatgtattgctaggtcagccatcctacttcactggaaataacgttaaacttgtagactggtcaaatggccaatcaaaatgactaagaaacattatcgggnggttttttggttggttgggttttcatcctttctctttcctttcggtcaaaaattcagttcccatcctaaaccaaactct

SEQ ID NO: 443190 - DNA, 1501 bp, Homo Sapiens
cagggtcctgtcttttttattatccagacacacgtatcagagcctgctaacatccagttgtgggaagagcagcaagcagtacaccaggagccacaggaagagaataaaatacatcatatccggctgctggacaagctgtgtcagggagtcactctgcgggctgtggctccccaggtgacatggcttctcctgagctgttggccttcctggttaatattcggtttcttctgtcatccagatctgctgcgttcctcaactgaacatagctaaaatgatccgattccgaagacctatgagtatgtcgtcgtaaggtaaatgctggagtcactgtgactagtcctggagagggaatgctgtagtcgctactgtcttcttctaggtcatctgaggattgaacacttcctggtgctacacatagtgaactttctacgtggtccacatgtttcctttttaccttttgatttactactgattgattctttcgttacattttcttctagggggtttgctatgttttccaggtttggggattcctgggactgatggctgtccatggggtcattctctttggtctccctttgctggtggtcctcatggggggccagtggagcgggttctgaggctggtgtggtacccacaccacccctgctgagatacagcacctggtcgctggcactggggaggctctctcctggcaccgaggaactggagctgctctgagagccatcggcctcctcctccctggagtccaggtctggcatatagccctctggctcttcgagatccatttcttcattttttagatcctccgggtcttctacataagcctccaaaactgcagccaggggaacctcatagtgtgggaaatagaagaggtcgtggggaatgacggaaacctttgagaggggtggggagggcttgaaatccaggccttcttcgctgtgactcccaagggtctccaagctgacacagctgcttggggggctggaagataattcctcgcccacaccctggaggtcatcgtcttctccctcttcctcataatgaggacgggtggactttctcttggccttttcatgcacctctggctttttatccactggtgtctctttttgggcttgaaggacagcctttagcttctttttccggagtcctgatgaggttcatgtttgtccatcttaacttgaggctctggcgaatccttctttttgtgagcagatttaatactccttttacctagtttttcagcatgattctcaaaagcctcagcatcctcgtcaggttttgtctcatgaggtgaaggaactttgttgaaagcctggctggtagaagcaaaatctattaggtcgctgttaaattttgaggcttttaatgggatggcttcaaaatagtctccctcctctaaagcttctacagtcatcaggttaaccttgatctggaaggaatcggccatcacagcctcgtgccgaattcgacacccagcctcgcacctagaccgtta

SEQ ID NO: 443191 - DNA, 782 bp, Homo Sapiens
  misc_feature (51)..(51): n is a, c, g, or t
  misc_feature (83)..(83): n is a, c, g, or t
tcattcatctcacttttccttctaacatcaaggatctatacaaggccgttnttccccactgctgcatatttcttggatctatntgaggtcccagatcccattgcctcttcatcctcacagccattgctgggtctgggtcctcataagttctatctggaagtttcaatacagtctttctcgatgtgctccacactgttatgggaatgaattttcaaacacccctgctttgaagatagggtgcttccagggtaaggcataaagttctccagggaggcaacagtgcagtggtatacagacagcacagcctttcattcctgcgaggccacttacacctgaaattgacatgctcatctttaatctagatgtttttaaattgtcttgttttctttcttgttctcgaaagaataatatttttcttgataaatccgactcttcatggacggatcttgtggaactgccctcatgtgttccactatcaatttttgcttctgccaacaaagggttctgtgggtaaatgctgctgtctttgcttctcctcatcctggcttgttgatgggtggacaagcaaagggcatggaaggatgaggccttcagctagggctcaatccttatttgtagcagtcttattaggaaaacctaaaagagtctgatttaaatctcttgttcccagccaagcccaggttttgaggatagagtcgtgagaggtggaatggcaagagcagagatggccaaatcctgacttgatatttggtaggcccaactgatgaaatactttaaccagt

SEQ ID NO: 443192 - DNA, 827 bp, Homo Sapiens
  misc_feature (677)..(677): n is a, c, g, or t
  misc_feature (682)..(690): n is a, c, g, or t
  misc_feature (707)..(707): n is a, c, g, or t
  misc_feature (719)..(719): n is a, c, g, or t
  misc_feature (721)..(721): n is a, c, g, or t
  misc_feature (754)..(754): n is a, c, g, or t
  misc_feature (759)..(759): n is a, c, g, or t
  misc_feature (806)..(806): n is a, c, g, or t
ttttttgaaggccatgctaattttattaacttatatagggcataaagtctagaatttaaaattacaaaggttttctacaaatcaataagaaaatacaaataacctatattaatcagaacagaaactcaattcaattatcttaaacaagaaagggactttattggctcacaaaactttaaagtccggaggtagggcaggctttaggcacagctggatctagggcctccagaaaaatgacatcagaacttagttctctttccatttctgctagcatccgagtttctcctcagacagactctctccacatggcacaaattcaggcttacatggtccttggttcctgggatctccataaagccttctttccagtagttccagcagaagttctgttaagggctttccttagcctggcttaagttatatacccattcttttatcactgtggctaggaagctgtgggactcaggaggccaggcctggtcacatgctcacctaagccacagggaataggttccccacaaataaataaaggttgtgttaccagaagatggggaaggagatgctgaacaaataaaaacaatatatccacacataacccaatagaaagcaggtaagggatacaaacaatccacagtaaactataaatgggcaataaacatgaaaataaccccaatctnaccannnnnnnnnataatcagggaaatgcnaaataagaaaangntcttttttggccaacagataaaaactatcaagngaagnatgggtatatgggggaaatgacattctcatacactttgggggaaatnccgttatgaaggcctttggga

SEQ ID NO: 443193 - DNA, 1252 bp, Homo Sapiens
  misc_feature (1142)..(1154): n is a, c, g, or t
gcctactggctttttttcagcccaggggcccggcgcacgaaacctgtttgggaggttatgggatgataaacccaatcctgaagccctaagtgacagttcagagcgtcttttctcctttggcgtcatcgcagatgttcaatttgcagacttagaagatggctttaatttccaaggaaccaggcggcgatactacagacatagtcttcttcacttacagggtgccattgaagactggaataatgaaagcagcatgccctgttgtgtccttcagcttggagatatcatcgatggatataatgcacagtataatgcatccaaaaagtccctagaacttgttatggacatgttcaagaggcttaaagttccagttcatcatacatggggaaaccatgaattctataacttcagtagagagtatttaacacactctaaacttaacactaagtttctagaagatcagattgtacatcatcctgagaccatgccttcagaagattattatgcttatcattttgtaccattccctaaattccggttcattttacttgatgcatatgacttgagtgtcttgggcgtggatcagtcttctccaaaatacgagcagtgtatgaagatattgagggagcacaatccaaatacggaactgaatagtcctcaaggactttctgagccccagtttgtccagtttaatggaggattcagccaagaacagctaaactggttgaatgaagtgctaacattctctgacacaaaccaagaaaaggtggtgattgtgagccatcttcccatttacccggacgcctctgacaatgtgtgcctggcctggaactacagagatgccctggcagtcatttggtctcatgagtgtgtggtgtgtttctttgctggtcacacccatgatggtggctactctgaggatccttttggtgtataccacgtcaacctagaaggagttattgaaacagctccagacagccaagcctttggcacagttcatgtctatcctgacaaaatgatgttgaaagggagaggcagagttccagatagaattatgaattacaagaaagaaagagccttccattgttagtctaatttattttaacttgatagaaaatgagctttgtgtttgtccctcctaaacnnnnnnnnnnnnntcctctgtctcattgtttagtattcagcttgcataacaaaatgtatttatagtttcagtgtgtgatggttgataaaatactcagaaatgttaaaaaaa

SEQ ID NO: 443194 - DNA, 859 bp, Homo Sapiens
ccagggccggcgcacgaaactgttggaggttatggatgataaacccaatcctgaagccctaagtgacagttcagagcgtcttttctcctttggcgtcatcgcagatgttcaatttgcagacttagaagatggctttaatttccaaggaaccaggcggcgatactacagacatagtcttcttcacttacagggtgccattgaagactggaataatgaaagcagcatgccctgttgtgtccttcagcttggagatatcatcgatggatataatgcacagtataatgcatccaaaaagtccctagaacttgttatggacatgttcaagaggcttaaagttccagttcatcatacatggggaaaccatgaattctataacttcagtagagagtatttaacacactctaaacttaacactaagtttctagaagatcagattgtacatcatcctgagaccatgccttcagaagattattatgcttatcattttgtaccattccctaaattccggttcattttacttgatgcatatgacttgagtgtcttgggcgtggatcagtcttctccaaaatacgagcagtgtatgaagatattgagggagcacaatccaaatacggaactgaatagtcctcaaggtgaattattcctttgagctgagaatctaatagatggtctttaaattcttcagctaccttttattcacgcaggaagatggacaattaaggactttctgagccccagtttgtccaagtttaatggaggattcagccaagaacagttaaactggttgaatgaagtgctaacattctctgacacaaaccaagaaaagggtggtgatgtgagccatcttcccatttacccg

SEQ ID NO: 443195 - DNA, 922 bp, Homo Sapiens
  misc_feature (116)..(117): n is a, c, g, or t
  misc_feature (768)..(817): n is a, c, g, or t
tcaacttttctctttcaatctgcagccgctccttctctagctgaagccgctcatgttccatgtctaaatgccgcagcctctctttctcgatttgtaggcgttccttttctacctgnnccgtttcggcctcgatatccagtcgtcgtttttccaactctagtttctgtttctcaatatttacgagcaaatgaggctcatcatatgcagatctagatggtgttgagttaagggtaaaaaactcatcaatgtgggggaaatcgggaagttcattttctctcctggaatctggtatgacggatgacaacatttcttcctcctcctcaatttcaaattcaggacttttgggatccctttcttcttcttccaccttgacctcagttaaggatccacctgcatccctgaaatctgccacattttgccagtcaaaatttgcatcatttcgggaatccaatcttttcatctatctcttcagtgagagagttatccaaatcagaggagggaaggggaaatcctgaaccaaccagcttaatgttggccttcatcctctttctcttcataagtgctcgccagtcaaggtaccttcttgttcacctctgtccctgtcctctgttctccttctcctacagcattcacacactgtgcaatctcttcccaagccattcgcttcatcacattaattgttgtattgagctgcttggaaaagatgacttctttccttttcgtaatttctttcaaaagggtctgagtttcttgaacgctaaaattgcnnnnnnnnnnnnnnnnnnnnnnnnnnnnnnnnnnnnnnnnnnnnnnnnnnatggtaagagatgtgaaaacaatttgaggaatgctgcaaagcacaaaaaccagggataattctttgctggcccttagttcaaatcattccagtaggccaacaggc

SEQ ID NO: 443196 - DNA, 939 bp, Homo Sapiens
actgcatgtgaaatagcaggtttttacatttattattgttgtgtatttcctcccctttttgcaatactatctacgctgagttatctattgccaactagcaccaattctccaaatcaaagtgtgtgaggaaaacacactcgtgcaatcctctttaacagaagatacaccaagtaacctgtctgtctacttctgttacccagaaataaaagaacttgaagggctgcttggctggaggggtccgggtgggagagcatcctgccctcagtcggaatccatggtgaacagctggatgtcctgtggattccagtacaggccgactgctgagttgtagacaagagaccagacataggggataaaaaactcctcgggctgctcctcttccacatatttgaatttcaattctggaaatttcttcagtctgtctttgggcagcgcaacgacgccttgcttaatgatttccaggacccgttccactgacagctcagctccagcttgcagcaaccttgagctaaagaaggagatcaccagatcaatattttgcattatatcctgaaatgaaggatgagttcgaaattgttcaaagagatcgcgtttgtaaagcaggggcgtataccaagtttgggttgtggtgaagggaatttgtcaggcaggagttgatgatctctaacatcattcgaatcacttcttcaatgacatttaggtcttgtgcataatctggtagaggaacatcattagaactcagcgaacctctcaaggactgtgtggcttgttccagaactttgttgtgttttttagacagcaaagaaaataaactgatgatcctctgggcagcatactgatggagagaacgaaactgtgccgacatatttgctaaagctgccaaacaatttgtgtgaaggtacttgtctcgtgtcctagtcatgttgtattgaatggttc

SEQ ID NO: 443197 - DNA, 521 bp, Homo Sapiens
  misc_feature (410)..(410): n is a, c, g, or t
  misc_feature (435)..(435): n is a, c, g, or t
  misc_feature (440)..(440): n is a, c, g, or t
  misc_feature (453)..(453): n is a, c, g, or t
  misc_feature (486)..(486): n is a, c, g, or t
tataatattgttgatccttacggaagatgatggcttcaacagatccattcatgaagtgatactaaaaaatattacttggtattcagaacgagttttaactgaaatctccttggggagtctcctgatcctggtggtaataagaaccattcaatacaacatgactaggacacgagacaagtaccttcacacaaattgtttggcagctttagcaaatatgtcggcacagtttcgttctctccatcagtatgctgcccagaggatcatcagtttattttctttgctgtctaaaaaacacaacaaagttctggaacaagccacacagtccttgagaggttcgctgagttctaatgatgttcctctaccagattatgcacaagacctaaaatgtcattggaaggaagtgattgcgnatgatgttaggagatcatgcaactncctgncctggacaaattncccttgcaccacaacccaaacttggtattacgncctgcttttacaaacgcgatctcttttgaacattt

SEQ ID NO: 443198 - DNA, 968 bp, Homo Sapiens
  misc_feature (846)..(846): n is a, c, g, or t
  misc_feature (860)..(860): n is a, c, g, or t
  misc_feature (866)..(866): n is a, c, g, or t
  misc_feature (943)..(943): n is a, c, g, or t
ttttgaattctatagattgtcttggaaggatactgtgtgatgggtcaggcacacagtaattggagacttttaatgtatgtaatatttcatagattgcatgctattaatcatctgtgagggtagtattttttgttttattgtaagtttccctctttttttataaattaaaagatggttggtattaggaatttcaaatgaatgcagaaaatcttacatgctgtgtactattaatattataacagacgatccaagtccaaaatctgaccaataaagcaaccattttatcaagatagagggattctaatgggagaggggattcttccctcctgaagtttgtgtgtccagtccccttaaaaaaaatgaatagttgtcttttcttgtcatattaatactcgaaagtccatggtggtattaatgaaagtacactttattgttgcctttgaacttacggccaaggcaataaatcagaaacaaaaatagtgccaatgtgtcaaaatcgacatctgagagattcagcctcccatttggaataaatatgaatcttctaagctatcttgtttaatattttccatcatttagctacgttcctatctccctcagaggcgcctgctgttcccattttagagttgacagatggcctgctcattttgctatgttcactaaaagttactgggtgtgagacattttcatcccctcctttttcctactgctggtgtttattatccagctagacaatattttatgcatatttaccgtgatgtctggaccgtacctgtgctccttggcagtttatgttgaagataactaaagatttttctctttgggaggcatcaaaatgatggtagnttgcttttatcttnttatgntcattttcttttagtaggtgacctttctgcattaagaactggttttatcttttactaccttttcttttctcctttgnggagacagcatgacatgtcctgaag

SEQ ID NO: 443199 - DNA, 639 bp, Homo Sapiens
  misc_feature (210)..(219): n is a, c, g, or t
accgacaccggaggggaaagggctatttatttagaaaagttcaccatcaaatcactagacaggataaccaactcatggagaaaatcaacacttattacaatcaaaggggaatccattgtaattttctgatttccctaggcactctcactgtgatgttgaacaaaactctctcaaacatctcccactggattagcaactgtgattgtgagnnnnnnnnnntccatctttttgttgtcgttgttaatacccctttccacattttactgaatatatttaagcataatacagtgtatctgatgttagcgaggcaccaatttagcattaatttctctggatggaaatatgagccatatgtttatgttagtaatggcaacactaggcagctgaatcctttcagagcaaattgatatattttcaactaacagggagagttgtgagatcttgttttcatttttgaagcatcagcagctttcagtacagagttttctaatcttatttaatttctctactggtctgactctgattagaggctcaaataaaatggtgattcttctatgccttgattctgttaaaatattccttgtctctcttcctgagcagcagcaactgcgagtaaattaatccagtaggccaacagtg

SEQ ID NO: 443200 - DNA, 1081 bp, Homo Sapiens
  misc_feature (78)..(109): n is a, c, g, or t
  misc_feature (1004)..(1036): n is a, c, g, or t
caccacgtaagatagcaagataaaacaattttaaaagtcctgaaatccctatcataaactgccttttccttaaaattnnnnnnnnnnnnnnnnnnnnnnnnnnnnnnnngtaaacaagcaaagcaaaacaagaaaattcccagtgaaccggaatttcccttctccagcaacaaaagtaagagtctgagaagcagtgctaattcaccctttataaaactgttaacagagatacagtttttcaggtattccgttttaaaaatggattggattctactgtcaaactagatgaacttgaagaataaaaactggaggtcaagcacatgggtagttttaccttccctatcgtactacttaagatctttcacagctggtaaaaatgtaagggaatataatactatttacgatcagaaatttgtcccacgcctcaatttgacacagggagtctacacaaacacagccgttggcgggatcacggtgactgtttgactgccacctgctgggaaggggctccccggcggtgcctgtttgtgtacattgccagtggcagctaggatcacccactgttctgtcggcacttggcatagctttatttttagtgctgttaaaatggcatgaatgcagttgtctccttccctgaaggttgctaatttaactgagagtgcgggccacagagacctgcatttgtcatttaatgtgtctgtgacacacaagtgaatagaaagcatattcaactcgttaataaaccttgaataaggcactgagaatgtttgagtattcaagtgagaagctgtacttgaaaagcaaacatttcctactttttgtttgcaaactgtgttgccatggtgacgcacagtatctagcgcatttgagaaattaaagtagaaaatcaaaggaattgttgttttgcattatctatctgcacagaaagatttgtctttaatcatttcagcgaaactcgctgcctcgctctcgacgaattcgagctcggccgatttggcctgatnnnnnnnnnnnnnnnnnnnnnnnnnnnnnnnnnatgcgccgccccgcgtaagctcagtccccatagtgatcgatcatc

SEQ ID NO: 443201 - DNA, 691 bp, Homo Sapiens
  misc_feature (587)..(587): n is a, c, g, or t
  misc_feature (637)..(637): n is a, c, g, or t
  misc_feature (640)..(640): n is a, c, g, or t
  misc_feature (643)..(643): n is a, c, g, or t
  misc_feature (673)..(673): n is a, c, g, or t
gacgatgaagaaatagcgttttatttctttacaaatttatagccaagacaataaatcactccatagaaaaatttaaaacaagatacattcttgtgaccttcataacagatggagtagttagtacaatagtgaaaactgcctgctgggatgtcaggttgcagcattttgtcaggcttgaatgaaaaagaaagtccaacattagtaatggaatgggcaactgacaaaggtgccttgcccttagactcaaattgtttttgtgaataaccaagagagatgaggttagtgcagtgccgggtcttccctaagcttagctacctttgcaaagtacatgatataattcattgtgggttgttttgttcatttggggatttatttgggcttcaagactacacaattatatctttgccttgactacttcaagctagatccagataatcacgtccaatcttcttacagatgctgttgtgtgacaatggctgtaaacacatgtcattaactgtctccttaaactctcacagtgatcttcttgggtcccacatctttcaaagaagtccagcatacacacacactacccacccacaacctgncacacattcccagaaaagagaaagagtgaaagatgcttcacaaaatcggnctnaanctggggtcaaagttgcctcgctcaatatgnctgggcagcagacctgca

SEQ ID NO: 443202 - DNA, 1074 bp, Homo Sapiens
gccgtcatcagagcatgtagcaaatttattatccgtgggtgagaaactgttacatgaagacacacagcaggggaaagaagtcagcatttaacagataatctgtgcttctcagacagggaaaaataaaaacactgtgctgcattataaacaggagagggaagaatccagtgaagaagcccttaaagtgaatgtcgtcagctaacataggcatctcatcaaaagaagacttcaacagagcagttgtttgagttttcaatcatcagtattctgagaacttcaagtgtgtattattagtgctaatgctatccatgttccttctctattttctatgatacgaggaaatcacatgaagctgccttaagtggtgaaaataaatggattctatttttgcagtattcctgcagtcttttaaatcacacacgaatactgctcccaaaattatcatcagcttctgcctcagacacttcatgaaataagctgaaacaatgtgggctgtctattaaaagactgattgctaaacatccctacatacaatgtttctcatccatttcaaaggtctgtagaaaagtttcacatcttcctggcaagctattccatgaatgttgcacctttgaggaaaactttaaaataaggacattcagacttgtgtgtaaagccaaagaatctgctgcaagaaggagtcagtttttcccagcaggtgaaagatcatcaagtttctcaactaactctaaaaactcccttgaactttggaatcctatgaaggaccagctgtgtaaactcaatgtatgggcatgacactaaggcaaaatctacaaagcagaagcatgttcatccaacaatttctgttaagattctgaaagtatgaacaaatgactacagtggatgatgtttccataaagatgtcaacctcctcccacacatgggtggcacaaccttaaagaatgctgcttagctttattctgaggctgcagcaattcttcaggcttgtatttggaactttttcccccaagttttactatacatacatcactgatgtgtaaaaatatctatcgaagaattccggaccggtccagc

SEQ ID NO: 443203 - DNA, 1491 bp, Homo Sapiens
aattcatccacacttctctttagtgccttgatcacaagaatttttggagttaaaagggcaaaggatgaacattccaaaacaaatagaatgacagggagagagtttttctctcgtttcccagaactctatccttttcttctcaaacagttggaaactgtagccaatacagtagacagtgatatgggagaaccaaatcgtcatccaagcatgtttctcttacttttggtgttggagagactctacgcttccccgatggatggtacttcttctgctctcagcatgggaccttttgttcccttcattatgaggtgtggtcactcacctgtctaccactcccgtgaaatggcagctcgtgccttggtcccatttgttatgatagatcacattcctaataccattcgaactctgttgtccacactccccagctgcactgaccagtgtttccggcaaaaccacattcatgggacacttcttcaggtttttcatttgttgcaaagcctactcagactccaaacacggaacgaattcagacttccagcacgagctgactgacatcactgtttgtaccaaagccaaactctggctggccaagaggcaaaatccatgtttggtgaccagagctgtatatattgatattctcttcctattgacttgctgcctcaacagatctgcaaaggacaaccagccagttctggagagtcttggcttctgggaggaagtcagagggattatctcaggatcagagctgataacgggattcccttgggccttcaaggtgccaggcctgccccagtacctccagagcctcaccagactagccattgctgcagtgtgggccgcggcagccaagagtggagagcgggagacgaatgtccccatctctttctctcagctgttagaatctgccttccctgaagtgcgctcactaacactggaagccctcttggaaaagttcttagcagcagcctctggacttggagagaagggcgtgccacccttgctgtgcaacatggggagagaagttcttattgttggccatgaaggaaaatcacccagaatgcttctgcaagatactgaaaattctccactgcatggacctggtgagtggttcccagacggagcactgtgtcatctgagcccaaaggagttcttgatctggacgatggttatgcttccaatgaacagatctgaaccttcagagtgtcgctctgagactgcttccaaagtccttgcccaccaacatgcagacctgtgtggcgaccggcactgctaggctggctgagcggaagcaggggttccagtggccacctgtctgtgaagaccacttctacaacggaaggcggccgcgtgaatctcacagagcaaaacatttctacaaggcccaaatatggagtggaaccggcactgcagtgctaaccttgagaggggacgcgggatcgcgggacgggacgcgcagaacgcgacagtgctaggggtcagatgggagacggg

SEQ ID NO: 443204 - DNA, 872 bp, Homo Sapiens
aatatttcatacataatttttatatttaaaatgcaaactataaatataatacacatatttacttgtacttgtgcaaataattctataggcctgactgaaagggaatgttccacctttctaccttttttttaatgacaaatttctgataaaattccttgttacctaatgaatgacttcagtttcaaaatatgctaaatgcattcagtttccagtagttctgggcacacactgtatgctaagacttggtgaacttgaggactgaaagagtttcttggcctgcttgtctggaaagtgcagtggttccttgcagaccttttgtcttcattattttcaaaatttcttctgggttgttttctttaatggtaactaaatagaataatcctcttggtgaaaggagatctggaaccaggggaaaaaacctgtccatgacttcccgaccatttctgccaccagcccaagctgcctctattccgtgacttcctacctcttgaggtggagtcactacataggggggattaaacaccagaagatcaactttttcggtcaatcttggtagcaagcctttgaccaaatctgtaataactggttgaatgtgaactttgttacagcgtgctgtctctagggtacaagctgctgcctcagggttgatatcagtgcacatgtacaaagcctgagggcctatcatagaggctaggaatgcagatactacaccagaccctgaccctacttccaggcatatttccactcctgccagttcggcagccgctgcctcgagcgcgtccaaaagcagaaacgtgtcctccgcgggctcgtacacgtcgctgaaggcgccgcggcccacgtgcccgtggaacggcgtagcgaagttctcc

SEQ ID NO: 443205 - DNA, 766 bp, Homo Sapiens
tgatcttccgtcccataagaaggtatctttgacctttgatgatcattgttttcaatttctgaaggaggtaacggaatcatgaattcttttggctatatcttaatatgaatcccaagcatgcataacaaagtctacttgctgaggacatttggaatgttatttaatcgatgatttttttggtatgctcaattttgatcttactgaaatgtacacagggttacagttcccgagtacttctgtcttcctgtttgtggtatgctcaattttcatcttacttgaaatgtacacatggttacagttcccgagtacttctgtcttctaacattacagaggtggtgtattcacttttcctttattaatatagacattaactacttggtcccctaatatttttactttagaagattccaaatttacattaaatagcatggaaattatcttcatttcatgtgtttaagttgtgtgccttttcaaatcaaaaagggataacatttagggtgggggaaggataacatattctcttcaaaacataagtgaagaaaaactgtgcatgacacagcaattaaagaagatgtaaggaaactgttaagataacacagcattcaatttgtcaatcattttcaagggaaaaaattcaagcaaatgggttccaaaaatatattaaaaattagagttcttttagagttttaggaaatacaagaaagaatccccacttagttgcagagacagaattgttcctttgtgcacctagtgagtttctaagagg

SEQ ID NO: 443206 - DNA, 643 bp, Homo Sapiens
  misc_feature (510)..(510): n is a, c, g, or t
  misc_feature (519)..(519): n is a, c, g, or t
  misc_feature (527)..(527): n is a, c, g, or t
  misc_feature (533)..(533): n is a, c, g, or t
  misc_feature (550)..(550): n is a, c, g, or t
  misc_feature (561)..(561): n is a, c, g, or t
  misc_feature (572)..(572): n is a, c, g, or t
  misc_feature (588)..(588): n is a, c, g, or t
cctttttggataaaatttttgaatttatgttcaacatgtttcctgcagatttagtggaggaaaaatccacacatacccccatcccaatcccccagattttcttcaacatgccgcttctgttcttggaagagttaactgcctcgattctgcataagagtcccaaacactgagaactagggtgtcttccccttcctttccttccaaaaaggccagcagcctcaagcaagccaaagtcctttcctcttgaatgcgtagtcttgtgaactccactgtcttcacaaactcagcagctggtggaagctctctgaagaactgagacaggaggtggcactgctctgacaccatcctttgaaggtgacagagcatctcagggcttgggggacgccagccggactttgagaggagacagaagaggtgcttgcagaggtatttcacaaagatcagggtctcggccaaaagttgacttctgctttttcaaacaggtagtcttctttcacctgatgcatgctnttcacacangccacgangtcatnactcttttccaacaagncattccaacangatgggcagtncaagggccaactggtnccactggttggagcagatcacacaggacgggcaagggcaagggccaaaccatgga

SEQ ID NO: 443207 - DNA, 699 bp, Homo Sapiens
  misc_feature (33)..(33): n is a, c, g, or t
  misc_feature (41)..(41): n is a, c, g, or t
  misc_feature (77)..(77): n is a, c, g, or t
  misc_feature (149)..(149): n is a, c, g, or t
  misc_feature (234)..(234): n is a, c, g, or t
aatggattttgaatttccagtgggtttatcagnatgtaccnccatcgttagttgaggaacatctgtatttcaagatncattatattttaaataggcttttggcattaccctagttttgtagccaatttaggaaaaaaccatttgaaagncaatacttacatgaattagaaattgcctgttttccaacctgataataaactctgttataaacctaagttatgttcttattcaatncaatgatgacttcaatgtattacattcaatacaatgtaagtaggtttttgcttcttccttcactcattggtgttagacttcttacagtttgtttttctttcgtgaaacttctagttcaatctcttgttaaactattactgtcagtttgccctgctggtattaatctaatactttattttacacacagttttctatatgatacactgaagatatctgtgattctgttatcagaatgagccttgtgaatctatttgaaatgcacagtttttctttatgtttctatgtccacaattagatacagtgttattccatatgattgtatttctgttcacaatcagtaagattttctaagtgttttctttattattttaagtcaggccacatattagataatattctcaaaagttgtccttggatttttatttactttcagaaataaaattgtaaaactccaaaaaaaggaaa

SEQ ID NO: 443208 - DNA, 995 bp, Homo Sapiens
agcggggaggcgggggtgggctctgcgcgtaatggcagcgccgtggcctcgcgtcaatctttgccgttctctcggacctgtcacaaaggagtcgcgccgccgccgccgccccctccctccggtgggcccgggaggtagagaaaaactgccattggatgtccagaatcccctgtagttgataatgttgggaataagctctgcaactttctttggcattcagttgttaaaaacaaataggatgcaaattcctcaactccaggttatgaaaacagtacttggaaaactgaaaactacctaaatgatcgtctttggttgggccgtgttcttagcgagcagaagccttggccagggtctgttgttgactctcgaagagcacatagcccacttcctagggactggaggtgccgctactaccatgggtaattcctgtatctgccgagatgacagtggaacagatgacagtgttgacacccaacagcaacaggccgagaacagtgcagtacccactgctgacacaaggagccaaccacgggaccctgttcggccaccaaggaggggccgaggacctcatgagccaaggagaaagaaacaaaatgtggatgggctagtgttggacacactggcagtaatacggactcttgtagataatgatcaggaacctccctattcaatgataacattacacgaaatggcagaaacagatgaacggatggttggatggttgtccagtctttaatttagagttattccactggaaagatccactgggaccaagtgttataacatttgttactagatgaactgtccatgtgccactaaagatgcactccaggaaatggactgaaattctccaatttacactggggaacgtagctggccaggactcaagacattcttggcaaacacaggtaccacatctggagtcctaaggctggttggcgagaactagcagggtcctgcaagttataggttattcagcccaggatactgggata

SEQ ID NO: 443209 - DNA, 514 bp, Homo Sapiens
atgttgtttgtttttacccatttctaacaatttttactgtaaaatttttggtcaaagttctaagcttaatcacatctcaaagaatagaggcaatatatagcccatcttactagacatacagtattaaactggactgaatatgaggacaagctctagtggtcattaaaccccctcagaaagtctaagattcagaatgtctccatcatattagaagaaaaatgtactgtattaaaatttaaattgcatttttacaagttgttttttaattagtgttctatttacattgcagaacttccaccaactgcagtagtttaactttggcacaacattaagttccatttcttttgggtattggatcctgctttttgagtgtgtatgccccaaaacgttttcaatgtcatcaaagattgggcaaattcacagtaaatcagacatcttgagttgaagaattgattctccttcaacgttttaggcagatttcagtcatctgatttagacagcttccgtttcacgg

SEQ ID NO: 443210 - DNA, 948 bp, Homo Sapiens
  misc_feature (440)..(440): n is a, c, g, or t
ggtattttttctttgaaggcaaatggtaaaaaggttcagctattagctgcccattggttattcgacaactccataactgtgtcataaagctgataaaaaggatttgaaacatccataaaggaagtgatgctttctgcttctgactctccctcttcatagcgtgcagcagctaaagcagcatcttcttcactttctgagccatattgaagtgccattgtaattgctgataaacgacctccttgtactgctcttttattacggtaatacttgctagtgggatttctctcttcaccaaggctgcctttactgtgtgaaggacctgtcagtctggctgcagccaaggttgggatgggagtcctcattcggaagacttgacttagccatttcatgatgttcaatttcagcctttttcatataaaatatttttttaattggaattntgcatccttgaatacttgagagccaggctcattataagttttggcattttttgcgaggagatctatatctttggccattgcatgaatacttttgtagcttccattctgtatcctctgggcaatggtcttgagatctataggctccttaattattgcataataatctggatattgcactttagaaggcagtttctgaaaaagttcgctaatgagacgtcctgatggatttgtagctacaactatggcttcaagaagctgctccaggatctccttcaagtaagctggagaagatccttcagtcactgtgccctgattgtcttgcccatcttcatcatcatcttcgtcatctgcttctcctttctgaacaaactcatttcttgttcgaaggtacaaatcccagagtttgcaagcggctttatattcaggagaatctggcttataataggactttgcattgttaaaaagaagctggaagtcagcagtcagcaaattaacatcatcatactct

SEQ ID NO: 443211 - DNA, 618 bp, Homo Sapiens
atcgtaatgctcatcggaagaataagccgtgtactgatttggaaagtggagaggaaaagaaaaatattatcaatacccctgtgtcttcattagaaatacttttacaatctttctgcaaacttggcctgattatggcatatttctatatgtgtgaccgtgcaaatctgttcatgaaggaaaacaaattttatacacattcatctttctttattccaattatctacattttggttttgggagtattttataatgaaaatactaaagagactaaagtattaaatagagaacaaacagacgaatggaaaggctggatgcaacttgtgattttgatttatcacatttctggagcaagtacatttttgcctgtatacatgcacattcgagttctggttgctgcatatttatttcagacagggtatgggcatttctcatacttttggataaaaggagattttggaatctatagagtatgtcaggttttatttcgtctcaatttcctggtagtggtgttatgtatagtaatggatcgaccttatcaattctattactttgtccccttggtcactgtatggttcatggtcatatatgttactttaacactatggccacaaataatcc

SEQ ID NO: 443212 - DNA, 735 bp, Homo Sapiens
  misc_feature (31)..(31): n is a, c, g, or t
  misc_feature (53)..(53): n is a, c, g, or t
  misc_feature (80)..(80): n is a, c, g, or t
  misc_feature (98)..(98): n is a, c, g, or t
  misc_feature (101)..(101): n is a, c, g, or t
  misc_feature (121)..(121): n is a, c, g, or t
  misc_feature (130)..(130): n is a, c, g, or t
gtgtccccagttaagcttgggtaggttcttncaaagaagggccatgaatatgngtaagaaaccttttgaaatgagtttcntaactatgaaagtccttnccncttcttgcggaaccaacttnttgaagganaggcccatgatctgcacgagccttagcttgttcagatctctgcattttataaatgcttcttaccaagaaagcatttttaggtcattgcttgtaccaggtaatttttgccggggatgggtaagggttgggttttctggtgggagtggggtggtgggtattttttgttgatgctttagtgcaggcctgttctgaggcaataacaagttgctgtgaaaacagcatgtgctgctgcctttgtaactgcatggaaacttttcacatgggtttttctccaagttaatacagaaatatgtaaactgagagatgcaaatgtaatatttttaacagttcatgaagttgttattaaaataactaacataaaacttaattactttaatattatataattatagtagtggccttgttttacaaacctttaaattacattttagaaatcaaagttgatagtcttagttatcttttgagtaagaaaagctttcctaaagtcccatacatttggaccatggcagctaattttgtaacttaagcattcatatgaactacctatggacatctattaaagtgattgtccacaaacaaaaacccccccactacacaacccttgt

SEQ ID NO: 443213 - DNA, 451 bp, Homo Sapiens
  misc_feature (424)..(424): n is a, c, g, or t
  misc_feature (437)..(437): n is a, c, g, or t
aagtagtcttgaacatccacaagaaagtactgttcaaaccatcccttaaggagaggaagattcatctgggcttttctgtttgcttgctagtacactggaaacttggctcatttatttcccctgagagggtttgggcacaattttctgtagagcagcaagggtttcattatgaggtcacctgaagtattggcaaaaaatggaaatgtcagcttctctgattttgttgacctcagcatcagtgggcgcttgctcttcagaagtattcaaagggtttcaaagcttgacactctcgatagcactaaagatttgtgcaggcatgtaatccccttcttcagccacttcctgaatttgtggtgaatacaacatgagagctgcaggaactgtttgttctttgggcataactgttcaaataaggacccggggntccacattatggnacaccctaaattta

SEQ ID NO: 443214 - DNA, 1013 bp, Homo Sapiens
  misc_feature (51)..(51): n is a, c, g, or t
  misc_feature (195)..(222): n is a, c, g, or t
  misc_feature (286)..(296): n is a, c, g, or t
  misc_feature (775)..(834): n is a, c, g, or t
  misc_feature (954)..(954): n is a, c, g, or t
  misc_feature (962)..(962): n is a, c, g, or t
  misc_feature (974)..(974): n is a, c, g, or t
  misc_feature (979)..(979): n is a, c, g, or t
  misc_feature (997)..(997): n is a, c, g, or t
ctacatttatgcaaagtatttgtaaatatcattttcaatggtgtataatanttcatcataggatgacatcatggtttagttaaccattttcttttgttggatatttgagggtctttccaaatttggccattgtaatttcacaatgtctttttcattacctaactgaaaatatttgctttggtgaaagcagaggannnnnnnnnnnnnnnnnnnnnnnnnnnnaagaagtccttttaatagctacatttcattgactaagtggaactttcaagagacaggtagaagnnnnnnnnnnngaaccagtagatgtaatttcaagattgaggatttattttgttagtgactgttccagaagctgaattttggtgttagagcaattcaggagggacagtttgccaccattttatgatactttactgtagaaaagttttcaggatttagaccagggaaagagacatcctaaccatatgggttgattttattttatgggaccctgtggaagtctggggactgatcaggtttctcttttgttggctactagaaagcttggagtcaaatgtgtggtcaatgcatagcacttgtaatgggactctacggtatgtatgcactttgtattagctttctgccaggctccatttcgtgttcctatctttattgtttttgttttttccttttactttcttatctactttgaatttatgctatcatgttgtattttgtgtattcttgtaagccacctgacatccatcttggaacatggtggggaataaacacnnnnnnnnnnnnnnnnnnnnnnnnnnnnnnnnnnnnnnnnnnnnnnnnnnnnnnnnnnnngagggcaaatgaatgcagccagggactctggaaaattgcatagtgcctccaagaattaatccaatgttaagggacttgaaggcttgggaaggaacatattgggaaaggaagccagggttnagggctgncgagggctgccnttttngagggtgaccgtgtttcngtgttgacgtctgtgt

SEQ ID NO: 443215 - DNA, 906 bp, Homo Sapiens
  misc_feature (882)..(882): n is a, c, g, or t
aataaaaattcccagtcctgttttagtattcatcagaatagcctcttggaccctcgaagttctacacctttgggagatataaatttccttaaaataaagggattgcttctttgtgtaaatagctttcattttctccatctggaagtgatttctgcctgcatgttggagcacaaaatactgcagttaattaaagcattactggatgtcatttgctagaatgtatttccttactgctgacagaaaacagaacagactctaggaaagaagtagcaagtccgtgaccctggccgctcctggtggctgcccttctcccttccctgacagtctaaggaagcaacgcgtgggagcagaatgtggccgactgagcccagtcctgacctgcccagttgcagtggagcctgtctgtaatgttgtgtaaagtgttttgcttctgacttggaaccctacttgccctgtgaatttctatcctgtgaaccttcccttctctgtccttaccgttcccatcacagcctgctcttccagtgacggccaagtgatttctctcctgcacgcatgagtccatcctgtttccttagtagctggatggacgttttgccatgaaaactctttgggaagtcttgtgtcctttagtgatttctctcctgcacgcatgagtccatcctgtttccttagtagctggttggacgtttttgccatgaaaactcttcgggaagtcctgtgtcctttcaacaggggaaaactggctgcggccctttccattaggctccaggatcattacctcgttttccattctttctttttcaacagctccccactttaataggggaaggccaagggattcaacctaattgagaaaaggaactttccctgttaggcccaacngggaaggggcatttgcctggccag

SEQ ID NO: 443216 - DNA, 906 bp, Homo Sapiens
  misc_feature (86)..(100): n is a, c, g, or t
  misc_feature (108)..(233): n is a, c, g, or t
  misc_feature (549)..(549): n is a, c, g, or t
gcccgggttttttttggaaaaaattttgccctgtttcctttccttttggggccgggcgcccaaaaaaaggttttaaaaaatttttnnnnnnnnnnnnnnncggccagnnnnnnnnnnnnnnnnnnnnnnnnnnnnnnnnnnnnnnnnnnnnnnnnnnnnnnnnnnnnnnnnnnnnnnnnnnnnnnnnnnnnnnnnnnnnnnnnnnnnnnnnnnnnnnnnnnnnnnnnnnnnnnacagaagtaaagtttattacatttgaaacaatacagcagaaacctcaaaagtttactcataaatatagtttaattcttacaaatcttcttttgaaaatgcaattcatatatgctgcaacctcagaagtttgaatttgaaatgaaatatgaaggtagtagtcagggaagtcacatcagagtgccttgtcaaatatccaaacaaatcagcacatacttcttccttgatacaggaggaaaaaagtgattctaaatatatccaagtgaatgcagaaaaatacattactatttgaggcagaccatgctaaaatataatttncaatgattagtttgcacttaagatggttaataacgcatttaaaccaatgaaatgaaggttaagttgaattttgtagtatttgctcagtctctgtactaaacaatagttcatctgaaaagtttggaaaaagcaaataacctgatacttctctttatgcttatcattttctcactgtcatcttaaatgcaaacaaatcaatacagcatcaagattttttacatattaaaatgaagactaatgactcatagactgtgtaccatatagtacttaatagatgagcttgcaatgaccatcacctcaattttttaaataacaccaagatccacaagccaaaataaacatttgattaaaaagtta

SEQ ID NO: 443217 - DNA, 1544 bp, Homo Sapiens
  misc_feature (1058)..(1058): n is a, c, g, or t
caaaattaagaaaaatgctgtatttgaacttgcaaggataattgaacactttggttataacatacttaaaagatttctgttaaaatttaatttccttgttttcaaattaaaaggtagaacagtctcctgaaggtaatgtaggtgggtcccttgcttttcacttactataaactgtgctaaccaatacatggaggtgaagggggatatgaaacacaaattatttcatcactgaaataattagctgctaacatgacttctaaagaacaggtataatataaaactaagaacttatttcaaaatatgaataaaggcacctaattacaaatggtacattttttagacagtatcttacagttcactgatttacaatgaatgtcagaaccaatgctctagtattagatacttgcttgggttaaaacattctcttggagtaaagaataatcagttttcacgttactgtgacaggaaagattgagtgaaaacctaaaaaatactcttaaaaagtcttacatgaatttcctaatcatgaacttttcccaatcagcaccgtctacactgatgccaatttcatcttcaacacatggctaacataaatcatttctaatccaaaactaaccaaatattttttaaaggatttacaaaataaattgtattttaaaaattaaatagcaaatttgagtctatactagtagttggcaaaatacaatcaactattaaaaacacttttaatataatgctgatgtggtaatataaaaaataaccatataatttgacagaagaaaattgagccagccaatcttactagatacaagaaggcagatagtcatttcataagaacaaatacaggagtactaagtatgctttttctcaggacagacttagggaaactaccctcagtacttacggtaaccaccccaaccaagcagaaattcaggcaaactgtgcttaggtaaatggcattttcttaattccccccacatcccacacacaccacaaaccatccatatcgatttatgtctgcttttcggctcatgttcttgattatgggttatattaanaacttaagttaaactacacttatcctctacttgatacagaatcactaagaaaacggcttaaaacaaagttaaacaactactttccaaagcccagaaagctttcctttggccactgttcagttcaagggtgtgctccaactaaagataaatcagaaaaatgttaccacattcgactaaattaacttgactaaatataataaaccaagcacacctgaaaaaagagcaaaatttaaatcaacttacaaaaatattaaaattaaaataccaattttgaacacatattttgatattatgaactttgtatcttttttatcaaaattaaaaagtactgcaaaaatgaagtattattctctaagtattcattttatccctttcatttcagcaaaatcacacatttgaataaacaggatcgaaatacgacacttgtctttcctcttaatttaaggaatatattgtttagattattgtccagtaggccaacaggcc

SEQ ID NO: 443218 - DNA, 677 bp, Homo Sapiens
  misc_feature (522)..(522): n is a, c, g, or t
  misc_feature (598)..(598): n is a, c, g, or t
  misc_feature (650)..(650): n is a, c, g, or t
tttttagtggtttgactaatacttaatctatcagttgggttaatataaaaccagggaaggaagtttaagacagcttccactgtggtcaggtttgttataatggatggatgaaagtaatcatttacatctttgatttcctgggaaacattggccagtcttgacaagccctttctatttaagctgattctctcttcacctgatattctgatagcacccctggccaggttcctgggggcaccaacttgcaaagtagggtgatcttgcaagagacaaatgttttcaatctgctgaggcaggctgatggaatttgtggaccagtttctgacatcccaagtaattatgatgcttaaagtattttaaacgattccaggtctataaaaaatgtgatgatgcctatgtgtataccctatattttttattacaagaaatattgaaataatcccatgagttattccactctgcaccaactataaaaaaatactatcaaagtttgaccggcacttttaatgcaacgaaaagcancatgaccgaggacactgagaacaagaaagcggggaacgtttacttgctgtacggaggtatttaaaacccaaaagcntgttgtaagagtgcgactttacaagatgattcaaatacaaatcctaactggntatagtgataagccctctctcaattca

SEQ ID NO: 443219 - DNA, 473 bp, Homo Sapiens
  misc_feature (215)..(215): n is a, c, g, or t
  misc_feature (389)..(389): n is a, c, g, or t
  misc_feature (422)..(422): n is a, c, g, or t
  misc_feature (437)..(437): n is a, c, g, or t
ttttttttagtggtttgactaatacttaatctatcagttgggttaatataaaaccagggaaggaagtttaagacagcttccactgtggtcaggtttgttataatggatggatgaaagtaatcatttacatctttgatttcctgggaaacattggccagtcttgacaagccctttctatttaagctgattctctcttcacctgatattctgatagncacccctgggccatggttcctggggggcaccaacttgcaaagtaggggtgatcttgcaagagacaaatgttttcaatcttgctgaggcaggcctgatgggaatttgtgggaccagtttcttgacatcccaaggtaatttattgatggctttaaagtatttttaaacgggttccngggggcttattaaaaaatgtggatggatggccnatggtgttatacccnatattttcttcatttacaaaattttggaaataatcc

SEQ ID NO: 443220 - DNA, 567 bp, Homo Sapiens
tgtaaccagtgtacttcagatgagattcaaggatcttatctctaaggacttttttgaagttgcctttgccttttatccagatggggctttgatcgtgtaatgctataaatgcagaacatcatgatcctatagattctgtattttaatttggtaaatctatcccttagtctttcagaaatgataattattcagaacgtataactcaagtgttcaggtcaaggctatacatatttatatgctgtttaatatttaaaagttgactgcctgtccccaggcactgatcttagtttctgcacatgaacaggctgccattgtcaaattcagttcattataaacttcctgtgtataagactgtcctccctgtcattgggatgactgttaagtgcacagcctcactgagaggcttcccgcctgtggcacaggaatcacttagtgctgtcacaggttgggtgctttattgtccaaaagtcatggacccactgggattggggaagagagagaagggttaattatcagccactcttaagcagctacagatctcattctgcttgcactctctgtatgctg

SEQ ID NO: 443221 - DNA, 664 bp, Homo Sapiens
  misc_feature (552)..(552): n is a, c, g, or t
cacagtctatgtacatttatttggtggtaagcatcttacaaatacgggctttctgtcaggcagtgctcagccaatgtcccaaactggctagtagggaattagtacacaatgtacactgaaatggttttttaaaaaaatcaaaaacaagttgccgctgaaaagaaaatactgaatattgagcaaattgccattcagttccttagtggattacaggtgttaacatcttccttaagctgtacatattttcataatgaatacacagtatgacatttacagcagaagcattaaacaatttgggtgaaaccccattaaaacagtcaaacttgaggaaacgacttctgtatttccaaaaagccatttaaagaaaggtttgaagtagctcttcctgaatactgcccacaaaatagctgagggtgagaattttagggggtgtctcaactccagtaaagtagcatcctccccacctccaaacaccaacttaagaatggacatgtacatataattgggcaaaggaaagtttacaggggagattcccatgcaccccaaaagcancaaaaatcctcttacattttctgccaagtcctgaatctccttaagtttggcaccaatcacataacttttaattcacaagaatatgtgcaaaatatctgaccctattgagaca

SEQ ID NO: 443222 - DNA, 669 bp, Homo Sapiens
  misc_feature (563)..(563): n is a, c, g, or t
  misc_feature (594)..(594): n is a, c, g, or t
  misc_feature (598)..(598): n is a, c, g, or t
  misc_feature (610)..(610): n is a, c, g, or t
  misc_feature (614)..(614): n is a, c, g, or t
gcagaacacattttggtttaatggacagacatagaagtggctcaaaaataagcaaattcatttgtaataataccagcaaatacctattgttaagcatttatatgtcagacatcccaaagatttgtgtacatatttagtctttataatagctttgggaggaaagaaccaatatcatactctacaaaggaagaagcagaaccaggattcaaatctatttggcaccaaaaatctgcctcttgctacactgcctctattcctgtttctttggaccttttccagaacatgttacttccctgcctcagttagaagttagtgactacgaatcccctgctgacttggcctcaaggccagtattgcaccgcaaggaccaagactgctgggcattcctcttttgcctgttgtatgcgtcctctcttcctgtcaactgtcattgatttctcattgctgtcagtagatctgaaacaaccaccaccatcatccttccaaccctcatctggtgcaacgagataaacaaggcatgccctgagcaaagaaaagggaaatggtggtatctgtgctgccancctgggccaaccactggaagatgcacatgcntggntcaacaaacggntaanggttaaattcatggactttgtgttcaatcacaaattgtttcaatgctcaaaggga

SEQ ID NO: 443223 - DNA, 1570 bp, Homo Sapiens
ttttttttaatttaaatcaaagtgacaatgggatttgacttacaaaagttctatttacacatctattaggtaaagcaaggtacacccacttcaaaacacatctgtatgtgaatgcacatctgagtaccattcagcaagaagttttgaagagaacgtcagtttaataaagctaaatggggagaattgaagtttgcatttgacatggtattaaacaaaaccaaagggctgaaactcatgtttagacaacacaggtcactagtcactaggcaaagaaaacagtccacagcaggtggcacaaataattcctatacaaaacaaatgttgcaaatattctgcttttaggaaacatgaaacaagggctgacatgtcatttacaaacacataatataaaaatgcacagccccattgaacaaaactccagcaaatgttttatagctgacttccctcagacccacccccacaagaggccattctgtgaattactagcatctgccatttcatcttttaaaattaaaagaatgacgggcacatgtgctgtgcagggtggaagagaagtgtcatacaaaaaggggccggagctggccagaaacatttggacaactgtgtctcaaaaacagtgtgttctcgtttcgcttctgtgcctcagtctttaagatacaaaactatctcaggacaccacatcctgggcccagcctgcagagtggtcacttttctgccactgccctcaatatgagggagcactgaaaggctcttgacttagaaccccttcccctttctgtctaaagccgaggagccatctgtggttgcgagcacgcagcacaccaggcctgtccatccccagtgcactgctgggtggtgggaggtccgccgggccagagtgaagtaaggcatttcctgtctcccagcgtcccgttcactttctcagaaacagcttggcaaaatcggcattggacatcttgggtgcctcggtggctgctggggcggcaactgcaggagccgcggcagggccgttctcagcctgaggagctgcagcacttgggcgctgcagggcacgaggcagtagagacagctgcgtccttcccttccccctcgctccgtatgtctgcggcaaaagcatggggccacctggtgccttcctggtctctggcttctctggaactttcctctgaggagggttgctgattgccactttgatgatgttctctttgatagtcatgccgtccatcttcatcacagcctgcgacgcctgggattcattttcatactccacgtaggccaggccctttggtttgccagcccggttggtgaccagcctgaggtccttcacggtgccatgagccttacagatttcttctagttcctctttagtacaggagaaaggcaggcctgagatgaacagcttgtgtttctctagggaagtgctgtacctgaacaccttaaaatcggggtttttgctcttatccacacagggggaaacaaacattggcctcccttctacacttttccggtccatctccagtgcctgaagggctgatttctcttatcccggaaatccggaccggtccagcct

SEQ ID NO: 443224 - DNA, 777 bp, Homo Sapiens
cctggaccttctggagtcacatgctggtgcttgacgttctggagatttcagggtttccaggtcctcttgatcccgcaaaacttctagtgacttcgtagagactctctgtatgctaaaagattttactgcctctaatgctctgcttctttgagtgactttaagaactcttgacttctcattttcaaggaggtctagctatctccttggtcaaggagacttctgctggttctagatccactttttctgggtgtcttaatgtcttctgatcctgttcgcctagatacctccgtcgctgttgagtctctttttcaaggagttctccttgtctcttggtcctgttcttctaaagacctctgtgatttgtgattctctgtttctagaggtctcacaatactctggtcctcttcttctagagtcttcagtggctcctggttctctttttctagagatctaaaggcctctttgttctcatcttcaagagacctcaggggttcctgattctcctttgtcagaggtctcagtgcctcctcatcccctacttctggagatctcagtggctcttgattctccttttccagagctgtcaatgactctaagttctcttgcagagaacttactaattcttgattttccgttcctggaaataaaaatgtctctagattaccttcaagagatttcattagttcttgattctccttttgcagggattgcaatgtctgtgtgtcctcttttcctgtaggcttaagttggcctacagcctctttttctagaggtctc

SEQ ID NO: 443225 - DNA, 403 bp, Homo Sapiens
  misc_feature (250)..(288): n is a, c, g, or t
tcttttgtcatttatttatttatgtgcagacttcaagtgctcaggcttagataacttttggtaaaagtacactctcatctttcgcccactgggtcctctttctttctttgctattctttgaactcgttctctgtggtttatttttctatgccaggagcatatattatttgtatcagtcctaatgcttagcttacaatagtctgacatggtcctccttacagagttactcattactcatcctctagtctgnnnnnnnnnnnnnnnnnnnnnnnnnnnnnnnnnnnnnnnaaaaaaacctttcccttctcccttttgatcacttgttccctaacttgcatcttttcattttgacgggcctcaaaatctatgtctcattctgcacttcccagtaggcgccccgtgc

SEQ ID NO: 443226 - DNA, 1089 bp, Homo Sapiens
cattatttgagattcctgttcattcttggtgtgtctctaacagatacagtatgtatacatttgtataattgttgttgttgaaagtccagcttttttgaggtatattttaaatgttttaaggatgcttctaaggatcagtagtaatttttttagttcgcacctaaagatgattacattgacctcccccgactgcttaccaaattaaaatgtgtccacgaagtaggctttgtgatcgcagatacattcatagtgaactcatcagaatggctggtttgcagtactgaaatactatcttctaggctgtatgtagtgctacaattagagaaacagaagtccaaggctggcgacagcttgaaaagtctgacagcttttctacttttcctgaaaattttaagactgtgatatctgtcattttactgtatagctgactgtgtactcaggtattttattggtccttgaaagattggtcgttatggatcacccagcctttccaagtcagtggctgttgttctgtcttgctgtctgatacgagagtggggcttttcagtgaactaaccagggattgttcttgacatacctgacttttctcacatttgaacttccactatcattgtatccatataacttctagcattttcatgccatggtaatccatgagctacacatacgtagcccggcaccgtgatgcaagttcatggtatcgtgcatgttcgtggtatcatggtatcattcatgcgtgtttgaatagttctacatctagtgcttcttgccaaaaagaatacattgtttaaattcacaaaattagcataattgcagtgctaatgaatatcggaatatgtgcacagtaacatttggactattcattggagagtttacccatacatttagcaaattgaatggccaaaacatttgactccagtgagggctcaagttagattcctatagaaagaggacacttcatcttacttaagtcatagttaagatctgtgatacgaaccatagatattgcctgacaaagcagaaatcaccaagtttcccccttttgaattaccaccaagaagtgttgaaacaccaaatagatacatgtta

SEQ ID NO: 443227 - DNA, 380 bp, Homo Sapiens
gtttatcgatgccacctctacccaacggtgtttatcgatgccacttcgtggacacattttaatttggtaagcactcgggggaggtcaatgtaatcatctttaggtgcgaactaaaaaaattactactgatccttagaagcatccttaaaacatttcaaatatacctcaaaaaagctggactttcaacaacaacaattatacaaatgtatacatactgtatctgttagagacacaccaagaatgaaccggaatctccaataatgccttcttgaatagtcttgacagcaaaatactgcccttagcgaactcccaataaacaaacgatgccacaaatggcacagtgtggcatcgataaacaccgggatcctgtgagtgactga

SEQ ID NO: 443228 - DNA, 1463 bp, Homo Sapiens
  misc_feature (575)..(602): n is a, c, g, or t
  misc_feature (1353)..(1353): n is a, c, g, or t
  misc_feature (1431)..(1431): n is a, c, g, or t
agtagtataggacgttcagtggaaattcactgactgaaagttttatgcacactgaggtccaagcatactcgggatccacctgtaaacgttcatcatcacagcagatttgtatatgtcacgaacttctccttatcaagacctgaaatattgccatgagtcagtcatgctttcaaacatgttcatataagctctcgcatttgaaaccagatggtaagacctgaatgctacaagagtgaacataacttaaatgctaactacacgttcaagtacagacataagaatgctagtggtacaaacactgtactccaaatgatgttgttaatcacctaccagcctaagactagtatctacttgatggaacttgaaaaagccataaagtccaacttgtttaaaatgttcagacttagacttacacttcaagatctagtatacatttattaataagccctaacctcgtaccataaaaaaatgggcatgtgctgtatttgggacatgcggacacacccacacccacccacaatctctcccctcctcatgtttactagactgaaaagccaccctgtatcctatcattnnnnnnnnnnnnnnnnnnnnnnnnnnnngtgcttttagtcaagcagcacaacacaaggacagatcatctgtgattaacagaagcgaacgccttaaaatgatgggagagagacaaattaactaggtactaagtcagatttccaagtgaaaaagacatgagcaaaacttctggtcttaatttctcaaataaaactaaaataaatgaaatggtaacagagtgactttctctaaatttattagggagtttgttacaaatgtttgggctttacaggcatgatttcacggattcaaacaagaaattaacactgatatttagccttctcatgacatacacagaaataacattgctacaaactgcaatggagagaatcttgtttcaaatggcttagtttggggttttgtctaaatgtatcattatataatgaaagcaccaatttgagggtttctcaaatagtgatttgaattttaggacataacagtataacatggtaactttattcttcatatataaataaggcataatcggatgtgtattaatgctgaaaatacattttatcaaaagcataaatacaagtatttgggtacacattgaaagttaggacttaaccaatttcttcttacaaaaaatgataaggacatatggtatttgttgaatctaaatcagcacttctaatcatttctggtattaaggcgatcttatttccttctactttaaaccaaccactgccaccaactgaataaggattccctaaacagctcaatttgagagactaaccagangaccttctctatgcaaattacatgccaatacaccttaaaagaaaataagacaaaagtgaatgagttttttcaatccanaatgccttccttgggtgcaaagcaatccaatg

SEQ ID NO: 443229 - DNA, 1193 bp, Homo Sapiens
tttgcgtttccacttaaggtttttgcatactctgcccataagtgactcattagttactcaagttttattcctggctctgccactagttcattaggggtctttgccccagagtcatttcttccattttaaaaacttgggctcattaaatctaggtaggaaagggcgggtgtggcaggttttaatagaacaggtcaagataaggctttatttctatagaaatgatgctttgacaatagtttggcttggtgtaaggctcacaaaagaaaatcacatgtaccatgtgtgggttaagcggtttgattcacactgaaccaggccagcccagttgccctctgctgtgtccacccgtggagtggagctgtgtcacagccatcacactggtaaactgctgtagctggtttaccaggctttctcttgccctgacagtacaggtgaagcctgtaaataaatcttctgctatctttgtgaacttaaccaaatcccagttaccttatttaaatggcaatagatctgttttcccttaaactagaaaccttaattacctgtattcctacctccagctcaacccatatatttgcacctttccagtaagcaggtttgtatttccatctctccccttcccctaagattctgaattagttctccagaccttgccaagcacattctccctggaaagcaaggaatatcacagacccacaagaagagtaaatgcccaggagtgaatgaagcggcttgtccttgacttggaaataaaagcaaagctgtgaaaagtcaggtcgctacgattttgttggcagcaggactagccacagagtagggaagttttggggccaggccctaggttttccagaatgccttgggtgatgcaccaagaaccttaagaactccctcttacattttccatcggttgcaagcatggcttttgcaactgatagcgtgctctgactacagatattctgggtgtcatggcaactgctttattgcttgtattagttggaccttccagctccactggccattcctggagttgccatttctcttggcggaaccctcctcttcgtctggccccaggttggtccgcctgattgtccatatccatcttctcctgtgctcccgcgccgttggcggggtttcgcctactcttgtctcgtttctctgcacgttcatgtccggggacattaacccgccggggg

SEQ ID NO: 443230 - DNA, 987 bp, Homo Sapiens
agcgggcctggagcacggcgctggggccgcccgcagcgctcactcgctcgcactcagtcgcgggaggcttccccgcgccggccgcgtcccgcccgctccccggcaccagaagttcctctgcgcgtccgacggcgacatgggcgtccccacggccctggaggccggcagctggcgctggggatccctgctcttcgctctcttcctggctgcgtccctaggtccggtggcagccttcaaggtcgccacgccgtattccctgtatgtctgtcccgaggggcagaacgtcaccctcacctgcaggctcttgggccctgtggacaaagggcacgatgtgaccttctacaagacgtggtaccgcagctcgaggggcgaggtgcagacctgctcagagcgccggcccatccgcaacctcacgttccaggaccttcacctgcaccatggaggccaccaggctgccaacaccagccacgacctggctcagcgccacgggctggagtcggcctccgaccaccatggcaacttctccatcaccatgcgcaacctgaccctgctggatagcggcctctactgctgcctggtggtggagatcaggcaccaccactcggagcacagggtccatggtgccatggagctgcaggtgcagacaggcaaagatgcaccatccaactgtgtggtgtacccatcctcctcccaggagagtgaaaacatcacggctgcagccctggctacgggtgcctgcatcgtaggaatcctctggctccccctcatcctgctcctggtctacaagcaaaggcaggcaggctccaaccgcgtgcccaggagctggtgcggatggacagcaacattcaagggattgaaaaccccggcttgaaggctcacagctgccaggggaatcccgaggccaaagtcagcacccctgtcctatgtggccaacggaggctctgagtctgggcggatctgcttggagcccagacccccggttcctca

SEQ ID NO: 443231 - DNA, 996 bp, Homo Sapiens
gagattcagggacagggtccaaggatgggaagaagacggtctccggggcctggaggagacaggggggtgctgggctccgaaagcaagatgccgcccagactcagaaggctgcccgctggcccacataggacagggggtgcctgactttggcctcgggtatcccctgggcaggtggtgaggcttcaaagccggggttttcaatcccttgaatgttgctgtccatccgcaccagctcctgggcacggcggttggaggctgcctgcctttgcttgtagaccaggagcaggatgagggggaggcagaggattcctacgatgcaggcacccgtagccagggctgcagccgtgatgttttcactctcctgggaggaggatgggtacaccacacagttggatggtgcatctttgcctgtctgcacctgcagctccatggcaccatggaccctgtgctccgagtggtggtgcctgatctccaccaccaggcagcagtagaggccgctatccagcagggtcaggttgcgcatggtgatggagaagttgccatggtggtcggaggccgactccagcccgtggcgctgagccaggtcgtggctggtgttggcagcctggtggcctccatggtgcaggtgaaggtcctggaacgtgaggttgcggatgggccggcgctctgagcaggtctgcacctcgcccctcgagctgcggtaccacgtcttgtagaaggtcacatcgtgccctttgtccacagggcccaagagcctgcaggtgagggtgacgttctgcccctcgggacagacatacagggaatacggcgtggcgaccttgaaggctgccaccggacctagggacgcagccaggaagagagcgaagagcagggatccccagcgccagctgccggcctccagggccgtggggacgcccatgtcgccgtcggacagcgcagaggaacttctggtgccggggagcgggcggacgacggccggcgcggggaagcctcccg

SEQ ID NO: 443232 - DNA, 278 bp, Homo Sapiens
ctcaccagaggcaccaagtaggttctgagggcttggggtgatgaggacagagttccaaacagggtctgagtgcaggatcagtgcagaagatctcagagacaacataaggtgcaagaggttggtccctatactttcactctcctgggaggagagatgggtacgccacacagttggatggtgcatctttgcctgtctgcacctgcagctccatggctccatggaccctgtgctacgagtggtggtgcctgatctccaccagcaggcagcagtagaggtcg

SEQ ID NO: 443233 - DNA, 903 bp, Homo Sapiens
  misc_feature (32)..(32): n is a, c, g, or t
  misc_feature (58)..(58): n is a, c, g, or t
  misc_feature (77)..(77): n is a, c, g, or t
tgcggaaataatttccccattgttcgcattgntgaaggatttcgcattgtgcaatttngttctcatgatgtggaaangttaatctatcccacttgattggatacccagttgattccaataccatattagcgatggcagagcactcgatgtgccagcccggccttccgggtccccagggagaggcccagaacacctcctggggtttggccgccttccacagggcgaagtcactggcatgacgcttgtcagagtccgctggctctccgactggaccagggaccacgccgaccaatttgccatacttgtctcctctagacttcagatcgaagtagacattgccttttgccgttgaataagcgttcccacgagcaatgattccttcaatgaaagaaattatctgaggaatattttcggttaccctcaggtacaccgtgggtgggagaaccttcagggctgccatgtcctgcttgaagtcttcctcataaagactggcgagggaagcgggggaaatattcatctcattggctcttttgatgattttatcatctacatctgtaatacccatcaccatgactatgctgcatccaaaaaccttggttaggatccttcgaatgatatcaaatctaacatatgagcaagcatggccaaggtgcgcatgatcatatacagttggtccacagctataccaggaggcggcttcggcgtgcgccacgattaggggttccttcctcccggtgaggctgttgtacacctgcacacccgtctcccggcccgtgggctgcagccaggccacgcccgcagccccccagctcgccagcccggcccagcaggccagtgccacccagcccgccacaaggcaccagcgcggcctggagcagcggggggcccaggcctggccgcgcg

SEQ ID NO: 443234 - DNA, 942 bp, Homo Sapiens
  misc_feature (559)..(559): n is a, c, g, or t
agacactggtgctgagttcacttctgtgggcttcagtcttctcattcatacacttgggctagatagctctttcttggatctttaaaaccaccaaaaactcaatgatccttctgggtctaatcagtgtgattcaaggcatattatttttaatgtcatataattcatgtcacttgcaataaagtgacatgaacaatatatagcagaccccattttgcaataagagtataatctcctttgagaattattcctgaaatcacaacccaggtttctcccgtccccttctcatccagtgaacacactcctcaaacagggaagcattctttctcatcagacattggcagaaccatacaaatgttcagaggcagactttcagggaggttcttttaaagtctaacaattcttatgaaacatgacaaagacactgacataagcgctgtcgggttaaaggagtcctttgaaatctcttttgtgatgtgaaatgtgaacattcttttgccttttgttaaacgtttagattgacactctccccacacacaaaaggaatatcacatcttattcntacatgctttagatgttgggattagtaggtttcctgcaatagatctgtgggcatttgggggatgatgcggtgaattgcagatggaagataatggtgacagtattatacaggtatacttaatgctgtttctgaattgaagatatttatcccttccagatttgcattttgtgttcaacactgggacactgtgtggggtaccctgcgtgacagttaatactgtgtaatgaattccacaagattgctaaatttcatgtcttctgttattaaattttatggctttcattttagtaagcaatttattataaagttttctcactgatctcaaagattaaaggctgtatatacagcaattagcattattctggcaataatgcctaagattt

SEQ ID NO: 443235 - DNA, 730 bp, Homo Sapiens
  misc_feature (682)..(682): n is a, c, g, or t
actcctgcttgccttccgccatccacgcagatttgtcactggcttattgatgctttttattttgcgttcttttgtggttcctctcgccaggccccacatcttgtagctacttagtggcacctccttggatgccaggatgctgcatcctgggccatgctgatgagaagagtcacagggggccagagggcaacccttagtggccaccttccttgtggtccagaaatcctgcctcagcagtgccggctgatgagtgtctctcctctgcttgtatccttccagtgacagtgggctcagcactatttttttattacgataaaatatacaaatataaaataccgttttaaccattttaggtgcacagttcagtggcattaagcacattcatattgctgtgcaaccattaccaccttccatctccaagaactctttcatcttcctcaaactgaaaccctgtccccacccaacacgaattcccccttccccagtcccaagcaactgccattttaccctctgtctctgtgaatttgagtactttgaatgattagatactcttggtccctcacgtaagtggctcatgcggtatttgtcctctcgttccgagcttaattctcctaatggagtcttcaagcctcatccttgtcgtggacagtgtcagcatttccttcatcacctgtttttaaanggtctttcccatgttgagctgagaaccaccttggggattctataggaa

SEQ ID NO: 443236 - DNA, 358 bp, Homo Sapiens
cacttagtatctaactcacatttattaaaaattgaagattacagaaaagcataagattgggcatcattaaacaagcttaattaacttacctttgactaataaatgaaaatatttaataacactaaaggaattttgagaataagttctattccaaccttagaaattaaaaataaaagcaaagcagctattctccaaaggagaaagcaaccacagatctccctctagtggcaaaagataaagttgctgctgaaaagctgaattgctcctccatacatagaactgctcagacatttcttctataaaattctaacttaagattctaaatcaatatataaggaaaatagatctattttttgtc

SEQ ID NO: 443237 - DNA, 1076 bp, Homo Sapiens
  misc_feature (39)..(39): n is a, c, g, or t
  misc_feature (338)..(338): n is a, c, g, or t
  misc_feature (663)..(683): n is a, c, g, or t
  misc_feature (697)..(697): n is a, c, g, or t
gaggttggatttgaccagacgccatagtttgtgccagtnccacactgttaagctgttaaggatgttagggtataggtgaatattgaggctttctttttaatcagcagccattgtgaattaagtgttcctcttcaatgatttttttctgctggtgggacctccacaaaacttacccagcacccctagcaagacattccagtcataagctgaggaatattcttcttagacataggggagaataggctgatgtcttaggattcataatccattttcatatagttccgtgaccttacttttgtcctgacaaaattattctgcctgaacatctgagagggatntaaatcctagggcttaccctctcctaggcaatgctcagtgagaaatgcaatgaggtggcagacacctgtccttatgcaacacacaaggagcatgtgaaccttttaatggatgacaacttaataaacctattaagccttttctgagcttatcctcacatttaaggggcacttgggaatctgcagcaaatacacaggggtttcatttcgggctttgtttacaacacccaagttaagcagtggttggtgtttacccatttcaaggtttgggaagccttgagattaactgaaattatttccaaaaatctacaaacccttgaaatgtttnnnnnnnnnnnnnnnnnnnnncactacttaatccntagagcaaaaccaaggacataaaatggtctctgaaaccaagttactttatatatttaacaaagtactgggtgggcgtggcataacttgattttaaactggagatttgttttttcaagcaatctggtggttctttagaatactgctttcctagtaccaaatttgtgcaatattaaatgattcctccagtacaatctatcttatttgttcaaatgacaccatcagctatgaaactatctgtgaattttgcctctattctcataggcatcatatcactcagcactatgttttaaaggaagaaaggtaatactatctgctttctaattgattaatagttacagctgagaacagaccccgtacaatctcatcccttaaccatgt

SEQ ID NO: 443238 - DNA, 1194 bp, Homo Sapiens
  misc_feature (1164)..(1164): n is a, c, g, or t
cattattgttattagtattctcattcagtctgttgtaggtagaagcggcgaggagtgaggagctaacgcacagtagacgagtatatgtgacgtatgggctcgagggcatcctgtactgagtgcctcttcgagcgagcatctgggagaggtgaggcgcgccggtggttagcgcaaggtgcaggaagttgacgttgagtagttgtggaagtgaagggtggtgagggcgggttaggcgtgcgatgtagatcggtgctattgaggttaatggcgggtagattgtggtgtgacggatagatatgagtgatggatctggggttggatacaggcccatggatgcgggagtagggactgcgggagagttctgtcataggacgccattggatggcccggagaaagcgatcgtgggcgcacatccgtggatggcgcggcggtgaggtaatttggagtctgagaggtgaatttttgccgggctcttgagaatgccgttgcaatttactttggcgtacaggagaataagttgagtttgtctaggctgtttaggtgaagggggagcgtaagatgtgtgtgtcgatttttcttgaggatgcacaatggagtttctgatcacccacttttcagaaagcaagaatgcttagcgatctcatgttgactgcattctttcttcaggcctggggaagggcaaccatgagtccctccatgcaggaaatgttggcaagcaatgaaggctgtggcaatttgagacaacagcaacactggtgggaatcacaagagctatcaatacatccctggcctataggacttctgttatctttatcctcctttttctgcctctacagcaatgcacttgaggtgaacaacctagaaaaccaacaagaattaaaaaataaaaccctttaattatttttgctgaaaataacctcagctattggacatacacagatttctaggtcctatgactgctcaaagccacagtcacgggaagatttgtaaatgtacttttataagaggcacattccaactagtttgctacagtacacacagtacagaaatacccaggtatttctgtaccaattacagttcacatgtgactcgcgttgtcttctgcgtgacatcggcctatggaatgtttgatatcagggcatgcctccttatagaaccccatgnaagcatccgagaattccggaccggtccagc

SEQ ID NO: 443239 - DNA, 1108 bp, Homo Sapiens
  misc_feature (786)..(798): n is a, c, g, or t
  misc_feature (957)..(964): n is a, c, g, or t
  misc_feature (966)..(1016): n is a, c, g, or t
  misc_feature (1018)..(1020): n is a, c, g, or t
  misc_feature (1023)..(1033): n is a, c, g, or t
  misc_feature (1035)..(1036): n is a, c, g, or t
  misc_feature (1038)..(1047): n is a, c, g, or t
  misc_feature (1050)..(1050): n is a, c, g, or t
  misc_feature (1055)..(1056): n is a, c, g, or t
gggggcgctccgccggccgccctgcgtacgctcgcaaggcgctcgcagactccggagtcgccaacatgtcgaccgccatgaatttcgggaccaagagcttccagccgcggcccccggacaagggcagcttcccgctggatcacttaggtgaatgtaaaagctttaaagagaaattcatgaagtgtcttcataacaataattttgaaaatgctttgtgcagaaaggaatcaaaagaatatttagaatgcaggatggagagaaaattgatgctacaagaaccattggagaaactgggatttggagacttgactagtggaaaatcagaggcaaaaaaatgaattttgatgagaagacccctgggccgtgttcagtggtctctcaggacggagggcatcatcctgcctcttaggttggctgaggcctgcgtgtggtgtccttagaaatgggcttcgaatagaagctccagccctgtgggggcgtctcctgggtagggagtggcgtcccgttttcccttaggagggtgtttgtgcattgaacccctgagtgggacggcgttcccggcaaagctgggagggaggcgagcgtggggcaagacccttgtcttcgaggccggggccctcttgtatggggcggttttatgttgcagtcctctgatactttctgagttcaaagaggtaaatgtataaatttcagtcccttctgaacacagatatcatcagaaaattaccattccctagcaggatgttttcgtgtttgtattcgtatatgccagttcatttcctttgnnnnnnnnnnnnngtggaacacaaagtaggaagtgagaaccttctggctttggatggattgacttcttgattctttctggttttgcctgaacaccaagtagcttcataatcaaagggtcattttctggtttgtatcagaccgtatttataaagttgggtatttaatttcaannnnnnnngnnnnnnnnnnnnnnnnnnnnnnnnnnnnnnnnnnnnnnnnnnnnnnnnnnnannntgnnnnnnnnnnntnngnnnnnnnnnnaangtttnnaaaccattctctttgggaaagctttccaaaaaagtaatttaaaattggtgtg

SEQ ID NO: 443240 - DNA, 1158 bp, Homo Sapiens
accaagagcgccctgggtttggtgctggtggtggagcaagttctgattgaccacatttcccttggttaggctgggcagcaaaggacatcatcggatcattgcgaagcatcacgttccggcgggaattctgggcagacacagcggtgctggcttgagacatcaaggggtccgactgtgtcatcatgacatcggctgtggctaagtgagtccgaaagtgagcaggtcctggaagtgtctggttacccatagtgtgacatggaagagaaggtagctggcttgttctcttggatggtctgcatgggagacttggcgtagggagttcagagatgaaggtccgaacaccgtgctgttaaaggagctggttggggagcccaggcccgagcccttggtggtatacgggaagctagagctccgctgcatgagtcccccagtgggcgatggctgggatggcgggagcgtgatgttatccagcaggtcgtccatgaggttttcagtcagcccatcattcagattcatggtgcctgccatatcagtcagccgtggcagttccaccgtgcacggcttgcttactgaaggtgacaggctggctgagctgctgtagagcatgggcgagagaggcgcatcatcgtcctggacttcatccaactctgtgcttgccatgatgggcgacaggcggccactgactgtgctggcgttagaattggtgcgtgaacggaagtccgtccacgcatccagctcatcactgctgcgtgacgtggggctgccaggccacttggagagctgggagggactgtcgtcagctgattcgggggctgtctgcagggctgccttcttcttggctgcgcggccacggctcttggtatacttgttgctattgtccatggagacagcccgccgccggggggcttttccgctcttccccccatcagggttgatgatccaccaagagctcttgccagttccctcattctggacccgcatgaatcgactatgcagtgacaggttgtgccggatggagttcttgtggagactgtccactcacccagacaccagctgcatgtgcttcccctggaacacagagaggtttttgtctggaagcaacatgtggtatcaatttatctttctcctcgtgccggattcgccacccaggcctcgctc

SEQ ID NO: 443241 - DNA, 839 bp, Homo Sapiens
ctttctccttaaaactaaaccctttagtgacatttggcaatgagtggagagctgagctgatttctttcctgaaaatatcaatattctagtttctaaccagcagaccaacactgttcacattagctgaggacactgacaggaaatcacaggccctactgatctggcacccgtagacttggtgctggggtcccgtccacagatcaccctgactcagaaccggaaacacactgggccggacgctgtgctccactccttttgcctatgcacggttctgtcctggacgggtgcacatagcaaacaattgtgccattgttcagtttttagaaaaggataattttctaccaaacaaaagaagaaagaaaatccccctttagtttatgtaatttgttagtttatggagttccatgcgctcaaaagcttgtgatgctcgaacccggaatggtaactggtacaacattttctttctgtttttaaatttgctaggggaaggacggttaacattttaacagaaaaataccgcaagttaatgcatgtgaaaaactcagaaagtcaaaggaaaacaaacacaagaacaacacttaaaacgtcccataaaccatcgcaatattaaaacaccacagaatggccgacgggggctcacggtgtgctctgaatgagggtgggtggtgctgaggggtgctgtcctccactggcaggcggctcaccaccctgtacaaggaagattttgcatactttttagagttctgttccaagggtaagtgcttcacccagggtaaggggccattaacagtctctgctgggttaggaaaatggcgtgggattcacaaaggtgttaagct

SEQ ID NO: 443242 - DNA, 673 bp, Homo Sapiens
  misc_feature (174)..(209): n is a, c, g, or t
aaactatccttactgtctgattcagtttctgacatggagctttcagaagatttatgtgaacggttcttctttttctttctccgttttccttgtttcttatcctcatcttcagaatcagaagaactgctggaagaatcagagcttgatgaagaagaagatgaatacctaccagannnnnnnnnnnnnnnnnnnnnnnnnnnnnnnnnnnnggatgagctctcacttccacttaacaatgttctccctgtgtttttccagttctttcttccagttctcattcattttttcttcaaattcagccaaagccttggagcctttctttttcttttctagttgctcttttacttcttcccaggtaggccttggtcgattcagataatcctgtattgttggccctgaagactggattggacccctttgatctcgccattgctattgggttcatataggcctttgttaaatttaactggtctcaggtttttgtttttgttttcaacaatattgatcacattctaatttccttggtatcatgtcataattttggcagtaccacccgattgtcccgcttccccatggtgctggatcgagcgcacagtagcacgccgagggaaaccgggccggagagactgccgaagagggcctgccgcaggtcctcttgccgcctccccccgct

SEQ ID NO: 443243 - DNA, 577 bp, Homo Sapiens
  misc_feature (176)..(211): n is a, c, g, or t
gaaactatccttactgtctgattcagtttctgacatggagctttccagaagatttatgtgaacggttcttctttttctttctccgttttccttgtttcttatcctcatcttcagaatcagaagaactgctggaagaatcagagcttgatgaagaagaagatgaatacctaccagannnnnnnnnnnnnnnnnnnnnnnnnnnnnnnnnnnnggatgagctctcacttccacttaacaatttctccctgtgtttttccagttctttcttccagttctcattcattttttcttcaaattcagccaaagccttggagcctttctttttcttttctagttgctcttttacttcttcccaggtaggccttggtcgattcagataatcctgtattgttggccctgaagactggattggaccccttgatctcgccattgctattgggttcatataggccacccgattgtcccgcttccccatggtgctggatcgagcgcacagtagcacgccgagggaaaccgggccggagagactgccgaagagggcctgccgcaggtcctcttgccgcctccccactccccc

SEQ ID NO: 443244 - DNA, 1306 bp, Homo Sapiens
  misc_feature (56)..(66): n is a, c, g, or t
  misc_feature (204)..(212): n is a, c, g, or t
  misc_feature (270)..(327): n is a, c, g, or t
  misc_feature (407)..(418): n is a, c, g, or t
cccctaaaaggcctataaaatcttctgtggaggaaggttgtgtcccaattatgttnnnnnnnnnnngaaggttaaaggttcctttccccaaaagatttcccaagggttaccagtttttccccagtccagggggtttttaaaaagaaagggcccagggccctaagttttaatttgggcttcctattaggggggccccttttttcnnnnnnnnntggggtacgggtaaaacttgggcccccctgaggggaattttttgaggcggccgccccnnnnnnnnnnnnnnnnnnnnnnnnnnnnnnnnnnnnnnnnnnnnnnnnnnnnnnnnnntaaactctaaaagcattttttgtattattttgttttgatacagaagggaaaactcagctataaagaaatattaaaaaggnnnnnnnnnnnngtgatcagtctcaagaatattccattatattccattgcctgcctcccccaacttgtgctgatattttaaggatgtgctcaagagtatgaagcagggtgcttttgtccctttctctcctccctagtaattccctcctccctatcccatagccaagtagccacccctcaaatgagccattcctttttgctttcatcaatggtctctgtgaagttggggtcgttgttcatgatggcggcgtccgcgctctctgccgactccgccccctttgcttcgttggtatggtaggtgcccttgtggcggaacatgtaccggatcaggaagaccagggtgcacaggatggtgaaaatcaccacagcaatgacgcctccaatgatagccgagtttctgttgactccatttcttatagcttggccttgtcctggattatatggaaaatctgcactgggctgaatccaggtgatccaggtgccaggggtcggtggcggacgacatgggggagagggtcagcggcgagggcccgcagttggactccaccagctcgccctggatgtggacgtgagccgaggcgtttgtctgcctcaaggcggccttgagaggggcgatctggttgaactggactctggagaggcaaccagtgaatcctggggtgttgtatttgtgaatctcttggtcaattttccctgtttctcttcccgccagccccggttcaggtgtgcccctcgctttgtgatgcaggtggctttcccactggccgggtcagacttcagaacccccgaggaccgtcctttgtcggccggcagcccgagtcccggcgggcagctttgagtccaccgctctcgggatcaaaccccgcaccactgcctcgtgccgaattcgccacccaggctt

SEQ ID NO: 443245 - DNA, 849 bp, Homo Sapiens
atagatactatgttgaagaagatgtcagcataaaaaaaagtggtaggaaaactctaaaacctcgaatgtcagtaagtgctgatgaaagaggtggtttagagaatatgaggccccctaacaacagcagtccagtacaagaggatgctgaaaatgcatcttgtgagctgtgtggacttacaataaccgaggaggacctgtcatctcattacttagccaaacacattgaaaatatctgtgcatgtggtaaatgtggacaaatacttgtaaagggtaggcagcttcaggaacatgctcaacgatgtggcgagccccaagatctgaccatgaatgggttaggaaatactgaggagaaaatggacttggaagagaatcctgatgagcagtccgaaataagagatatgtttgttgaaatgctggatgattttagggacaatcattaccaagataaacagtatccaaaaaaagcagttatttaaacattctgcctgcccttttcgatgtcctaattgtggccagcgttttgaaactgaaaatctagtggttgaacatatgtctagctgcttagatcaagatatgtttaagagtgccatcatgggaagaaaatgaaagagatcacagaccgaaagcatttttgtaatctgtgtgggaaaggattttatcagccggggtcacttaagagaaaccctatactgttcctactaaaggaaaaaacgttttggttttgtcaaccagcgggaaaggcagttttttaagaagaagggtcagtttgccgaccggcccaatgggtttggcaacaaaggcattggcccacggtaatgccccgggttccctttgggggatctaagggaa

SEQ ID NO: 443246 - DNA, 1535 bp, Homo Sapiens
  misc_feature (471)..(471): n is a, c, g, or t
acccccaagatggttgaagaggcggtgctggttgtatgggttgcaatggtcgtgacacaggctgagaagaactcatggttgatacaggagtgtgatttagttttttggggtcttgtgaagctccactctcttcatcatccattgtgagatcaatgacaccacttgaatcactgccagtggcttttccacactgtgatgtgctatcagctgctttcttactgacagaagcatctattgttttgtttgtctggttttcaattcttggggtggtattgctgttctgttctgcagcagacgaagtactaaatgcagaaatttggaattgttcatctgtataggaccttcgattagttgatggactatagagtcctgatgggcccactgtgggtaaagaagtccttgtggcttgtactatagagtgtgctgttggaacagcctgcacagcaagtgttgttcccaatggtgcagcanttggcagtagggttcctttgaatacttaggactgggcacagaaggaacgttgtttggtttagtgggatttggcaaggatggcaaggatactggatttttggtaagaccactcactgtaggtgggctttgcacagaaatgaattcaacattgccagatggttgattagtcaccaaagtccctggatggctctgtagaagctgaggctgggaggatactgcaacaggtacatgcaaaatcactggcaaaggctgtaaagagattgtaggctggggatttccactaggcacctgagtagtagcaactacagtagctgtattgggtgcaggaagaactgacgttgctgtgagggaacccgaagtcactggagtctgcaatttaggttgactactgacaactgctggaggagtgacaagattggttgaagatactgtattcacaggagtttgaaaggatggtggtgcactctcgcttacatttcttttggactccagcatctgtctcactgtgcctgcatttctgtaagacatgttattattgctgttgacatcatttacagtttttcctggtgatactggtgggttgggtggatgctgtgatgtgctatcagctgctttcttactgacagaagcatctattgttttgtttgtctggttttcaattcttggggtggtattgctgttctgttctgcagcagacgaagtactaaatgcagaaattggaattttcatctgtataggacctcgattagttgatggactatagagtcctgatgggcccactgtgggtaaagaagtccttgtggcttgtacaatagagtgtgctgttggaacagcctgcacagcaagtgttgttcccaatggtgcagcactggcagtagggttcctttgaatactaggactgggcacagaaggaacgttgtttggtttagtgggatttggcaaggatggcaaggatactggatttttggtaagaccactcactgtaggtgggctttgcacagaaatgaattcaacattgccagatggttgattagtcaccaaagtccctgccctgtggaaaagta

SEQ ID NO: 443247 - DNA, 649 bp, Homo Sapiens
  misc_feature (470)..(470): n is a, c, g, or t
  misc_feature (474)..(474): n is a, c, g, or t
  misc_feature (487)..(487): n is a, c, g, or t
  misc_feature (524)..(524): n is a, c, g, or t
  misc_feature (551)..(551): n is a, c, g, or t
  misc_feature (558)..(558): n is a, c, g, or t
  misc_feature (566)..(566): n is a, c, g, or t
  misc_feature (572)..(572): n is a, c, g, or t
  misc_feature (574)..(574): n is a, c, g, or t
  misc_feature (583)..(583): n is a, c, g, or t
aaatatgaaaataccatggctttatttttctcttaaaaagatagccgtgcttatgagctaaatggaaaggatgtatgtcattctcatcagtaaacaagatttaactgctttcagatgcaaaccataatgccgaagaagtgacatgaaggggataaaagtctaatgctttcatcttcacagcaatcaaatgcaaagtaaagcaaaaatgaaatgggacttaattaatgctgggcattcccacagggaaaacgcaagaggatattataacaatcagtagcagtattgtatacaatttaaaaattccattaggttgagccaccctcactcctctctctgggctctctcccatctgaggtattaggcaggctgggaactaacagagctagtagtcgggagcttttgctttggagtccactgagataagtgggtggcaaagtcttggaagaccaagataatctggctctggtgangcanctacgtgcaacantgtcgcatatggaagttgacaacatactcagcattantcctccgcacaagaaataacgaaaggntcaaaanggtgaaangttaangnaacaaaggngtcccactgtgttggttgatggggcgggccaattaaccccgcctggatttcaaaacttgagcaagg

SEQ ID NO: 443248 - DNA, 810 bp, Homo Sapiens
  misc_feature (29)..(29): n is a, c, g, or t
ggttctaagagattggatactttggaatntctttatataggaaattgacctcccatttcttaagcaagttgcttctggaattgatgcaacagggatattagctgtagtttaatggataagttgttctatgagctgctgctatcagtatttttttccacattttccattgatatttgtgatgcttgaaaaatccaaacttcacttggatacatttaattttatgcctttttctctctacctcccacttttcctaggcacccttgcacattttgttactgtgaaggactattgccctgttacctcactgataagaaatctcaactgtattcattcagaatgctttaagcttagtcataaactacatttgcctatggacctttggttattttgttaatgttgtcattatatttaagacttattgtaggaagtaattttaaatctatttcataacctgttttgatctgtctgcatactgctatatgttaatttattacggccttttacaattcacttgtcatctgagattgttctagaaactgatgagggaagaagtcgtactaaccaaaatgaatgggcaattgacataaccattctatttcaggtttccttgtccttggggagccaaagcacaagatctaaggaaatcttattcacatttgtccctcagagcatcttaccctaagccacagaggtataaatagtaagatgagaattgctcattgtctgactccttgcacagcatgaatttaattctagttggaaacaaagttagtgttgactactggttacctttaaagtattcaccatact

SEQ ID NO: 443249 - DNA, 661 bp, Homo Sapiens
  misc_feature (595)..(595): n is a, c, g, or t
  misc_feature (603)..(603): n is a, c, g, or t
  misc_feature (642)..(642): n is a, c, g, or t
agctttttctaggtgtctaccaccttgaatttatctcttaactgtgtgttcaagtctttgtcattgaaactagtttttcatatcttagattcagttgtgtatgatttaatgtcccttattaggagtctttaggcagggagggaagaaaaaacagatttgttcatagcaatgtcagtatccattttggcacataaagatttttgatgagccctgtttgcatagagccagatgttttcccctcccccaagaagtatctacatcagggatgtgactttggtgcgaagagtcaggggaaagaggaaaaacccaatttttaaatgacctccttgcccagcttactaaaatggctgcagagcagacacaggatgaatttgaacctgacacaggatgaatttgaacctttggtttcatttatggaaaaacttgtgcaattttttttctgtgctacactacatacaaatcaccaaattacaaattacccttttgtgatccttggtgtactgagcagtttctttggggctttttctttctgggaagcgggagggaaaggagcaaggtgtcatcctgctcttcatttgtattttggtcccaaaangtaaatanaattcccccatgttacttttttgtggtaactaccgaganaaatattttaattagataa

SEQ ID NO: 443250 - DNA, 1384 bp, Homo Sapiens
ttttctaaaatttgtttttaatgcttattggtacttctgcattagaagtaactacaaatgtcttattaaagtttccactttaaatgcacaattttacttcattttattataaggaattgttacagaaaatgcaaatatcagtatttgaaaaatacattccattacacagactccaaagaaacaatgctgataagcgccgtggtcctctatgataccatcaccccacactgagcaccaccccgaaggggctggaagccaggtgatccacccaaatgtgtgcctgcagtttctgcccagctactgcccctcctctgggatcacacagggatgtcgtaacagccaactccacacatctgccaaaaaagagcaagtcatcaaggcgagcagtctcgactcaagactccctagctgcagaaaaccaatgttgtcagttgtaacaggttaatatattatttatgccacacaaaaaaggaatagtacaggcaatgatcttccaaagaaagtctttaaggcatctgtaacttctgggaatttcagggtttttatcttgccagtcagctctcactaaagtacttccacagagtgagaaggtggctcccaagtccctttggtgagttggtgccacctgcttcctctgccaccaggctggggtggggagctttggtgcttcaggtagttcttctgggacttgtcccaagggaagcaagtgtctgtcatggaaacattacccttccttgttcctgctactgtcacctgggaagttagcgttagcttgcctttcagggcgaagcattacatagttcaaaagtgttctttttctccagataaaagaaacctagatggaggtcaagctctcccctttcccaagacgttccctccactccgtgcccgtggagaagattagtgcagaaacggttcaatatggcaggtgtgggacatgagcggggaggagtggagaaaccacacacacactgagatccacacagggacccattcagggacaagagtgaggacacagaacggggtggtcagaaatgactcggggctctgaggtagaggactaaaggtcacgtagaccccactccttggagagaacgtggcaggtgaactgagcaatcgaatccagcctcaactaaattggtaattggggttgaccgtgcacaggcccaaaactccaaatggaacacatgttctaacacatcgttcagtgagacaccacgaaaaagatgactgaaagttcaaaagtcctaagtgtaggcacttaagtttatgggaaatttcggtgttagaggatcatagcaattagtttaagccattcgatttatatatagcacatggtccgtacctttgttttaaagacacggtaccggacatcgtgatcctc

SEQ ID NO: 443251 - DNA, 1017 bp, Homo Sapiens
  misc_feature (46)..(46): n is a, c, g, or t
  misc_feature (56)..(56): n is a, c, g, or t
  misc_feature (61)..(61): n is a, c, g, or t
tagaccccccactccctggagagaaacgtggccaggtgaaactganccaatcgaanccccngccctcaacctaaattgggtaaattggggttggacccgtgccacaggccccaaaactcccaaatggaaacacatgttcctaacacatcgttccagtgaagacacccacgaaaaagatgactgaaagttccaaaagtccctaagtgtaggcacttaagtttatgggaaatttcggtgttagaggatcatagcaaattagtttaagccattcgatttatatatagcacatggtccgtacctttgttttaaaaacaacgacaacaaaagactgttaggaatacactggataataaatctggcgatgagcaaagggcagttgagagcacattcagcataacaatgttgactgttgcagcaaattatgtttcagtaaagtttacttttcctgctctactcattcagaagtggcaactttctgaatgaatttaagtttttgctactagtacttaagctactgatgaaaacttacaacagctaggcaggtttgtacgcaagtgttgacagcagggagagcacgggaagggctggaagcatgcctagtcccagccagggcagggcatgttggagtcagctcccactcaagcagcctgctgagtgcagcccagcgagcgtccgcgtggtcggggggcttcctaagtctgtggaaagaggcttttcctatatccacatggatgcgccctgaagccaatggaaaacaggactcaatgttctcccagtccatagctggtcagtaccattgctatccctggactcaggcttagaagcaagtttgaatcaacatatttgaaacatgatcttaagatcctgagtgcaatgacaggcaagattgttattgaaattggtatggtagggcatgggcagaacaatcggcctcacccttgactcatctcccacattccttttaaagaacaggtatccatgtaccaaccacttcaattcatatccgaaccatgattc

SEQ ID NO: 443252 - DNA, 539 bp, Homo Sapiens
  misc_feature (255)..(255): n is a, c, g, or t
  misc_feature (304)..(304): n is a, c, g, or t
  misc_feature (457)..(457): n is a, c, g, or t
  misc_feature (473)..(473): n is a, c, g, or t
  misc_feature (484)..(484): n is a, c, g, or t
  misc_feature (504)..(504): n is a, c, g, or t
ctaaaatttgtttttaatgcttattgggtacttctgcattagaagtaactacaaatgtcttattaaagtttccactttaaatgcacaattttacttcattttattataaggaattgttacagaaaatgcaaatatcagtatttgaaaaatacattccattacacagactccaaaggaaacaatgctgataagcgccgtgggtcctctatggataccatcaccccacactgaggcaccaccccgaagctgggaagncagggtgatccacccaaatgtgtgcctgcagtttctgcccagctactgncccctcctctggggatcacacagggatgtcgtaacaggccaactccacacatttggccaaaaaagtggcaagttcattcaagggcggaggcaggttttcggtttcaaggtttccctaggttgcaggaaaaccattgtttgttcagttgttaanagggttaatatatttnttttttggccncacaaaaaaggggtttggtnccggggatggtttttcccaaggaagggttttttag

SEQ ID NO: 443253 - DNA, 1094 bp, Homo Sapiens
  misc_feature (888)..(1019): n is a, c, g, or t
caagaagccttatggggaagcctggatctcattgcccccataattcttatgggaaaaagtttaggaagagggtaattatgtgggaaaaagggaacccggaaaatggaaaggggggttcctgtttaatccggggaaaaaattaaggttgaacccaaggtcattaaattttcccaaaaaccagaactttacccgaaaaggctgttgggtaagtatccacaggttttttaatccccgacccaagaaccgtgggaaaccaaagatgtcaagaaaaaaccagtgttattagaagccattcttttaaaagccaagaatttgaattgaagttccaatatttatccaattggcccacatggtaatcacagaaagcatcagcagcaggaagagctcgcatttctgcagccacctccaaagtctgaccttttggttgggctctcattttggcttctgtttttagcatatggaataatgagctgattttttgttttggtagagccatatcaagaggtgtttctcccttaacattctggatatccaggctagaaccagcttccaaaagcttatcaactgcattaacatttcctgctgcaactgcccagtgaagtggagtgttttggtgtattttatcaaccacattgagagaaggattaaactttaaaagaaatccagttggttctggcccaattactttgtgagctgataacatgagaggtgtctgcccatttacatctgtcatattcacactctgtccctttgagatgagatatgctataataggcatgtgttgaaacaatactgccaggtggatgctgctgaatccctctccatcaataagagtggggtctgcaccatgctggagtaataatatgaccataggtaaatgtccttgtnnnnnnnnnnnnnnnnnnnnnnnnnnnnnnnnnnnnnnnnnnnnnnnnnnnnnnnnnnnnnnnnnnnnnnnnnnnnnnnnnnnnnnnnnnnnnnnnnnnnnnnnnnnnnnnnnnnnnnnnnnnnnnnnnnnntggataatcattcttgagtgcaagtgataaacttgataacttcccgaatctacccttaaaccttgaccgttcaca

SEQ ID NO: 443254 - DNA, 626 bp, Homo Sapiens
  misc_feature (400)..(516): n is a, c, g, or t
cattttatggatggaccttgttcatactccggaaaattgactcaggtaccttacccagtaaactggcagaacttactgatctctatacctctggctgaaatgtagcaagcactcagaaaatgtttaagtagattaatgtattacatttcttaccagagtgactaagacccactaaaatttattgctagaacttcggcttaattactatgccttccgcttttggggtggcattgtcacatttagtagtctcagttgaaggtaaaaatttaatcaggtttagttgttttagtagtgtggcataatttttatatggtgaaattaaaatggtggaatctttaataactatcacccagtcaattctgcctcaaatcatcctacacacgttttcttccccaactcnnnnnnnnnnnnnnnnnnnnnnnnnnnnnnnnnnnnnnnnnnnnnnnnnnnnnnnnnnnnnnnnnnnnnnnnnnnnnnnnnnnnnnnnnnnnnnnnnnnnnnnnnnnnnnnnnnnnntgaaagttgtaggtattatgatattcctttttgtgctgaagtatttggtgtgggtgatgatgtgtatttattgtatcacatcaggtggcaataaagtcaggttttattac

SEQ ID NO: 443255 - DNA, 689 bp, Homo Sapiens
  misc_feature (230)..(242): n is a, c, g, or t
  misc_feature (477)..(477): n is a, c, g, or t
  misc_feature (619)..(619): n is a, c, g, or t
  misc_feature (628)..(628): n is a, c, g, or t
  misc_feature (635)..(635): n is a, c, g, or t
  misc_feature (641)..(641): n is a, c, g, or t
  misc_feature (651)..(651): n is a, c, g, or t
  misc_feature (668)..(668): n is a, c, g, or t
tttaaaagtaatagcagtttattaggaattcttccctttctcacctgtgtatcaacatattggggatcagtaatttagatgaaagtatactgcaaaaggagcaaaggacacagacttagtaggttagaatattctggcttatgctaaaaaacaaaaagccttttttttaaaacagacatgcaaccacaaatttctcaagtattttagacacttggttcatctgtataacnnnnnnnnnnnnntgcatttgacttaaaaaagaaatagaaaaccctaggtttctgtagtttagtttttcagatttacacatgcaaatcatatattcagatatttttaaatgggaaaacaacttactttcaacaacttaatttttccagtaacacgttactatgttaaaaagatgcgacagtatattcatttaatctggcaattttaatttcaacaaatacatattaacaacaaattaaatcctattgnaaatacacttctttggtataccacgaccaaattttctaatcctagtcaggccacaatgaaataggccaaacatgctccattaaagtttgttgggatgagattgtagtaaggttactcaaagttttcaagttctaattttaangggctgtanaagaacnttaaangattcctggntctaaaaatatgactgnttggatcttaactttccattt

SEQ ID NO: 443256 - DNA, 340 bp, Homo Sapiens
  misc_feature (254)..(254): n is a, c, g, or t
  misc_feature (256)..(256): n is a, c, g, or t
  misc_feature (262)..(284): n is a, c, g, or t
atgtacagaggttatgtttcccaaatcttacccagacgagtatggcacttagttcagacatttctagcagcagatttcccctcccctctaaccgagctatcaaatttctgtcttaactaatgcaaaaatatcaagtagtgagagacccaggtttataactgtactaggtacacagagggtgctgcgttcagtctggactttcacaaagcagtaatattccagggagcatagaaccaataataccacaactttancnaaatgnnnnnnnnnnnnnnnnnnnnnnncatttctcttatgactatgtaattttcactagaatctacacttcaacagtaggccg

SEQ ID NO: 443257 - DNA, 800 bp, Homo Sapiens
  misc_feature (257)..(266): n is a, c, g, or t
  misc_feature (678)..(678): n is a, c, g, or t
caggctggtaccggcccggaggtacgggatatcgtcgaccacgcgtcgaagaattgctaagtaactgtaatatgttgaagagagtaattgccaagcaagcagtcataagccaaaatgtaatgagcttagtatataaccactttagattatacactcaccactttttgtattcattcatgcaaaccctcctggaagtcgattagaagaggatccaatttgtggaccttttttcctccttttggacacctgagcacaannnnnnnnnncctttcatatttataccactttggaaaattcagtaaacccaattctggcacatcataatggtttcagttagtgaagatgttattttaataactttaaaatatgactatcctatacataagttatataagagggcataacaatagatgagtagaaatttataaaatttcttggatattttgaatgagaaaaaaacatttttaaaggaatttggttttttcctttttgggccaaaccggtacaagttagaaagtgtgctaaggactgaatacttgcctcgtgctttttgccactggatgatgtaagttaagaatggaattgttaatcctaagtatatattttcttgactttcatcagtttctaaagaaatctaatttaagtgttttgcggttttgtttgatctgtatttattgnagttctggtcatagaccagcgagcttggcacgtcatggctgcatgaacagccaggaacatagttattggggaacttcatggctcaaaaccttctgaatcatttaacttattttgtatgttgc

SEQ ID NO: 443258 - DNA, 709 bp, Homo Sapiens
  misc_feature (67)..(67): n is a, c, g, or t
  misc_feature (643)..(643): n is a, c, g, or t
tgaatgcttttcctggtcaattaacccctgccaaagctctcaggactaaaagaaatgctgtggaacncagtctcaagtagctataaaatatccaattagaggtcttctgaagaggatagtgttccattagaaatctaccagctccttttaactctatgggtccctatttctcagaacttttaccagaggtttgttcagaaactggctcatcaccagttttcttaacaaagctttcagatctttgttatcacacaaagagataaagagtctgaaatcctccttatgattcaggcatcatctgttatcctagatcaatgtcaagctaaagatttttggaaaggattttggcaaagtgtaattgtagattaaccccacagccttccattagataaatggcataatgggaagtttcaaacaatgagtcagaggactgggctctgatcttgagaaagctgattttctctatgaccttcaattagttatataatctttttgtctgtgaatcttttatctaatctgtgatatatggtaactacttttttgtttgttggttgaggactataggaaatacaagatgttattttttctcatatgttgggaagacccattctttctgcatttcttctaagggacctctttctcncttaagcacgtggacttcactggcaaacaaaggatgtatttaacctgatgaggaaagtcaattctg

SEQ ID NO: 443259 - DNA, 730 bp, Homo Sapiens
  misc_feature (160)..(197): n is a, c, g, or t
agaaatattatgtacatcaaacagaagatctacacaaattgttttatcagatactgaatatatcaatgggctagagtgtattatagtacatatgggtatgttgttttcccccttttgactaaataaactctcccctctctgcaacaggtaaatttccagnnnnnnnnnnnnnnnnnnnnnnnnnnnnnnnnnnnnnngaaggctttgtatctttatatctcagctgaaaatattacattctaactccccaaagctattctcacattatttgcaagtattttttcatagtttacatgtttgtgtatttgtttaatacattccacaagactgaaagtcttggtgagggcaggaactctgtctaggttgttcatctggcagccagcaaacccaaaataagtattagttgaatgaatagctaaatagatgagccatggggtagcatatctgttttagctactgcttgcctgttatcatcctgggatgctgcttgcttctccgtgatctcttcttgttcttaaattgtcttcagttgtagtactaagtactaatttgatctgtaatgtgatatgtggctgaagtttgctctgtaaaatcaccgtttcctgaggtatattcaatacctttaatttttccataaatctcttcaaggtttgtgtgtgttttcttttaaattatctaacttagttggatgtatgtttgaagtgctagacaataaaagtttcaataggct

SEQ ID NO: 443260 - DNA, 867 bp, Homo Sapiens
  misc_feature (480)..(662): n is a, c, g, or t
  misc_feature (828)..(828): n is a, c, g, or t
ttctgctaagttttgagctgggaagaaatagtaaatgggagttaatggtataggaggtctttattagtaattaagacatataaagcatcactgacatgctctgtatttaattatttgttttaatgacttctaaaatccttttatagtggcttttataagttcagttctgaccttagtctctagtcacttttttcccataaagtttgaagttcaatagcaaatgtttctaatttgaagtttcagaaggccttcagttagtgattgggaaaggactatatattagctgtcaaaaaaagttgtctagataacccatgttgcgaggattcagatacaattgtaagagccccatttattttttgagtgctttccaactggaatcagtgatgggcatttatctacatgatctaatttcattttcactataattccaggaatgggcattcttaacttcatttcacagatgaggcaactgaggcttannnnnnnnnnnnnnnnnnnnnnnnnnnnnnnnnnnnnnnnnnnnnnnnnnnnnnnnnnnnnnnnnnnnnnnnnnnnnnnnnnnnnnnnnnnnnnnnnnnnnnnnnnnnnnnnnnnnnnnnnnnnnnnnnnnnnnnnnnnnnnnnnnnnnnnnnnnnnnnnnnnnnnnnnnnnnnnnnnnnnnncagcgtggctaccctggggcgtagcccctcccaaagagcgctctactcacccagaatggcacggcagccttcctcgcaacctgcagccacactgcaggacatcgagaccaagcgccaactactctgcagcagaaggacaacaagtgattgaagaacagcggcggcnctggctgaactgaagcagaaagcggaactgaggccaatg

SEQ ID NO: 443261 - DNA, 670 bp, Homo Sapiens
  misc_feature (548)..(548): n is a, c, g, or t
  misc_feature (584)..(584): n is a, c, g, or t
  misc_feature (598)..(598): n is a, c, g, or t
  misc_feature (623)..(623): n is a, c, g, or t
gttctccttctgtttatttgtcccaatggtttaaaaaaatcagctttatggaaccataatcttcctcatgacagatgggcctgtacataagcattgcgctttcagtcaacagtttacatttcaagaggaaggtgaagaaagtgtaatgatatcttcagtgtctgtcatttttagttttataacattgatacaaaaaaatagtattctgattagcagcttgattggcaacccatgtaaccctaaatagtactacaaacctggagagtgcacttttacagacaattacttttggcgaaacagtatgtacaattttgacaaataaatacataaatacaatcattcatatatgacgttatacctaaatgtcaattatcatcaacaagcgttgttctagtaaattacttctttcattcacaagttactttgttgtttataaaaacgattttcacctttacagaagaaatgacataatcaattctcccactaaacccacatattaggaaaggtaaaaaatgaatcccagatgctttaggtaaatattccattgncttttgatagaagagattggatcgaaaaacttcttncttggctcctctgnaaataggttaattttcccatatcgngtcacgcaaaaggggttttatcttctgaattggaatccaatttaaag

SEQ ID NO: 443262 - DNA, 640 bp, Homo Sapiens
cagacagaaaattttaaaaagcatcagttcctttctcagaacttgacttgctcatgcactagagaatttgtggtccacatgcttctaggtgttactcgattcactaatactgaaacagctcagcttgtgaaagataaattgttcttcagacagagtgcttagaattagatttgtgatcagtgttttccttttgtgtgaaatactttagagtactgctataattgttattcaaattagaaggttatatacataaaactaaagattttcttgtactagtgcttattcttcataaacacagtgtaaagaaatctagttttttggtggtttgttttagactcccaactctgcctagtggcagaaaaacctcttaatagtgtgggtcatcataaaatctgcccactttaatccaaataagtatccagaagtcttcattccatattctttccaacttgtttgtctcgaacaaattagagttttagcacttattgttcaatgtactgtagtaattgtatttaatagtaagaaaatatataagcaatgattttttaaaagggagttctcaagagttttggatttctttctgccgtgtatagaggtttcttatgcatggacatttgtgctggttatatctttttcaatt

SEQ ID NO: 443263 - DNA, 807 bp, Homo Sapiens
  misc_feature (554)..(554): n is a, c, g, or t
  misc_feature (757)..(757): n is a, c, g, or t
  misc_feature (785)..(785): n is a, c, g, or t
gaaataatatattagttaaatacaataacaggaaaaataggggttattttatctttttccccttattaaaaacaagaactaccaaaccaaggtctaaacttaaatagtcctacacctattctgcaaacactagtaataggaaaataatgcctgactggaattcccttgtcttttttccttagatgataaaagtagtaacatgccttgctgaggaaagcaatggatataaatgcctgtaaaatacgctgctctaacatctgaaagtgattaaaatgattctatataatgccttcgtcaagatggaaaatcaaggaggaagaaagagaaacctttggggccaggcttagggtagacggggctgaggcctggcaagacagcccgtctacagtcactggacataggggaaacccacagggcatggggcacacctgctgctcagggttgcccctttccagctctctctcactgcccccaaagtcccatggcctggtgagaatagtgaggaggagaggggcaacacagccaggtctgctgtcacaaagagggatgaggtnggggggagatgacattttttttccccttgcaataaaagaaaaaggtcttgaaacggaaaggaaaacaaagcaccaaatgctgcatcttcgggcattatatgaacctcaataatgacctcagaagggctcattatggttaaaggtgcagtatcagcaatacagtgccgtttcacattttcaagtcgcaactcatgggaaactangttttggacacttgcggagattttggtnttctttttccttttttaagtcc

SEQ ID NO: 443264 - DNA, 665 bp, Homo Sapiens
acttgagacaaaacaatggcaaatttatagaaattaagtaagagaaagcaagcctactccaatcaggtagaaaggagatgttattcagcaaaaaattggaggaagtaaccaaaatttcatcaattcttgtcatttttcaaaggatcacctgcaccaattctgccatatatatatgaagtaccctttctgatccttgactcctaggctacccagtcaccttctaactggtttcccaggtatttcagactcaggaaagagaaaccctggatcggtgacacaagtattccaatcactggaaaagactatgcctcactgtaaattacacttgcagcgtgacctacggtaactacgatatgattaccacacagacctggtgaagagctaatctcgagcaaggctcagacccagcctctgttactgaggtaggcaaaggacctcgaaagaccccatctacagccctactactaatctaataacactgaaacagttcttaaaattagaacacagtgtctccaaattccacttgaacatagaatattagcatataaaaataacttatttttaaaatgtctgtaaagatactatcataattgaatgaattactgtatttcactgaatctaagccactgattgtaaaacacccagtaggccaacaggcccgagga

SEQ ID NO: 443265 - DNA, 684 bp, Homo Sapiens
  misc_feature (230)..(230): n is a, c, g, or t
ttttttttgaaaccaagttcatctttatttaaaggattgccaatcccattttaaccaattctttgatttacaaagagggaggtagacttcgttagcctcccacccttagcttaaatcgtgatgttgccaggttcctggtggttcagctgaatcctagacagtttcccttctcttcataaagctgagaagaaaaaaaattatctccatctaggcccacggaattttgtgcnatagacagtttgaattggtctgaaaaagtgtgactagctacctacctattcacaatgcctagaaaatgggctaccagatatggtagtggtcaaagccccgactttcctgtctgaggtactgggtttgctctaaggtagaccttggcaaggcccctaatggtccgtccagcagagtgatgctcgtgtccctcggctgtcaggtgagcgtgggtttgtgaatcagctttggataggatcatttctcttggatttaccactaggctctgtccctaacagggtctacctacctgacccccaagctggctcagtctcagcgctaaggtgtactatggaagggtccggacaaagactaatatttgagatctcttagtagcacaacgtgaaaatggtaggggattttgtcctccaacacgaaagacacttgcttttttaagaacaagaggatgtgtaattc

SEQ ID NO: 443266 - DNA, 977 bp, Homo Sapiens
  misc_feature (130)..(130): n is a, c, g, or t
catcgatgccacaggcattacttgtgacctgtacagtactggaaagttcatgaaacaagataaatgaataccatgcagtattaaccctaaccatgtgcataaatggtaattgggagaatatttaaagcanaaagagcaaacaacaaaaactaagttaacacttacccagtgcagtaagggaatggtaagatacagccggcttaaggaggtctgcagacagatgcacctaagatttcagcggttttaggtcacttttctcaaaatatttattaatctggcaaagggggatgggagtggggaacacttctctgtgaggcaaatggtatctcaccaaataccgacttttcaaggaagaaagctctccacttctctcataaacttatatactaccttaaacagtatgcagtattcggcatattttttaaaaatgagtccagagaaatagaaggatatagttacctcataaagttaactgttagcaacagacgtcttcgtatgtgatttataaatttcttggcaagaacaagatttttagaagaggcttactcacacttaagacagagtgaaaattactctcacagaatgcaaagtatagaataataaacatcaccattacctttaaatgccatacaaacatcctacattgcaggttgcagtatcaggtttccagaatttccaataaggcaatacctacacaaatattgccaggctaaaaatgtagcaaacttgcattcccaaactgggagaatctagcttatttgtaatactttgtgaaaagatactatgaaactaaaaaggtaaccgtggagtggaaactgctactagaaagtctgttatcagtagctacttctacttaagtcctccattctctcccagaagaaacaaaccaaacaaaaagcatctatcaatattaaaacctgcctcaataaaagcctagtgttctaacttagcacctctagtaaatctaatatagctgc

SEQ ID NO: 443267 - DNA, 655 bp, Homo Sapiens
  misc_feature (587)..(587): n is a, c, g, or t
  misc_feature (603)..(603): n is a, c, g, or t
  misc_feature (627)..(627): n is a, c, g, or t
tttttacagtcaattaaactgatgaactttattggagttaaaactataacaaagttcatcctaaaacactttgcaatgcaaaattatttcactcaaggagtgtttaataatttgaaggctaggaattacaagcaattttcaaaagcagaaactcacattcataaaactttatacatcatttgaactaaaatacatttatactactaaaatcaaacatgcatcaccttcaaacattcttatatcatgatttttatatattacattatttaacaccattcctcatcactacatggattttatcatacactggcaccattctccttggatttttgatctttgtcttcattctttacattatccttcttgagaacagtgtggatttcatccattaccgtagataagtttctgattgtcttattcatttggttttcaaattgtaaattcatgttttccgaaatctttaagttttcttgtaactgactaaggtcctttttaacttctctgagttcaccagagaggcttttgttggaattctccaaatttatatggttttttcatcttcatctgttttttcttctaataactgnagcttctggtctactnaactcttactttttcggtcttttncaattttgcaagaagctttctacattta

SEQ ID NO: 443268 - DNA, 986 bp, Homo Sapiens
  misc_feature (320)..(320): n is a, c, g, or t
  misc_feature (602)..(602): n is a, c, g, or t
tatatatatattatgtgtgtaaaataaaatgtatatgtaatatctcatgttgtttcctttcagttctcattttttttctatctgccaggtacctgccctccaagagttttgaaatttggctaaggtcaccaactgggttgctgggactcaaacccagttcattcagattcaaaatccacaccctttctaatctaccttactgccatgtatcacagtcatttctctccctaccacagcatgacgaagcaatgtgctgatggtgattgttcttttcaatccctcaaaggggcttttatctgaaaatgttctcccagaagtcnttactatattctttttctaaaagtttgtactcacttaggttcatgctggttagtgttatgctccaaattagcctatattcttagcctataaacctgatttctactctgagaaaaaaataccatataactattaatataaagggaatctatactagtttttgttaaatataagcaagaaaggttgttgtttccgtaggaaaaaaaatgtgtgaatttgattcaatccctgcattgtatttaggtctttccaggccgaatatttggagaaagaaggaaatgtcncaatagtttttactaagaggactacaagagaccctatgctgtaatagcagaatcggattgctttatttaaatcccatcattatttatccaatagttccaaaattggaagtgttaaatcaattgtgctgtgtgtcaaaagtaatttgttgctaaaaaatagtcaaagtactcatgttttcagatgatttactttttaattaaaaattattttgtagattagatgtgattccaggttattacagtatttatagcattgtcatgtatttgtgtttttatattttccctggtaaggaagagatggaattacatatagagtcataggtatactcaaaaaagtgaatttcttatgtgactaccactacctcattagtttccatcagcaaa

SEQ ID NO: 443269 - DNA, 1418 bp, Homo Sapiens
  misc_feature (400)..(413): n is a, c, g, or t
  misc_feature (1060)..(1060): n is a, c, g, or t
  misc_feature (1117)..(1117): n is a, c, g, or t
  misc_feature (1397)..(1397): n is a, c, g, or t
ccccgaggaaatttccaacacctttaatggtgaaactcattttttatccccggaggggaaaccccaaaaagcccgaggaaattaaggaaattccacctcatttttggaaccaagaatttttcccccccattgaaggccaaggtttaaatgtgtttttcgggggttaaggaccaattttccaaattattaagcccaataccccacaagttaaaatggctgaattttcttcccgtttaaaccaaagggataagacctggggttttacccaaaatgtgtgggtgagtaggatagaccactgatgagaaaccacgcaactgtaaaacccccgaaagtaaggtggtttctggccggtcttaaatggtacacatttcatttatagtataataggaacttaggaccnnnnnnnnnnnnnnaattaggcagtagagacacagaaggacctttctaattgacagatgagcatgtcaacagctatcttaactgccatataagtgcattttaattttgcctttacttgtttagatcagtaactgctttgaaatttctcttcatttatgctctactaattttgtttatgcgtgagcaccaaaagtgttgactatttctacctcacagcagcacgggagcctcacgaaacagccattcttctaaagaaccatctcaaccactgttgggtcaggccaggccattccaggttgtccagttacaatgattgcactaggaaatttcctatgggattcttgctttatacccaggtatcgggagacaccaaggagcactgagcatgacaaccagacctggaaacgtactgagccctggaactttcattcctctagaaaatttgtcaccaagggaagtccccaaatgaccctggcactaatgtgggcttttacctgcatatctcttgttccttttgctggtctttgctgagttgtatgtctgttttgatgctgaagatgtgacttttgggaaaatctcctgggatcaagcttcaaactaaacagtgaaatatttgactactgctgacagaagaaagacaaagtaaattcctgtccggaanagcaagctatcttaaaaggttcatggcactacaaggtggcatctgaaaaaccatctnttctagcttaagtccattcaccaatatctgttatgaatgactaaggctgtacttagtcatgatagccacatagggctatttaaatttaaataaatttctatatgttcataaatgctaagaaaaatgaaattcatagaggcagcatcttgtaactggatatactcatgaaggctgcatactagattaatagtattaatgcttactattcttctactgatttttactagattgagaatactaagggccccatgttggcttacttaggagagattagtagganattttgttttcaccagtcctt

SEQ ID NO: 443270 - DNA, 732 bp, Homo Sapiens
ggctctggctttgtattttctttacagcatagatagaaaaatgcacatttttccacactcagctttcccctagcatggacaagattttcagccatttttgccacatatacatttttaaggaaaaaatatttttctctgtaagaaagttctggttatgctgttttaaaggtgacttgtcaggagttgagacttccctgccggattctattttgaaagtaaatggtcttccctccttgttccgattctgcgttcccatcgtcagacaactttggagtattagaaaccactgtatatatgtggaaagccaggtcagccagacctgttagaattggtgtgcactcacctgagagatctggcaggttggatatatttatgtgtatttctccacagtgcttgctttgccctgttggtaaggattttaaataaccatgctcaaaagagctgttctaatctgcgttttgcatgttaagtgttaatatcaaacattctttacgtgctcgaggtattgcttttaacattctactttgccagtttcttcattagattaattgacatgtattatttaaatgaccagtgatgctttgtgcaattatgaatgttgaagattaaagtacatagttactaatttgtcgtttgctattaatatgctgaaaactgccaacttctctcttcttttctgtcgagatgatttggggggagccacagggagactggtgtgattttttgctgcat

SEQ ID NO: 443271 - DNA, 696 bp, Homo Sapiens
cctttgttctctgacaggtttattagctttcatgttaatggatgtttttaaaccctgcaaccctctgtcaacttctttccacatcaagaggccatgagatacagtaatggcctcttaagagtcatgccacataaagatgatgactttgatgtcctggcctgcctcctgtaacaatgtgaggctgttttgggtacatgctgtaataacaacaggactatcacaggaacaatgaagcagagaagcagaaggtgcctacaaagttttacctaaatgtcttgtttgtcaggatggagctgatgcgcccatactggcagaacaattagcacagagtagttctgaaaaggaggaagaattcacaaagcatcagttatgggtgcagggaagtcgccatctgccaatgggcaccagagtgtcactgtactggaaggggaaaaggagtgggctggatgagatccaggggcctctctgcccatgttcaaagtcagtagctgctctgcctgccggcatcacagtgtcaacacattttgtgtgtgtctcactcagtctcacacccaagaaaagtaaaaaccattgatgtaggaataaggggaatggattaagaatggtacatgcttattctaaagcaggagagccttcagattgttgtcaaagctcatgtctatctctgtcctcgaggcttcaaaacattttcctttt

SEQ ID NO: 443272 - DNA, 701 bp, Homo Sapiens
  misc_feature (472)..(472): n is a, c, g, or t
  misc_feature (475)..(475): n is a, c, g, or t
  misc_feature (505)..(505): n is a, c, g, or t
  misc_feature (507)..(507): n is a, c, g, or t
  misc_feature (574)..(574): n is a, c, g, or t
  misc_feature (580)..(580): n is a, c, g, or t
  misc_feature (585)..(585): n is a, c, g, or t
  misc_feature (601)..(602): n is a, c, g, or t
  misc_feature (617)..(617): n is a, c, g, or t
  misc_feature (620)..(620): n is a, c, g, or t
  misc_feature (622)..(622): n is a, c, g, or t
  misc_feature (650)..(650): n is a, c, g, or t
tccctttggataaacatgttaattttttatttaaaaaatcatcactcttttcattgtgacatcttgaagaacgctgaatggcttcaaaataactgcatatgccaagatttctggagtgggcacgtttgatcttctttcataatgaaaactgacaaacatttttaagggcatagtattgtttcttcactctccccccctcctcacccctgcacacacatacatttctccttcctggggaactccaaagaaaacaaaggccctttagcaatcaagtagattgtctctcttgatggcatcccatgagttatggaattacatactgcaggcccaggtggattagggcccctagaaagtttgcttgatcaacagagtgctgttgattttttcaactgaattaattactcttggagtccaaactctccagtgtgccacagtcttcatcacttcctgtatcttaaatattgcattatcntgnctcctaaaagtatttgaacatttgacccananaagaggacttacaacttgactaggcaaccttctgcacactggaatcatatgaaattccactgcaagngacatnaccanatcggggaccctgaannggttggagtatcttnttnanatttggtcccttaaggcttaaaaaaatnccttcttgtttaccagggcctttaaccattcattttgtaagcatttcaaca

SEQ ID NO: 443273 - DNA, 328 bp, Homo Sapiens
  misc_feature (14)..(14): n is a, c, g, or t
accctttgattttntaaaatagactttattttgatttttcttgaatatatgcaaattttcacctatctaatgtatttggaaaattttagaccgaactagcaagtataactgtttcaaggagttatttgaatggttacagaaatatggttgggttttagagccctgagaactgtacagtgggtgtctcatataacagaaatgatttactatcctaaaactatcaatggttattttaccaaattcagaatgccactagttcacagaggacagagtaataatcagtaattccagctcagatgatcaatagataagcattaaaaactgaaag

SEQ ID NO: 443274 - DNA, 437 bp, Homo Sapiens
atctgcacgaactagaaaagaggttaccactaaaagtatacaggtagcccttcctctttggatgtaatacagccccctgccactgccatcatcacacaaaaacgcgatgagtatgatgtagcaacaacaaagtcgagcttaggaattgttaaaatgattactcaagaagtccatgtgtccatctgggagttagcttgggagcctttgccagtctctgaaggagattatgtttggaggactccatgcaatgatgggaaaagcttgttagacatccaggaccctcttctcccctgactgtatccagagtagtcccacttagagccaaaagaaggaactggaacagcacgttagatcagcaatacagcttcccactttggcctcccttgattacttctctttcctttcctttttatagttccacccggacctcaatttaa

SEQ ID NO: 443275 - DNA, 705 bp, Homo Sapiens
  misc_feature (19)..(19): n is a, c, g, or t
  misc_feature (582)..(582): n is a, c, g, or t
ggattttccttttttaatnatggggataataatacctgtaatgagatttcttgtaaagtttaagtgaggttataaatgtaaaagtctaatgtcaaatctggctaccaagaattcaaattttctttcactttccatcaataatgataaaacgtgaatattaagcatggtttggattgaaaaccttctcagggtctcaaagtctagtcgagaattcaattcagactttaaaaagcagacattcagttctctccagatttgtgaatgaatgcattgttactaaagaagtttcagtgccaaaatatacactgtctcttcctttctccttttccttctgcagctaagtcggccagagcattctagaaatcaccttaaaaacgcatccctcttctcctactggagtttatacaatgacaaaaatctgatctggctttttcaaaaagcaaacaacaaaacatccaaacaacataaccctgagtctttaacagaaagctggtgcttgcaccaggggccgtgcagacgtctggaacgcattacaatcagcttcctaaggggcagcttatctcttcctctgatgctatcggnttgccaaggaaagttaaagacaaaagtcaactggtgcacccagttgggaatgtgaacatgtgggagaacctggaatatactaagactaatttatgttccgatgggagtggctctcatggtaag

SEQ ID NO: 443276 - DNA, 646 bp, Homo Sapiens
  misc_feature (579)..(579): n is a, c, g, or t
  misc_feature (611)..(611): n is a, c, g, or t
  misc_feature (620)..(620): n is a, c, g, or t
gatacacaattcagaagaactttaatgcatataccatcattgccactataatagagatagaagatacattaagaaaattcagtttgtatcaataaaacagatcaacacagaacaaggaaacaccatagatatttgtaaatgagatcttctcttttgctactgtgtatatatattcctttatatttatacaaactcacaacacatgacatttcatatttcatatgccactgagaagaggtgtcagtatacagaacataggaagaagaaaaaagcatgagaacatctgcttagttagaatctgatgaggagagacgtgagagctattgttcctctctctgctcaggcctatcgagaggcaactgcagtttttgctaattgttcctcctgaggaattctgctcatactgctatggtacatctcctaggttggcatgagaccagcctggtccccagttgaataaattagaaagagcagttgggggaattgaatatgatatgcaaattgcataaggtgacatctctctgtgtggccacagagatagatcatctgctcctggctccttgatctgagggaagcctntgctgtcaacctgctccagggtttaattctgntggggttgnggggcttacaacaaatggggtccttt

SEQ ID NO: 443277 - DNA, 941 bp, Homo Sapiens
ggtgggcgaatcccccagcccctttgtttctagtggccgcgggttttctcttggggaaaacagagtttagggccccactgtccccttttcctttcttgggccccgcggcgcccaaacgaaaagtgtttgagaaagcttttctaaggccgaagggcggccccgccaattttcgaatctatgtcctctcggcttcttcttcgggtgccagacctctcgccctctctccgtctttcttgctttttttcttttaggagaaaaccacttttaattgaaaaataaagcaatacatctcaaataagactctgttttaacaataaaactgtaatttgttgaaatagctttcctaagtggtattgtgaaatttaggtattggagtatcaatacaattccctcctttaattctgactcagctataagtaatattaaaaataaaaacttttccccataaatttaatttccataaatctgtaaagtctatccctattcccaatgcactgacaaaaagaggggaaattttaaacaatcattttcatactgagaaattctcagataaaagcaaataaagtattttccttatgaaaaagctgatatgtgagacacacaagactatcaatgatatttaactcattcacaaaactttaaaacacaattccatcaagatgacctctactacaattttcctttaaagaagttcccaaatcccagaatggtttaacttgacatattggatgtattaaactttgcaaatcccagaatggtttaacttgacatattggatgtattaaactttgcaaatcccagaatggtttaacttgacatattggatgtattaaactttgaaagaaactatgaaaggtattgctttaaactgggaaacactatggcaaaagtcttaaaaaggactgctttttaaattacacccatgtactggaagaaaatct

SEQ ID NO: 443278 - DNA, 667 bp, Homo Sapiens
  misc_feature (144)..(172): n is a, c, g, or t
  misc_feature (210)..(210): n is a, c, g, or t
  misc_feature (265)..(265): n is a, c, g, or t
  misc_feature (322)..(322): n is a, c, g, or t
  misc_feature (324)..(324): n is a, c, g, or t
  misc_feature (338)..(338): n is a, c, g, or t
  misc_feature (562)..(562): n is a, c, g, or t
  misc_feature (620)..(620): n is a, c, g, or t
  misc_feature (631)..(631): n is a, c, g, or t
  misc_feature (634)..(634): n is a, c, g, or t
ttttttttgcttcacaaatgtcaattttattgacactagtgcacaactaaatacaataattgcaaaggaagtggaacgtgtcaaacagaaatggtgacaatgagttagaactgcagttgtttcaaggtactacactattatttnnnnnnnnnnnnnnnnnnnnnnnnnnnnntgttatcactacaagtaggaattagaagagagaaattntggcagtctgtctagaggttaaaacatttcatgcatttgtgagttgctgttgganagttgttttttatttgtccaccgtaatctggcaacatccggggcttaccttcagctntngcactgtgcgtganatcgggtgaggcagttataagtgagagcatgctggacaccttgactttgcagtgacgtggaacagaaaaagcattcacctcatcattgaaagagttggagccgagaataaaaggtagttagaaggctagtgggaaggggagcggaggcaaggaaatagcaactaacaggccctaaacagcatccggcaacagagaggaaaagaactgcccttcggggcaagggnaaaagtagggtgagcacacttccgatacaggcaccttccacttttaaaaggcaacagngagcaccttgntgnacttgacctgggaacccccttttaggggacaaa

SEQ ID NO: 443279 - DNA, 975 bp, Homo Sapiens
  misc_feature (889)..(926): n is a, c, g, or t
cccatttttttgtgcaccaggttccaagatgttacgatcccaccaccatctgcaccgatcccgtcaccagaaagcatactcataaccatactgaagaccaagaagaagctatgcacgctcccaagatgttgccccaccgaaggcacaggcactccagagaccttttacaactcttcggtccggttttccctcaccagttgcccataacagcaaccacacaggccaaccagtggactgcagcagcccgttcacaatccacaggcagcagtacagccatttgttgtagaaacgcagccattctgtgagcgcaccaaagacaacaccactaatgcagaagagcacatgcctaaagacagtacccatcgcaaattcaaccgatccccaacgatgccactgatgaataggcccacagcataggagaagaggaaaatggtatccagtgtgccgaggaaaagagtcgctttctctgcactggggaacaaatggttgctgctccagatctccacaggcagctcaactgacgtgttaaaagcacttggggtccactgctcagagatactgactttgacattgctaaatgtttttcgtgaagcatggagcaacgaataactgaagaaagtgagcaggaacactacaacatgatgatggctgaactgggacagcagagaccctctttgaaaaacatttggccaggccatgttcttcctgaccttccttctcacctttgaccttaaggtttggatgagtgatttacatcatttcttccttccgagatccgcagtggtcgccgctctccagccccggctccgctcgccgggtcagcttggctccgctgcccgcctccacccccgctctcgacgaattcgagctcggccgatttggcctgatnnnnnnnnnnnnnnnnnnnnnnnnnnnnnnnnnnnnnnccgccaccgcgatgagctccagttccccatagtgagtcgatcattttcc

SEQ ID NO: 443280 - DNA, 672 bp, Homo Sapiens
  misc_feature (489)..(489): n is a, c, g, or t
  misc_feature (524)..(524): n is a, c, g, or t
  misc_feature (533)..(533): n is a, c, g, or t
  misc_feature (538)..(538): n is a, c, g, or t
  misc_feature (545)..(545): n is a, c, g, or t
  misc_feature (590)..(590): n is a, c, g, or t
  misc_feature (641)..(641): n is a, c, g, or t
  misc_feature (644)..(644): n is a, c, g, or t
  misc_feature (657)..(657): n is a, c, g, or t
tttttcctggtcagggctctgcctgatgaaatattttaaatggtatacttgaaaagagtagctatattgtttgaagaattttcatcacaaagttatttgttagtcttgatccaataaactgttaacaataagccaagccatgccaagccaagagctggtcccaactgctatacagtgctctttgcaatcaaatctaaaattaattacccaagtaatatatttaaggaaataaataaaactgtatttaaatgcttatgaagtataatcacagtctgtagagatatgtttgttttaccggcaaaatttaagtttcctttcacaggtcattctgtgtgcatgcatcaacacacacatatttattatttctccttctataagaactatcttggttgaaaaatttggcttaaaaatttattatagtgactacagggtcctcaaaataaaaaggaggcacagctggttaggttatgaatcatgctgcattatcanttttaattgactaggaaagaagtagaataccctgncacctgatncttanaaccatnttgcaccacaaaaaggttaatctgataaatcaccatcaatttggnaagcttaatatactaccctggttttggaatccggataatgcaaaagaaaanccntttatcctcggtntataccttcacttcg

SEQ ID NO: 443281 - DNA, 699 bp, Homo Sapiens
  misc_feature (624)..(624): n is a, c, g, or t
  misc_feature (635)..(635): n is a, c, g, or t
  misc_feature (646)..(646): n is a, c, g, or t
  misc_feature (648)..(648): n is a, c, g, or t
tttttaagtaatggtaaagtttatttcatttttaataacaattagaggacaaaatgtttaaaatttgcagtttaaaacatgcacattcacaaaaggccaatgacacataacactgcatagaaataatattactcaattttaataactataaaacacagtgcatcaaacatcaagataaacaaacctgagaaaactactataaccacagattcaatactctccactcatgcagcttcacaatttctacagcagtttcagcaggaatggtttttcagggagctgaaaatactactttatctttaacgcaaaactgcagttttctgtagtagctgccttccaaggctgccctgtttttcttaacctaataaacttgaaaatgtaaaaaatgacgattaaagtagttaaacaacagatagtatttactgcatttatggcttccatttagaaccatgaaacataaaaatattatttttaactattctgctcacatctttgcaagaacagatttacctgtggaaagttgctgttaattcaaagtaagccaatatgaaatctagttttcctacttaagggagatttatttgctgagaagttttgggagctttactaagaaaagtcttaaangcagcttaacnggaagatcaantnaattggtcaaaattctttggaaataatctacttattaaaaaagtgggccga

SEQ ID NO: 443282 - DNA, 237 bp, Homo Sapiens
  misc_feature (13)..(13): n is a, c, g, or t
gcaaatatgaaanctagttttcctacttaagggagatttatttgctgagaagttttgggagctttattaagaaaagttcttagaggcaagctaaacaaaagattcaattaaatttgttcaaatttctttgtaaaataatctacttattaaaaaagttgtgcagaggaccaattaatttgtctactgaattttaaattccaggtaggccgtgatagaactttacaaggcagaaataaa

SEQ ID NO: 443283 - DNA, 638 bp, Homo Sapiens
  misc_feature (32)..(32): n is a, c, g, or t
  misc_feature (67)..(67): n is a, c, g, or t
  misc_feature (130)..(130): n is a, c, g, or t
taaagccatgcccgacttgattgagcatcccncagttcccggtagcttgaatctgatttattaaacntgcaagatggtggttggggacttggactgttacttgtgaccaaagttagtgtttgcattgtgncagtgcacggcttcccctcttaaaggtatgttctgaagaacactagagttcatactgggatctgtaaaatgcagctggttagcagagcaaggcaaagcagtatttgaggccccacaacccggggtactattgctactcaagtgagagctttgacaactcatagactgtagtaactgagacattgaactgatgggaaatgaaccctgaccctgcttccttagcaagtcaggtccaggtttaggaactgcagaactatccatttgagactgtctgagcaaactcaacactgtcgtaggtggttgttttcttttccgcaatgcgtctttttgctgagacatcagcttatctcttagtgctgctcgaccactttgcccttcacctgttgggagaagcatgttggcagtaggagggaacatggtgtttaaagtgctatgtccttcagtgttgccactgccggcaacagctccagaattgctactgctgctactgttgttaccagcaagtttgt

SEQ ID NO: 443284 - DNA, 504 bp, Homo Sapiens
  misc_feature (29)..(29): n is a, c, g, or t
  misc_feature (88)..(88): n is a, c, g, or t
  misc_feature (145)..(145): n is a, c, g, or t
ctttttgcctgaaaacatcaacctaaacnccttaatgccgcctcgacccactttgccccttcaacctgttgggaagaagccatattgnccagtaaggaagggaaacatggtgtttcaaagtgcctatgtcccttccagtgttgcnactgccggcaacagctcccagaattgctactgctgcctactgttgttaccagcaagtttgttttgatttgcctagctgtgctttggctgctgctgagagtaaactacttgctggaaaggaggcagcattgtgctggttcaagatctgatttaaaggcattcccagcaaaccaggctgactctttacagaactacttccggcagatgcagtaggaaaagctgcactgcttggggtatttagtacattacttattccagcaattaatgggttagggatatccttgtactgatgatgtccatcggacttggtagaagggcttgatggcattgatggccttggggaccctattgttgaccttg

SEQ ID NO: 443285 - DNA, 873 bp, Homo Sapiens
  misc_feature (754)..(754): n is a, c, g, or t
ctggtgacagagtcgaaacttcgcaggcctataaaagtctacccacaggagtggagctcagggacggggagctctctctgcggcacctccatgatggttatgaccaggcagtttggaggacgtgtgagaaggactgaccagagaggccagcctcttgggggtgagcagcagctcagtagggttctccggcaggcacttctgtcccgtttgcctccacaagtcaagtttacaaggatgttgttgtcatcgggcaggctactaacttcatcatctggcaggcacgtctcaaacctgcagaaaggacagacaatgacaccttgtggggagtccccaaagtctatgatcttgtagaggcatttggcacaaaccctatgacaacactccagcactttgggtttcctctgtttcagattgtatcgattgtaacagattttgcactccagctcatcagaggcctgagactccgcagtgtcttcaggaggttgactggccatcttgaattatgtgtgcaatcttatgccaggtgggtcttgttgaagaatggctttgattaaggtgcccctctgaatatcatatcatccaaatctggcagcgatgcaaaaaggcaggataagtagtgaaagaaaccagaaatcttccaggcattttcaacttctgcatataactctgtctcaaacgcatatttataaaggccacatgaagggtctttttttcccctaaaagcctcgatggcacgccaagaaggaaaataacnacacaacagaggggcagctccctgagcaggtgcagcccgcgcgggcgctccgcagccgccctccgccgcacagcccctcaagttggtgccaggacggcggcccccgtggtgcccccgct

SEQ ID NO: 443286 - DNA, 875 bp, Homo Sapiens
cgaaggctggcaagaagccatttattcatgaggcccatggggtggggacagagctgctgtcacaggtaagcacagcctgagaggggccagaggacggccaaccacgtggagaggtccaagggtttttgcaggagtcttggtaaggctcccctccttcccacgactccaggccgctggtgtcagcatcacacatgggagatgagacgtccctgcacagccttccctgggcttcctgggcacgaggtttagctggacatgatgtgcttcacaaatgcttcatagttgatgcagccattggagtcctcttgcccagccatcaacttctccacttcgtcttctgtcagcctctcacccagcgtggccagcacgtggcgaagctcagcacccatgacagtgccattgccctccttgtcgaagacccgcagcccctccacgaagtcctcataggtgcctgtgtccttgttcttggaaatgtgctggagcataggcaggaaagtttcaaagtccatcatcttggtattgagctcttcctgtcttggcttccccaggacacggagcacttctgcctgtgtggggttctggcccagcgcccgcaggacatccccacactgcccgtaggtgatcttcatctcacacttgggtgtgcggtcgaacagcatgaaggcttccttgaactcttcaatctgctcaggtgtgaactcaatcttgatcttggaagcatcaaactcgacctccttagggcgctcaggctcagggggaggtgcgggagctggagctgccttgggggctgccttggcatcatccttcttgggctctggctttttgggggccattgggggctgtaagtacagagagggatgtggagagaagaatgc

SEQ ID NO: 443287 - DNA, 1809 bp, Homo Sapiens
  misc_feature (796)..(796): n is a, c, g, or t
  misc_feature (874)..(874): n is a, c, g, or t
gctttggtttccctggccttaggttccaaatggtgaattaaccaaaaatgggaaggaatattcagggatgatttcgagacccagggaatactacaggatgttccaacacttcccacccgggaatccccaaaagaggccccgcttttaggcctccccactgggttggtgacctgcctctgcagttcactctgctgcttcagatgaaaattttcaggtctgtctgccactgtagtgaagcactgctttgggtagtgtctgtggagaaactttttaaaggacatagttgaaatattgtgctacaaaccaattcttgaacaccactcattttgtcctacctctctgtgaccgtgaaagacggctgtactcttggcaaaggtcatctctctgtcatgagtctggatctccttttcttctcctgattatctgtcactcagttatccccactctcttccacaactttaacttcagcttctctattctaagagactcttctcgcaggctcaaggctctcctaccctccatcattcctccctctaccccacacagccagcatgtgtccagctagtctatccttcagccaaacttccttagaaagaggacttacctcactgtccctacccctctactctctgactcacttcttagctccatgactgggttctggtttctttcccttgcctgttgtgacttcctatggacacagccaaaaatcatcacatagtcctgttgtatggcatccccaccatcttgaaaattgtcctctccttccagttcctatggtgttaccaacacacgncctgctttggcttctcccctctagttgttccttctctgtcttctgtgggcttcttattggtctgctcactccttcttncagtgtcctctccatgggtttccttccctttctcagctgatgccatcacctggggaatcaccagttactcagcagcactggggcctctctatctctatgctggtcatgcctatgtgtgagctgcagacccagtggaatttccatttgtgcatcccatgcccagcccaccctccaccagcctcgaatgcagctgttcagccctaccccagtcctcagaaaagttcctctccctggatcctctttttccttcatgagtgcccggttgcccaagtcaaaaacctgggagtgatataaactccccacacatccagtcagtcactcatcaactctattgattctgtctgctaaatatatctcaattgtattaacttaaacatatgcataatacatcttcttcttcactgcatttttgtgggctgcacttacctttcaggtaacaacaacactggcccctcttgcccttctagtcagaagtgccaaaatgatgagagctagccatgacaaacccacagccaacattacactgaatgtgcaaaactggaagggcatccaaacagaggagggaagagaggaatagacaggaagtcaaactgtctctgtttacagatgacatgtttctatatctagaaagccccatagtcttggccccaaagcttcttctgctgataaactttagcaaagtcttagcatacaaaatcaatgtgcaaaaattactagcagtcctatacatcaagtcaagcagagagtcaaatgaagaacacaatcccattcataattgctacacacagaaaaaataagatacctaggaatagagctaaccagggaggtgaaagatctctaggagatctctagaagaattacaaacactgctcgaagccatcagagaagacagaaacaatggacagcggaaattccggaggcgcgggtcgacatat

SEQ ID NO: 443288 - DNA, 443 bp, Homo Sapiens
  misc_feature (215)..(215): n is a, c, g, or t
  misc_feature (228)..(228): n is a, c, g, or t
  misc_feature (393)..(393): n is a, c, g, or t
aactttctttactgtgtttcatttaatgctgaaatcagacaatgattagaacatgaaactttgtttgaaaaagtatattcaataaattttgtctttaaaacagagctcttgacctataaagtataaaaagtaattacaatgaaatattcttcagtaaatctgacactttgggattccagggcaaaaggatcgcttgggtgccaagaagttcaagnaccagacctgggncaacataggtgaggattctatctcaatgggatcactgtgtgggccgttcaggcatcttcctatggctggtgtcagggcaaggaggaaatttctggggaaagaggaggcatctccatggttttatttaaggggaggactgggggtgttcctttggtagggaaaggnccctggcccttgccaccaacccccgggtcttttaactggatggtgttttt

SEQ ID NO: 443289 - DNA, 499 bp, Homo Sapiens
gcatgcctgcaggtcgactagagaggcagacaagatcgaccgtctcactttacagaagtgcaaagagtagctggcctaatgccacagccaatgaacagatgaaggaggcctacaaccacctagtcttccctacttctcctcactcctccccttctgacctccttatgtcaccactgaccaatggatcactgtgtggccgttcagcatcttcctatgctgtgtcaggcaagagaaattctggaaagagagcatctcatgtttattaaggagactgggtgtccttgtagaaagtcctgccatgcacaaccccggtcttaactgatgtgtttcaccatactgaaggcaagttgccatctaacatagttgaaggcgagccagttgtggtgatctttgttcctgctgaaatatggaaagaaaatgaggaaatgagctcattttcaaagaaaatgaacattctttcacatgaaagaaataggagcaaagtgacaggagagaaaca

SEQ ID NO: 443290 - DNA, 140 bp, Homo Sapiens
tggggagatatctatgcattgttttattgttagatcaggcataatatatccaaagtgtaaagtctttggaaactctcgatgaaggaaagggattcagtttccaaggtgtgggctagaaagagctagaaagagctagaaag

SEQ ID NO: 443291 - DNA, 501 bp, Homo Sapiens
  misc_feature (488)..(488): n is a, c, g, or t
tgctttccaaaatactgcagtttaattctgaaaaactcaaatgcaagaggcccagagctgtctatgggattggatctcctgcaacctgccttgggccccagaagagactggcaatgtcagcctcctccctgctctgcctgagggaggccacggagaacttccttatcgggcccaaactggagccgctgactgctcagagcaagatttctgccttgaaagcaaatgcagtagcctcagaaatgtgcagcgcatacttcttcctccccctctccccctccaggccggcagagctgcagtaaagatgcctgcaggtcatgacctcatgtttcctgtccacttcccatggcagggatcagagctttgggagatatgtgaccaaggaggacacatgaacttgctacccctctctctaccccagacatacccacatgactttgttttactcgatattgcatttggtttaactctggaaatgggtgacctcccangtgtaccgagctc

SEQ ID NO: 443292 - DNA, 587 bp, Homo Sapiens
tttgaccatgaatatttatggcagttttaggtgtaacagcaacaattgcaaacaacccacgtgtcttcagtgctgcctcgaccggcttgagccaccagcacactgattttcccacagtcctggaggcaggagtccgagatcaagggggcaggactggttcctccgaggcctctctccgcagctggcagcccctgccttctccctgtgccctcacttggcctttactccctgtgtgcaccccggggggtctttttgtgtgtccagatttcttctttttatcaggacacagtcagattaaattagggccctcccatatgaccccattttaacttaatcaacgtttgtgaacatcgtatctacaaacacagttacattccgagtccctggggatgatggcttcagcctgtgacattgttggggggacatgattcagcccaaaacaaatgggcagatgggcaaagagacgtggctcacaccctaggaaaaacaactcagaaataaaaaggaacgaactacgcaacagctggaagagagctccagcacatgtcctcgtgccagaggcagcacctggatgaccccacggatat

SEQ ID NO: 443293 - DNA, 1302 bp, Homo Sapiens
  misc_feature (76)..(76): n is a, c, g, or t
  misc_feature (130)..(154): n is a, c, g, or t
  misc_feature (851)..(851): n is a, c, g, or t
  misc_feature (918)..(918): n is a, c, g, or t
  misc_feature (932)..(932): n is a, c, g, or t
  misc_feature (1176)..(1176): n is a, c, g, or t
aagggaagtgaagaagactgaagggaaaagaggggaccagtgcagaaaccctgggggcagcctgggaaggcagacnaccccttggacttgagcatcagctgaattagatacacgcaaatgtgaagcttgnnnnnnnnnnnnnnnnnnnnnnnnntcacacccttcaaataacaaaccagagcaaccaatcaaactgtcattaaattttatcattaaataagtagcaaaaggtagatactatatagcaaccttctgtgcccatggatgcaaatgaatgaattgtctttaggcttgaatttcatctggctactcaactaggggaatcatctgctcaagaaagactgatacagagagccctgctgtctaagctgctcagggacactgggctgattcagtcagggccgtgcctggtacctgctgctgctgctctctgctcagagggcatacagtgaacatccctttgttccttttagaccagtggattctgttctcatggtggctcacagggaggcatggactgctgcaggctctgccttgtatcacactctgcttttccacagagacgccaggcctgggccattttgcgaagtttagtgaggttgggtttaatctgtttttcctgttccaagtggtgctatgtcagctaacggcagcatagaaggtgctcccgtgagcacactggaatgtcagctggcatgaggacagagcttcaataaggcggcaactttcctgtaagctcgggccatcattaaacttaatgtccccatggcaggctttggatgccaacacctttctggacagtcagtggcaatgtcccttggatgcctccggtggtctggagtagctccagntgttctcggataaattcctccacaatactcttggtcacagtagatcttcctctccgaagttcattgncttctctttccacncaacatagtggtacttttcccacaaggaccagagaatcactagtgtctggaaatacaaattcaaggcccagatcttccagatttttgtggtaacaccataagagtctcctttgttcctctgtcactgttatctctagcggaggaattagagtagaagacagtaattttttccgaccagagccttgtgcctgttgcttctcgtaggaatcaatgataagctgctccagacgtatacgctcatggncagcgtgctgatccaccagcacgagcaggttcccacctgcctcgccattctcttcagtcttagtgctcatcaaacaggcaataaacttgttatctatcttgctggagaacctgcattgaatgaaca

SEQ ID NO: 443294 - DNA, 809 bp, Homo Sapiens
  misc_feature (133)..(133): n is a, c, g, or t
aagttccaggcccattcaattgagcgttaaatgggcccccagggcagggcttgggaattccaaccccctttttgggacagtcagggggcaatgttcccttggatgctcccggtggtctggagtagctccagtngttctcggataaattcttccacaatactcttggtcacagtagatcttcctctccgaagtcaattggcttctctttccacaaaacatagtggtgcttttcccacaaggaccagagaatcactagtgtctggaaatacgaattcaaggcccagatcttccagatttttgtggtaacaccataagagtctcctttgttcctctgtcactgttatctctagcggaggaattagagtagaagacagtaattttgttccgaccagagccttgtgcctgttgcttctcgtaggaatctgcctcgccattctcttcagtcttagtgctcatccaacaggcaataaacttgttatctacttgctggagaacctgcattgaatgaatcattcctttggtgaaacgatagggatacaagatgttgtgaattttaactgctaagctctcagcctggccactgcttacatcaacagcaacctctggataacgggcaaatactggattgtcccattctgagaacaaagactgaagcgattcgctactaacagtatcatccacagtatctctgttatcctgtctcatcacagtcctctctgctcgagctctcggaaggaaaggaagaacaaggtcgcttctaaaaggttgacacctgtactgagacccattctcaagtacacatcccagcc

SEQ ID NO: 443295 - DNA, 1099 bp, Homo Sapiens
ggaaaaaattcctcccccaaatattttgggtcccagtagatcttcctttcgggaagtccatgggttttcttcccaccaaaacatagggggacttttcccaacaaggaccagagaatccctagggtctgaaatacaattccaagccccagatcttccagattttatgtgtaacacctaaagagataaccatagaggtctctttgttcctctgtcactgtatctctagcggaggaattagagtagaagacagtaattttttccgaccagagccttgtgcctgttgcttctcgtaggaatcaatgataagctgctccagacgtatacgctcatgggcagcgtgctgatccaccagcacgagcaggttcccacctgcctcgcccattctcttcagtcttagtgctcatcaaaacaggcaataaaacttgttatctacttgctggagaacctgccattgaatgaatcattcctttggtgaaacgatagggatacaagatgttgtgaattttaactgctaagctctcagcctggccactgcttacatcaacagcaacctctggataacgggcaaatactggattgtcccattctgagaacaaagactgaagcgattcgctactaacagtatcatccacagtatctctgttatcctgtctcatcacagtcctctctgctcgagctctcggaaggaaaggaagaacaaggtcgcttctaaaaggttgacacctgtactgagacccattctcaagtacaacatccacagccacagttgtcaggtctttagtacaagcagcctgaatgtcctcagttggggcaatgaatgtgctgagtccagtcattttgttgacataaaccattcttcccagggctacatcgaaatgccgctgccaatctgaacaacacgtgtttgactcttcagtttcagaacaagctcttgctttagattcctcactctgaaaacaaattccattttggtcacctgtggcatcttctaccggattcattaacattccactgggagagtcaagacttcctatctgttgttctgaggctctgataagaacacctcgtgccgaattcgccacccaggcctcgctaccta

SEQ ID NO: 443296 - DNA, 1878 bp, Homo Sapiens
  misc_feature (1327)..(1385): n is a, c, g, or t
atcaggccaaatcggccgaagctcgaattcgtcgagagcgggcgttgacggtgacggcggctttgtgtgtgggcggaccccggaggcctgagcggcacctgcccccagccccctgtggggccccggggcccccagaaacctgcaggacggagccagacggggcgggcaccatgaacaagttacggcagagcctgcggcggaggaagccagcctacgtgcccgaggcgtcgcgcccgcaccagtggcaggcagacgaggacgcggtgcggaagggcacgtgcagcttcccggtcaggtacctgggtcacgtggaggtagaggagtcccggggaatgcacgtgtgtgaagatgcggtgaagaagctgaaggcgatgggccgaaagtccgtgaagtctgtcctgtgggtgtcagccgatgggctccgagtggtggacgacaaaaccaaggatcttctggtcgaccagaccatcgaaaaggtctccttttgtgctcctgaccgcaacctggacaaggctttctcctatatctgtcgtgacgggactacccgccgctggatctgccactgttttctggcactgaaggactccggcgagaggctgagccacgctgtgggctgtgcttttgccgcctgcctggagcgaaaacagcgacgggagaaggaatgtggggtcacggccgccttcgatgccagccgcaccagcttcgcccgcgagggctccttccgcctgtctgggggtgggcggcctgctgagcgagaggccccggacaagaagaaagcagaggcagcagctgcccccactgtggctcctggccctgcccagcctgggcacgtgtccccgacaccagccaccacatcccctggtgagaagggtgaggcaggcacccctgtggctgcaggcaccactgcggccgccatcccccggcgccatgcacccctggagcagctggttcgccagggctccttccgtgggttcccagcactcagccagaagaactcgcctttcaaacggcagctgagcctacggctgaatgagctgccatccacgctgcagcgccgcactgacttccaggtgaagggcacagtgcctgagatggagcctcctggtgccggcgacagtgacagcatcaacgctctgtgcacacagatcagttcatcttttgccagtgctggagcgccagcaccagggccaccacctgccacaacagggacttctgcctggggtgagccctccgtgccccctgcagctgccttccagcctgggcacaagcggacaccttcagaggctgagcgatggctggaggaggtgtcacaggtggccaaggcccnnnnnnnnnnnnnnnnnnnnnnnnnnnnnnnnnnnnnnnnnnnnnnnnnnnnnnnnnnnctcagtggccccagtgcccaccatgcctcctgccctgcagcctttccccgcccccgtggggccctttgacgctgcacctgcccaagtggccgtgttcctgccacccccacacatgcagcccccttttgtgcccgcctacccgggcttgggctacccaccgatgccccgggtgcccgtggtgggcatcacaccctcacagatggtggcaaacgccttctgctcagccgcccagctccagcctcagcctgccactctgctttgggaaagctgggggccttcccgccccctgccatacccagtggccctggggagccaggcccgccctcgccccaaatggggccccccttggccccctgaggcagcgccctgccccagcttccagagttggacccctttgaggcccagtgggcggcattagaaggcaaagccactgtagagaaagccgctttccccctttccctccccttcaagcaccgcttgagatttggacttt

SEQ ID NO: 443297 - DNA, 314 bp, Homo Sapiens
  misc_feature (53)..(53): n is a, c, g, or t
  misc_feature (96)..(96): n is a, c, g, or t
  misc_feature (103)..(103): n is a, c, g, or t
  misc_feature (118)..(118): n is a, c, g, or t
  misc_feature (187)..(187): n is a, c, g, or t
tgccgtaacttgttcatggtgcccgccccgtctggctccgtcctgcaggtttntgggggccccggggccccacagggggctgggggcaggtgccgntcaggcntccggggtccgccgntggccgccgcgctgcgggacatccagggcccgggcgcccccgcttcccgcggccctggctgggcctggntccccgactgctgctgctgcggtggtggcggcggcagctcggtctgacgccggccagggcccggggccgggggatggtgcgggatgcacgcgcgcgagcttcctcggctcccgggaggattcccgct

SEQ ID NO: 443298 - DNA, 494 bp, Homo Sapiens
  misc_feature (27)..(27): n is a, c, g, or t
  misc_feature (53)..(53): n is a, c, g, or t
  misc_feature (60)..(60): n is a, c, g, or t
  misc_feature (62)..(63): n is a, c, g, or t
  misc_feature (453)..(453): n is a, c, g, or t
cttgtggggaaataaaaagatttgtanaatcttacatttattcctaaaaatantgaagtnannaaagtcaacttaaagaaacatcatacttgactcttgatatgcaaatataaaacaagttcataaaatttattgtttttctctgttacatatattagttccattctgccttcagtttttaacaatttatatgtgaatgtgtgtgtcaaatatatttcacgtttataacatatacacatatatgcatacaatctttaagttttaaggcatgctcccaattttagctaacctgttataaattctacttctctgatcaaagtaggattaaatacagggtctctgttttaggggtaattcttgggtgttcttgttattctaaaatgtgaataatgtaaaataccaaaaaggaaaaaaggacatttcataggcctccaggccaaattatacaatggnctataaatctttggatttcacttggcactttacgggtttta

SEQ ID NO: 443299 - DNA, 791 bp, Homo Sapiens
  misc_feature (174)..(174): n is a, c, g, or t
  misc_feature (348)..(348): n is a, c, g, or t
  misc_feature (385)..(385): n is a, c, g, or t
  misc_feature (407)..(407): n is a, c, g, or t
  misc_feature (449)..(449): n is a, c, g, or t
  misc_feature (470)..(487): n is a, c, g, or t
  misc_feature (501)..(501): n is a, c, g, or t
  misc_feature (643)..(643): n is a, c, g, or t
  misc_feature (686)..(686): n is a, c, g, or t
  misc_feature (738)..(738): n is a, c, g, or t
  misc_feature (780)..(780): n is a, c, g, or t
tcgccgccgaccgagttcttccttttcagaccgggtcgccttgctgtcgtcgcggtgattttcctgctactgctactgctgctgctgccacctgccactaccactgggctcatttgccccgaccccttcccgccgccccggccccagccccacacaagatgtcagaggatttangcaaagcagctggcaagctacaaagctcagctccagcaagttgaagctgcattatctggaaatggagaaaatgaagatttgctaaaattgaagaaagatttacaatggctctctgcatccccgaaacgccttccttcagtaagcagagtgcttgagtgcaccccatttgacctnctgatatgtagatcacaacacctgatgcttcctgganttgccgattactgtaactcctncccatctgtcgatgaaggagcagtttcagaactcagacttgngggaggaaaagtaattaatgnnnnnnnnnnnnnnnnnnaggaagttataganctaaccaaagaccttctgtcaactcaaccttctgagacgcttgcaagttcagacagttttgcttctactcaacctactcattcatggaaatagagcgacaagtgtatggcagtctggagtgaagatggacagtgttatgaancggagattgaggagatagatgaagaaaatggcaccgctgcaancacctttgctggttatggcaatgctgaagtgactccactgttgaacctcaancctgtagaagaaggaaggaaggcaaaggaggacagtggcaanaaacccatgtc

SEQ ID NO: 443300 - DNA, 919 bp, Homo Sapiens
  misc_feature (130)..(130): n is a, c, g, or t
  misc_feature (709)..(744): n is a, c, g, or t
aatgcctgacattgtattagaggtatcttgatattgtgtcataggttatcagcattcccacaggttcttactccaactttaccagtcacactctcaggtgaagcaaaaatactcctctttacctggcctnttttgtttttagaataggctctgttgttgaattgttgccatttcactttctggtcctctctttcctgctcaagttcttttattctctgagcttttttcaaagctttcttctttttatattcacgctgctgggcaatcatttctttttttgacatgggtttgttgccactgtcctcctttgccttccttccttcttctacaggcttgaggttcaacagtggagtcacttcagcattgccataaccagcaaaggtgattgcagcggtgccattttcttcatctatctcctcaatctccgcttcataacactgtccatcttcactccagactgccatacacttgtctcctactttccatgaatgagtaggttgagtagaagcaaaactgtctgaacttgcaagcgtctcagaaggttgagttgacagaaggtctttggttagttctataacttcttgtaaatctttcttcaattttagcaaatcttcattttctccatttccagataatgcagcttcaacttgctggagctgagctttgtagcttgccagctgctttgctaaatcctctgacatcttgtgtnnnnnnnnnnnnnnnnnnnnnnnnnnnnnnnnnnnnaaatgagcccagtggtagtggcggtggcagcagcagcagtagcagtagcaggaaaatcaccgcgacgacagcaaggcgacccggtctgaaaaggaagaactcggtcggcggcgagggggaagggaggaacgccgggcactggaagatcccgagaattccggaccggtccagcccc

SEQ ID NO: 443301 - DNA, 1154 bp, Homo Sapiens
tctgagtgtggccctggctattttattccatgtgctggccctggggacccagctgggccaggtcgacgcccctggggagacagtgtggctcggccagcctcagtggcttctttggggtgcaggagggctttggggttaaggctggggaggaacaggaagtaaagtgcttgcaggggccctcggggcttggccccagccaccctccctgctccggggcgggccagaggccggacacccctgggctgtgcaaacaggactctccagggcccagccaggcctgggtgaggggcacatactggctggcaggcatggttcccaacacccgcagccacggaggctctggcggggctgggggcccggatgaggggtgagtccagaaccgattgtccgctgattgtctgcttgtctggttcgtggctgtgtcggctcttcccggtatcggggcctgctgcccgctttctgggggctgcccgccccatgggctcctcacctgcggagccgctgcagctcactctctaccagattccgcctatagagcgcctcctttgcagcatccctgctgccatcgttgcccaggcgccgggcagcctccgtgtagaactgcagctgccgctccagctgggctgcgtattcccgtcggatgcccacacccccctgctccagctgtgccctctgccactggctgcgttgcatgatgtcctggtactgctgggccacttctgggggcaccggccgccgcgcctgcctgagggccaggatcttccgctccagacgctcttggtcaaacgccagcacactgaggctatgcaggggccgggctgatctgttccctgactcccttgcaggggcaggcacaggaggggccttccctttgggcccagcaacctgtgtgggcacagctgccggcacagggtcaatgaccagccacctctctgtcgtcatctccaactgctgggctgtcagtggctcccgaatccggaccattacctccagtcgcccccctgtgggccggcgaccatccaggacctcaaggatctcccggacctcacatgctatctccagtgcatccagcttcagctgggctgtccccagcacccggtcagtcttgaacagcccccccttgtgaaccacttcgaacttgatgcccttggtct

SEQ ID NO: 443302 - DNA, 2255 bp, Homo Sapiens
  misc_feature (479)..(479): n is a, c, g, or t
  misc_feature (500)..(501): n is a, c, g, or t
  misc_feature (639)..(639): n is a, c, g, or t
  misc_feature (848)..(848): n is a, c, g, or t
  misc_feature (943)..(943): n is a, c, g, or t
  misc_feature (1225)..(1225): n is a, c, g, or t
  misc_feature (1240)..(1240): n is a, c, g, or t
  misc_feature (1255)..(1255): n is a, c, g, or t
  misc_feature (1265)..(1265): n is a, c, g, or t
  misc_feature (1268)..(1268): n is a, c, g, or t
  misc_feature (1293)..(1293): n is a, c, g, or t
  misc_feature (1305)..(1305): n is a, c, g, or t
  misc_feature (1312)..(1312): n is a, c, g, or t
  misc_feature (1321)..(1321): n is a, c, g, or t
  misc_feature (2186)..(2186): n is a, c, g, or t
  misc_feature (2227)..(2227): n is a, c, g, or t
  misc_feature (2242)..(2242): n is a, c, g, or t
taaaacaaaacattttatttaatgcagaaattctaaggtacaaaaacattttgtaaatgtcagctgtgatctactttcacctagttacagagttatgtacaaatcaagtcattaacattttcaatgtcaaaaatacagcacgctgttaagagttctgtcagtgctcattatcccactagatcccacaaagggcaaactcaaagatgaaacaaaggcaacgccatcaataaccaccatattccacaggctttctcccctaggacgtactaacagggagtttccacagggaaaaattctcttttaaaaaattaacagtaaaaataggagttacttactatctagatgaacacaattggtttttcacaaaagcttttgctgctgtctggactcaccatgcttttttcttgagagaaacataccaaactttttgttgttgttgttgagacggagtttcgttcttgttgccaatattttttaanatcagaattcatcatataaanntccagattgtcagcttttcttgaaaaatgggaagatcaggaagtacttcatggccacagtcgactggaaaattacccactgtgggtggaacaggggcgcttcaggttgccacagtccccaccattccctattgttganacagacaaagtttattaattaccatttatcatcacactgctgtcttccttatccctccccttttattcttgtgccctctaaatatataatctcctctatataagcactattagtcttcaccaatagaaaataaaaaagactagtaaccttcacattggcattgcccatttctcttcaataaagacagaaataatattttctctcttctncagggagccaaattagtgttgaagttggggggccagagagttttctttcttttgggagaagggtgtgtcatttttcctcaaggaataaaattggncctcttgccccttatttcttttaaaagaaaagatgctcaactctgaaaaaaaggctctgaaaatcatgtaaccccactttttgtgaaggacagtcttcctgcttatttgcactcaagatactattatttgctcaagatactattatcttgctgggtcaccatctgaatacctgggcctggactggaatgacttctgactctttctggagatcaattgcctcaaaggcccaagacagccctctggaggagctttggcaccttgtatggctgggctgagtctgntgaggtggtctctgntgaggtggtctctgntgcttggagncantctctgagaaggcacacctttaccngagctttacccnccgtgancactctccnggcaaagctgatgacatcagatgctaagtcctctctgtagctcattgggtaagttaagatgaacaactagcactctaccttcagctacccgcaggcttcttggttttcctggaaacctggacttatccctggtctcttttctagaggacattgtctaacctatctacacaagccttttactctcaggatcaaggcctctcatggagatcatcctgttttccatttcttgtttccataatatctaaaaccctttaccttgccaaacctttttcctaatttcctcctttttcccccctcctggaccatttcctaatccaaaaattccacctttccttaaaccaatttttttcccttatcctccaggccacgattcccatttctagcatactggggagagtagaaaaagtgaaactaattaaacaaaactaggaagttggacttctcaatttattctgaggcaatcacactatggtttcattactcggtatattaagagtttgattttattgatcagaaacattagtatttcaacataagtatcaaaaccctaaatccaaactaaaacatcccgattttttaactagcactctctttttctcttccattttcttaaggagtgttttcacatagcaagctctctgcccacacacccttggagctcagttaatgcttctcttcccagtcctccattctctccctggggccactttctcagagatgccttatttcatgaacaaagctgaataccctaaaagcgactcctaatgggttcctctggggacagggaaacatctcttgggcctcaataaggaaatctctcatcatgttccaaggtggaattttcgtatgttaggcaagtttgggnctaaccaatctcctttcacaggaatgcctaggggatggaangggcggggcagttcngtgtggggtaggg

SEQ ID NO: 443303 - DNA, 1069 bp, Homo Sapiens
  misc_feature (215)..(236): n is a, c, g, or t
  misc_feature (328)..(354): n is a, c, g, or t
  misc_feature (531)..(589): n is a, c, g, or t
  misc_feature (769)..(836): n is a, c, g, or t
ttttgttgaattcctaggtcccacctctttcactgcatcatcccagaatcccatgttggagtttttagtgtcagcattactccaaatactactgactaggtcagatgcccactggttaggaggaccagtatttatagagccccaaacagaattcccaatgctggtgtgcaggttggaatgcgtattgttacgagctctgtttggttgctggtgtnnnnnnnnnnnnnnnnnnnnnntttgcatttgcctggcctcttcctgctggatctccagaagagatttcgtggtacctgaaggtttgctgacattcccccaacctgagagtttnnnnnnnnnnnnnnnnnnnnnnnnnnnaagagctttcatcaactccctctgctggcgcctgttgctcgttctcgaagctgccgttctcgttcttcctctagtgttttggatttcagccaacgacagcgtggcctgggactgacatgctgttgtattggactgctggccccacgttgaagaagaaggaagcttcatctgcgccannnnnnnnnnnnnnnnnnnnnnnnnnnnnnnnnnnnnnnnnnnnnnnnnnnnnnnnnnntggcgcattaactccttctgccgctggacctccagctcctttctcttccgttcttcttcctcatgccggagtctggctgcctcctcttccatccgcagccggttctcctctaatcgacgctgggcttcttcttcttcccgggcccattttgcagcctcctcttcctgtttgcgtaacaannnnnnnnnnnnnnnnnnnnnnnnnnnnnnnnnnnnnnnnnnnnnnnnnnnnnnnnnnnnnnnnnnnngctgctgtctttcttcctcttctcgctgtcgccttaatgcaatttcttgctcccgctggcgacgcagagcctcttcctgtttccttcgggcaagttcttcttcctctcgccttttcctttcttcttcctgctgtcgccgaagaatttcctcctgttgtcttcggagttcttcctgcctctttcgctcttcctcttcccgttttgccctcatttctgcctctcttctctcttcc

SEQ ID NO: 443304 - DNA, 296 bp, Homo Sapiens
gtatttacagataaattttaatggaatatttcatggtctaacacaaatatgagacccaatgacactaaatcttgtacagcctttggcttaccctgtgtaacaaaatctgttatttaaagtagactataaaatactttatggtaagtgaacttccaaagacacaaagaaaatcctccataaatttaaaagcttatctgaaatccttattggcagaagcttaggttggatatatgattaattgcattatcttagggtaggctgaaatatataatactgggttaggagtgtgaagggtt

SEQ ID NO: 443305 - DNA, 455 bp, Homo Sapiens
  misc_feature (33)..(33): n is a, c, g, or t
  misc_feature (54)..(54): n is a, c, g, or t
  misc_feature (61)..(61): n is a, c, g, or t
  misc_feature (94)..(94): n is a, c, g, or t
  misc_feature (100)..(100): n is a, c, g, or t
  misc_feature (137)..(137): n is a, c, g, or t
tttaagcttattgtgtttaagaaagtagctatntgttaaacagaggtggatggnagccctnccctagcacactggtggaagagaccccttaagnacctgnccccagtgaatgaagctgatgcacagggagcaccaanaggacctccgttaagtgataattgtcctggcctctcagccatgaccgttatgaggaaatatcccccattcgaacttaacagatgcctcctctccaaagagaattaaaatcgtagcttgtacagatcaagagaatatactgggcagaatgaagtatgtttgtttatttttctttaaaaataaaggattttggaactctggagagtaagaatatagtatagagtttgcctcaacacatgtgagggccaaataacctgctagctaggcagtaataaactctgttacagaagagaaaaagggccgggcacagtggcttattc

SEQ ID NO: 443306 - DNA, 1438 bp, Homo Sapiens
gtttataaattatgcttcaataaacctgcctttaaaaaattttttatcagtaattacaattttcaaaagtggagatacttggtaggcccctgctttcttggcccctaaggtccctctctctgttaaactgtagagctccttagaaccaaaaccaaaccacctttcattttaatgaaaatgaaatgcaaaaactggggctccaagcaaggaagaaacgtctacctgcagttcatctgggggttggtgggagaggtggtggagagagtaaggctaagcgcccccagcaggcccaagttctctgtaccacacttggaggcaggtatatgggactgaaagtggatgttctcagccacaagcttgggcctggataggaaacaaaggataagactggaaggatgtcaggtagggtagacccagagcaccagctgggctcacttttcacgccctccatccattcgtcatgagtatccggatacagcaccacacggttcaactcctgagcacagcagtaacctttacacagacagcctgatttcccagaatgaattctcgtgtttacttccagatttaatgactttgactttagtagtcatctgaactatttattttactttgccagtaatatttagaccttatatatctttcattatgccatcttatcttctaatgtcaagtgaacagttgctaaactgtcttctgcatttatcacattaaaaatgtctttcttggaaaatcttcttgatatgaataaagtatcttttagagccatcatttaaagcaggtttctctccaacacgagtctgctgaggtggtgtgagctgtgaactctggctgaaggctttcccatacacactgcaatgacatggtttctgaccagtgtgagttacctgatgttgaataagggttgactttccactgaaggcgtttccacattcttgacatttatagggcttttccccagcatgcattatctgatcttcattgggtcgtgaggtgggactgaaagcttttccatattcattacatccaaaggatttctcaccagtgtgaactgtccagcgcagaatgagatttgcaccatggttaaaggctctgccgtgcttctctccagtgggaatctgtccatctgctgtgaggctggagccatgaacaaaggctggaccatgttttctgcacttacgagtctctccgctgtgaactttctgatgctgaatgagggttgacctccggctgaaggccttcccacagtcaccacagtcatagggcttctctccagtgtgaactcgctgatgtagggtgagctgggagctctggctgaaagctttcccacattcaacgcactggtagggcttctccccagtgtgaactcttcgatgctgaacaagagtggaactccgacgaaaggctttgccgcactcattacaaacatagggttttt

SEQ ID NO: 443307 - DNA, 432 bp, Homo Sapiens
ctgtactcatcagaatgggatactccacaactgtctcaccaactcagtgccagtacacatgctctagaggacttctggactcgcagctacaactgtacaagtgcacacaagtgaatctaccctgttatcctccacccactgattgaggatcgaattgcacatttctcttaaccatgacaggagaaagcaaacagtgaaacagaatcatgggtgatctttctcactttccctcttgttttcattggtttgtccataccattctaattatcatgaaagggctctgcatatagagagattgtctcactgacttcctggatcaccgaaaaccatcagggttgaaatttcatctgagtctttcctgacgcccagcaaatattccccctcggattattttacaccttgagggcattttggtcttcagttcaacactct

SEQ ID NO: 443308 - DNA, 750 bp, Homo Sapiens
  misc_feature (246)..(268): n is a, c, g, or t
  misc_feature (530)..(530): n is a, c, g, or t
  misc_feature (553)..(553): n is a, c, g, or t
  misc_feature (669)..(669): n is a, c, g, or t
  misc_feature (685)..(685): n is a, c, g, or t
  misc_feature (715)..(715): n is a, c, g, or t
aaatacatttattaaccaatgttaacacattaaatgaatctatatattgctagtcagagcagcttacaaaatgccagaatgcatcatagaactggacagccacaatgaataattacaatgtgcatagtggctaagctcaacacctcgatatagctttatgatttgcagaaaatttttaataatgattcctaaaacaatcaattgtaattttacctaaaacttttacaaaaccaggccacaatctcnnnnnnnnnnnnnnnnnnnnnnnaaacacacagttttcacgctgtagtaactttggaatgtgcaaccgtgtcaacagagacagaaaagccaaagtaacacgaatctcactttcatgcagctatcagttaaatattacatactctggaatgattttacaccaaaaatatttccacaattacttgctctcataggggtgggatcgaagtcttaaaacttggaaaaacaatcaaagaaggttaagtgttctcggttctgacatctccatcaggcgccacacactgtgncaacactggactaattacacagncaacagggggggaacggtggatggccaggtttactggcataatttagggggacattgtatggaatggggggctactgggggtactttttttacaaattttgtggcacctttgggcnggtagttttgttccanttaacttgtgttcaccaccctttggcaacnggcttcaggttagggtgggggtggtttttttcacg

SEQ ID NO: 443309 - DNA, 938 bp, Homo Sapiens
  misc_feature (249)..(271): n is a, c, g, or t
  misc_feature (801)..(801): n is a, c, g, or t
tttaaatacatttattaaccaatgttaacacattaaatgaatctatatattgctagtcagagcagcttacaaaatgccagaatgcatcatagaactggacagccacaatgaataattacaatgtgcatagtggctaagctcaacacctcgatatagctttatgatttgcagaaaatttttaataatgattcctaaaacaatcaattgtaattttacctaaaacttttacaaaaccaggccacaatctcnnnnnnnnnnnnnnnnnnnnnnnaaacacacagttttcacgctgtagtaacttggaaatgtgcaaccgtgtcaacagagacagaaaagccaaagtaacacgaatctcactttcatgcagctatcagttaaatattacatactctggaatgattttacaccaaaaatatttccacaattacttgctctcataggggtggatcgaagtcttaaaacttgaaaaacaatcaaagaaggttaagtgttctcggttctgacatctccatcagcgccacacactgtggcaacactgactaattacacagcaacaaggagggaacgatgatgccaagttactgcataatttaggtacattgtatgaaatggggctactgggtactttttacaaaatattgtgcaccatttggcagtagtttgtcaattaacttgtgtcaccaccatctgcaacagcatcaagattagatggatgatatttcacagaagacttagttacatttttatctttagagtgaccctgacaaacctggagaatactttttaaaaggcttttctccngtgattctttcacttccattgtgagtaattgctttaataaatatcaaaggtctaaataaatatgtacaaattattctctaacctcaaaaaataactaaatgataaatgggaatttgacttggtctaagatcagtctt

SEQ ID NO: 443310 - DNA, 461 bp, Homo Sapiens
tttcagaattaaatcattttatttttgccacaagaagctctaagaactaatatcaggccatggttaatgaaaagtagaacttaaagtcatgacagggaagattgtacaagtgtgaacattacagtactcggaggaatgaacaaggtttcatatagttgaccagccagaaagccagtgctgttaagttagcatttaattctttagaatatgcatgccttgacaatacaaaataccttgatcagtgtttaccatttttttatctttttggtacaatgggggaaaaatgcggcattatttcttcatagtggttgtgtgtgggggatcgttaccaccaaaatcataataatcatttaaagtatatttttttgttagtcttgcaagattgttatggcatttttaaatttctgtagtttaagcattttcattttgtcatatcttttaacaaattactatttcaagta

SEQ ID NO: 443311 - DNA, 535 bp, Homo Sapiens
aagaaaaagctaatctttattgagcacttactatgtgccagacccgttaaaaaattaccttaaatatatgcactcattttatccccatgatagccctattaagtagattcctacaacagaaaaaaaagctgagacacagaaaagtaacttgccacatttacacaactattaagcaacaaaactgatagcaacctagtcagtctggtgccaggctaagtaaattaaaaaattcagatactggtaagtattgagtggaaaataagacaaacaagtaatgtgatagtgaagaggaggcatttgaactgagatctaaatgacaagaagaagccagtctgcaaaaatctggggaagagcattccaggctgagaaaatagaaagtgcaaaggccctaaggtggaagcaaacttagtgcaacaaaccagctttggggagaagcaaagagggcttttaggcctcttttgctggaagagaaatgggatctcaggaaagtaaagacctttgccctctagtaaggggtggggttgggaatatagtc

SEQ ID NO: 443312 - DNA, 272 bp, Homo Sapiens
  misc_feature (93)..(93): n is a, c, g, or t
  misc_feature (164)..(164): n is a, c, g, or t
  misc_feature (166)..(166): n is a, c, g, or t
  misc_feature (184)..(184): n is a, c, g, or t
  misc_feature (192)..(192): n is a, c, g, or t
  misc_feature (196)..(196): n is a, c, g, or t
  misc_feature (213)..(213): n is a, c, g, or t
  misc_feature (215)..(215): n is a, c, g, or t
  misc_feature (238)..(239): n is a, c, g, or t
  misc_feature (248)..(248): n is a, c, g, or t
  misc_feature (261)..(261): n is a, c, g, or t
  misc_feature (264)..(265): n is a, c, g, or t
cggagcggagttttttattaggaattgtccattgaatgttagctaaaacagtcaataaaatgcattaagtgccagctgcatgcaagcccctangttagatacaatcagccctcttcatcagcaggtccacatcttcagattcaactagatgcggctgaatattngncggaaggaaaaataaaantacaaatnggangtacagtataacaaccncnggcattatacaatatctatacannccggtaggnggtggcttcaagnacnnggggcca

SEQ ID NO: 443313 - DNA, 378 bp, Homo Sapiens
  misc_feature (201)..(201): n is a, c, g, or t
  misc_feature (229)..(229): n is a, c, g, or t
  misc_feature (243)..(243): n is a, c, g, or t
  misc_feature (251)..(251): n is a, c, g, or t
  misc_feature (256)..(256): n is a, c, g, or t
  misc_feature (268)..(268): n is a, c, g, or t
  misc_feature (271)..(271): n is a, c, g, or t
  misc_feature (273)..(273): n is a, c, g, or t
  misc_feature (288)..(288): n is a, c, g, or t
  misc_feature (293)..(293): n is a, c, g, or t
  misc_feature (314)..(314): n is a, c, g, or t
  misc_feature (333)..(333): n is a, c, g, or t
  misc_feature (338)..(339): n is a, c, g, or t
  misc_feature (348)..(348): n is a, c, g, or t
  misc_feature (351)..(351): n is a, c, g, or t
  misc_feature (359)..(359): n is a, c, g, or t
acaaaaacaaaagcgaaacctttattcttttggcttgattgtaatgtggtttaccgttctttatggtaacagcattttcctgcatgcatttcaccaacacactacaagtcaatagcttcagtataaagaatctacatttattgttgcttgtgaaacacaaagtcttttgctgtaactggtaatataacttcactacctggnttttgtgggagaggaaaaaaagctgggnctcccactacttantatgctgnctatnagctctgctagntgncncactatgggctcaantaagnctctactgctgctgctaaaanaaaacacttgtgaaaaganctgtnntgtacttanctnaactaaanaagagctagggctggaaaa

SEQ ID NO: 443314 - DNA, 467 bp, Homo Sapiens
tgtaagaacattatttttgtttcactacagagaggctctaacactgctgtgtaaacattaccaacaataattatttattttctattatgtacctgttcatttctaagagtaatggacaaaagaaaaggctctcctttgtcctccctctcttcctaattaaaagagccttctgccccatggaaggctgggagctaggaaaagcagcattctcacaatagactgcaatcagaagatagattttatgtcaggtcatctagttacatagatatttccctgttgttattcctgagtccttagtaaaaaccttaattaaatgttccagccttgtctcggctgtgctataggaggtaaagcacaagtttatgtcatgattggttcagtgacaaaagggaacagactctttccaagagcaaactgggtgacaaggataaacttagtggtctagcagatgtgtttcagtggagtct

SEQ ID NO: 443315 - DNA, 387 bp, Homo Sapiens
  misc_feature (64)..(64): n is a, c, g, or t
  misc_feature (229)..(229): n is a, c, g, or t
  misc_feature (254)..(254): n is a, c, g, or t
aatattattttatcagaaaagttaaagccttcagtgggaaaaccatggtaaatgacatattgantcaatctctaaagccctggcaaattatagattttgtgcaattagtgaccaacatatacatttaagagataatactgactgttgaccagaaccttctgatggttctgaagcatctgctctttagagttacttcagctttacatgtctatgaaatttaagattcctncaatgggatgttatagcttattctncactagatacaagtaatatgtatagatttagaacaaatgactactttcaccttccaggagcctgtttttatttatacaaaagtagagtggtttttcacccacatgtatgcataagtgccttctcaaaggttgg

SEQ ID NO: 443316 - DNA, 679 bp, Homo Sapiens
  misc_feature (302)..(317): n is a, c, g, or t
  misc_feature (401)..(402): n is a, c, g, or t
  misc_feature (404)..(436): n is a, c, g, or t
  misc_feature (448)..(448): n is a, c, g, or t
  misc_feature (454)..(454): n is a, c, g, or t
  misc_feature (465)..(465): n is a, c, g, or t
  misc_feature (487)..(491): n is a, c, g, or t
  misc_feature (493)..(495): n is a, c, g, or t
  misc_feature (622)..(622): n is a, c, g, or t
  misc_feature (625)..(625): n is a, c, g, or t
  misc_feature (635)..(635): n is a, c, g, or t
gtcttatactaaaataagaaatcagccccatcttggcacagttctcatgcagaatattgcacccagtgtgaactaacgctagaagcttcaaactgtataaatttaaatgtatttgcatattataaaaataaagataaacatatacatattttacactagttatggaacagcaatgaacgtcagtcgatccctctttcacatttaacagaactgaaatctgagtgctctaaatactgccacctgtactgtaactatggcttatatgtgcacggaaaacaaaatccctgagaagccattcgacnnnnnnnnnnnnnnnncttttcttcaagtagcgcgctccttggaggatcacagttctgaggttcaggttgtaaaacatttgctccatgttctcgtccatnntnnnnnnnnnnnnnnnnnnnnnnnnnnnnnnnnngtcatccaaaangcaccntgcaagcacgngttgtcactcaagttcacagannnnngnnnggggtgagtgcagagggtctgccaggtgcaaaagatggtccaggtgttcagatgctctcttttctccatggaaattccacacccacaaacgtcactggtttctgtgcttttcaccaacattcttctnggnacaggggctnatcacagtcggggtgggtgggtaaaccaaggcaacatttactcg

SEQ ID NO: 443317 - DNA, 751 bp, Homo Sapiens
  misc_feature (36)..(36): n is a, c, g, or t
  misc_feature (74)..(74): n is a, c, g, or t
gaaacggagtaaattccaccatgtccaccttggaanggcttttcccaactctggaacaatttgaaatcccaaanggaaaattcgggtcccttggggtcaaatttaatccccattacccaaagaacagccataagtaggatagcccattcccaacagggtgaggaccagccacctacttactttcccagtccaattttattatccattcagcttttaggaattgcccctggaggccatagtcggaattttgctaaattttcaggcatgaagatgattctccttaattcaatgtctcatgaatcttagtcaagatcccttcccttcctgtgccttgttaagctatgatccaaaaggaaaaggagtattccttttattaacaacaacaaaactcttaaatcctttggctttcaaacactgcagctataacatatccttggatatatgtattaatttaaaagccaatgccttaagagtcagcttctattgtatcaagttttctccaaattatgaggggcttcctccacacgttgccccacttgccagcctcaggaatctttcttggtcagtctggccttgactttgtgcctcagaagggctgcggtggcagcactgcaggcagccaggaagaagaaggagaggcaggccatgtggacagataggggtccatggcgctgcaggaagatctcctgccgcccctggtagtccaggaggatggcctccagctgggagagcgtacagatggacagaaatg

SEQ ID NO: 443318 - DNA, 1047 bp, Homo Sapiens
atagttgacgccccaacacattaacaagtatatctaccgtaggaacggaccggatgtccaggatgctggatattctacatctatgcgcacgtctaggatacccgcaatgttcgacacccaaaggatttaagagttttgttgttgttaataaaaggaatactccttttccttttggatcatagcttaacaaggcacaggaagggaagggatcttgactaagattcatgagacattgaattaaggagaatcatcttcatgcctgaaaatttagcaaaattccgactatggcctccaggggcaattcctaaaagctgaatggataataaaattggactggaaagtaagtaggtggctggtcctcaccctgttggaatggctatcctactatgctgttctttggtaatggaataaattgacccaaggaccgaatttcatttgggatttcaaattgtccagagtgggaaaagccttccaaggtgacatggatgaattacttcagttccatctgatttctgggtccctcctttctcgacaactataatactaaccccttttctccagataactgtctacacctggcaagttatctagagacgggctggattctacaaatttcccaaccagggcatggttaagaacatgggacctaggatgaccaaaagaaaacgccgatcaaacaaacgctagatctccggttaaacaacaattacaaagtttaaaaacgcaaaaatcacaccactagcacaaattcccccaatattatgataaaagtcgcacaacttaggcgtgttagaaaacgttcgctactcaagcgcgaccgcaattgttgaattgcagataaaacaccacgcaagtaacaatacgatgatacaacgaaatatgcgcttattataggttcgcggatatctattaggtccggaaaattcgtgacctgaatactaacgtataacaagcacaaataatcggccataaactgccaaacttgcgcagctctaccatgttagggtcgctatgaaaaacgaatgatttgacgtaaagtatattttt

SEQ ID NO: 443319 - DNA, 406 bp, Homo Sapiens
  misc_feature (19)..(19): n is a, c, g, or t
cccggggaaaggaaaaggngttagttaacaataaaaatcaacagacacgtttaaactaaaatccccaaacagccaacccctagtgaaacacagagcatgcatgctgcaagtctagtctgggcctacaacccagaaagctctttttgtgagccaagcttgtggttccaaagtgcctcgtctatatggtctgattatgtgagtaccagattaaaaatgcgttctgttgacataacattggtcctcctgagttttgttaagactttgtccgtggtcactcagacagctatccaaagacacttcaatagccacttctcttgcgtctcttctactgaggccatcacttccgtatgtgtctagagagggcccaccaatttgctcagcacagccattgacgtgagccagaggc

SEQ ID NO: 443320 - DNA, 1369 bp, Homo Sapiens
attttaacttgtaaattttgagggcagttaaccaaacctgtgactaatcatatctcctcctaccccccatttccaaggacatttgttactcagatacttgttatactaatacttgaacttgtcccttatggtatttgctatcttttaactagtcatgatattcttatactttagttacacttttggaatttgatacaaggttgagtggggtgtgtgggtgtatgtatgagtgaaccagttctcaaaagaatgtaagaaaacccctttttataaaattgtgactttttaaaaacatagtctttgtcatttatagaattaacaagctgctcagggtatattttatagctgtagccctgatatctgcattaataaatcctgtcgaaacacaatggacctaagtataaaacttccctggaaaatcatctaatacttttattattaatatcagtggcaaaggtttaagcctgaggaaaaaagcgtacctctacgtattgacaactttgagttctgtagataacaagcagatttgggtctcctgtgattggctaatggtctccatctcccagcagacttaattcaggttttgcttctgctacatcccgccagtaaggaagcagcaaaggtagagaagagacctttttctctatcaaaggccagagatgcgagaacaaaaattcattcccctttggagacaaatgtagtccatctgataaataagatgagaagtcctggctgtcctgcatcagggtccacaggtcaagtacgtcagtcccacagtcttgggccacttgtaaacacgcattggcatattcaccaacaacagagttcaggcgatttagtttgcaaccttgtatgatgcactgttcttcccaggctgtttcacaaagtggggtcggcgtgatgagaatgactcgattctcagggatgtccacggacttcaggtactgcaccatgctctttaggttcgcagcgtactcctccaggggaatgtgctgcttgggattctcatcttttagtgcactgtcattggccccaaagaaaattgtaactgctactgggatgtccaaactgtttcctttcctgattaatcttggaaggataattttggcccacctggtattgtaacctgaaaatccacgattcagaacatcacattttctgaccagcctgtcagccagcgatgctccccatccaccctgctggaaggaaaactgggtgatggagtccccgaagagcaacaagcgaggccagagcagggcactcccgcagcccgcggcctcgcacagcgccatggagcagccgggcggggcggggcgggcctcggccagattaacacccaggcctcgtacctagccgtacgctttgcccc

SEQ ID NO: 443321 - DNA, 818 bp, Homo Sapiens
taaaccagtggcaagggtttaacctgaagaaaaagcggtaccttaacgtattgacaactttgagttctgtagataacaagcagatgtggttctcctgtgattggctaatggtcgtccatctcccagcaggacttaattcaggttttgcttctgctacatcccgccagtaaggaagcagcaaaggtagagaagagacctttttctctatcaaaggccagagatgcgagaacaaaaattcattcccctttggagacaaatgtagtccatctgataaataagatgagaagtcctggctgtcctgcatcagggtccacaggtcaagtacgtcagtcccacagtcttgggccacttgtaaacacgcattggcatattcaccaacaacagagttcaggcgatttagtttgcaaccttgtatgatgcactgttcttcccaggctgtttcacaaagtggggtcggcgtgatgagaatgactcgattctcagggatgtccacggacttcaggtactgcaccatgctctttaggttcgcagcgtactcctccaggggaatgtgctgcttgggattctcatcttttagtgcactgtcattggccccaaagaaaattgtaactgctactgggatgtccaaactgtttcctttcctgattaatcttggaaggataattttggcccacctggtattgtaacctgaaaatccacgattcagaacatcacattttctgggtgatggagtccccgaagagcaacaagcgaggccagagcagggcactcccgcagcccgcggcctcgcacagcgccatggagcagccgggcccgct

SEQ ID NO: 443322 - DNA, 688 bp, Homo Sapiens
ggtctcctgtgattggctaatggtctccatctcccagcagacttaattcaggttttgcttctgctacatcccgccagtaaggaagcagcaaaggttagagaagagacctttttctctatcaaaggccagagatgcgagaacaaaattcattcccctttggagacaaaggtagtccatctgataaataagatgagaagtcctggctgtcctgcatcagggtccacaggtcaagtacgtcagtcccacagtcttgggccacttgtaaacacgcattggcatattcaccaacaacagagttcaggcgatttagtttgcaaccttgtatgatgcactgttcttcccaggctgtttcacaaagtggggtcggcgtgatgagaatgactcgattctcagggatgtccacggacttcaggtactgcaccatgctctttaggttcgcagcgtactcctccacggggaatgtgctgcttgggattctcatcttttagtgcactgtcattggccccaaagaaaattgtaactgctactgggatgtccaaactgtttcctttcctgattaatcttggaaggataattttggcccacctggtattgtaacctgggtgatggagtccccgaagagcaacaagcgaggccagagcagggcactcccgcagcccgcggcctcgcacagcgccatggagcagcc

SEQ ID NO: 443323 - DNA, 271 bp, Homo Sapiens
  misc_feature (5)..(6): n is a, c, g, or t
  misc_feature (15)..(16): n is a, c, g, or t
  misc_feature (53)..(54): n is a, c, g, or t
  misc_feature (56)..(56): n is a, c, g, or t
  misc_feature (229)..(229): n is a, c, g, or t
  misc_feature (265)..(265): n is a, c, g, or t
  misc_feature (267)..(267): n is a, c, g, or t
ttttnnagacgaaannctgaggcttagaatagtggagcaactcctgcagtgcnncncagctatgaaatatcaggtcagaacccggggatactggatcggaaaacgggagaggaagctatatatcctttaacttcttcaccggaagctgaaatctgcttcctagttctatcctccaatgaccgggggaaaagaatctcttccgctacttgctcgtcagatatttaacacnggctttcaggccgtcttttgcattcttttcaggccncnggac

SEQ ID NO: 443324 - DNA, 511 bp, Homo Sapiens
  misc_feature (44)..(119): n is a, c, g, or t
  misc_feature (209)..(256): n is a, c, g, or t
  misc_feature (477)..(477): n is a, c, g, or t
atataagtgtaaagtggggattcattgttttgacgtggaaatcnnnnnnnnnnnnnnnnnnnnnnnnnnnnnnnnnnnnnnnnnnnnnnnnnnnnnnnnnnnnnnnnnnnnnnnnnnnnaattaaccatcgtgtgaaggatttttccctggactctcaatttttgcatatgtactcataagaggttggtctgtagtttccttaggttgnnnnnnnnnnnnnnnnnnnnnnnnnnnnnnnnnnnnnnnnnnnnnnnngttaccttttacttcaacctacttgtatcctgttatatttaatgtgagttacttaaagacagcatataattaggtttttataatccaaactgataatatgtcgaattggcgtgatgaggccatttatgtttaatgcaactattgaaatgtttggctttagatctaccattatgttgttttctgtttgttcccctgttttccattgctgtttcttctttccnttttgtcctttctcctatctctccttctccctat

SEQ ID NO: 443325 - DNA, 731 bp, Homo Sapiens
  misc_feature (502)..(502): n is a, c, g, or t
gatctctgtgacactgttgaaccttgcatttcagtatgttctacagcttcggtatcatcacctgaaatttgcaaagcaggcattgaagacacttcagctgttacaagacttgtgtgattcccaagtttgataagccacctctgattaagccacacgtaaatgctaaatactgatgatttgtccttagattgtcgatttgtttcttgaataccgtagtccaaaatctttacaaatgaacttcatgatatctaactcatccttgaaccttgcagtatcttttgtaaacctttctatcaatccttgtcccactcgaaaccccatgttttccagcttagtaatacatcgtccgttttccacctcccctgctccgcggacttgtacactccagacaccatctcgttatggagaagcaaaaacaacgcctcatccgccatttcctgctaattcttccaagcttcgagttttggctcccgtttgagctggtctgggggttccaggtcgncgcctcagcgacttcgccggcgccgcggctccgtcaggccgccattctatccctgtggctaagagaccgaggtattcacacgacttcccaaaggctggtactgaaatgagtctggtactggagagagcccacacttcggggctaccaaatcctagggccgaacgaaagtctgacgggagctctaaccaaagccaaccagctgagatgcgatccggccgccaggcccgct

SEQ ID NO: 443326 - DNA, 437 bp, Homo Sapiens
  misc_feature (54)..(57): n is a, c, g, or t
  misc_feature (59)..(59): n is a, c, g, or t
  misc_feature (88)..(88): n is a, c, g, or t
  misc_feature (119)..(119): n is a, c, g, or t
  misc_feature (383)..(383): n is a, c, g, or t
  misc_feature (408)..(408): n is a, c, g, or t
acattcaccgaaaatactttaatgcagaaacaatgtgtgatgagtattgttatnnnncntgttcctacagaattgatttcaacaaatnttcttaggtgaaaccttccaagttacatgtntcagctgtttgaaacaagaactaaggaggcaaatatagtatttcaaacctcatcacaatttattaatgctacagagaggaatactgtgtttaatgtcccaggatctctatgccatttgatgcttcaaatcttttatcttcattatcaccatcgtctaatgaaacaaaaggtatgtggagtggccccttctgttatttgagacagtagtagatcctaaagatgccatacttcggcttctctcaaggaattttcagctggtaaganttaccttgatgttcctatttatttnccatttctgatctactactatgcaaaact

SEQ ID NO: 443327 - DNA, 596 bp, Homo Sapiens
  misc_feature (268)..(268): n is a, c, g, or t
  misc_feature (377)..(428): n is a, c, g, or t
tgtggacaactgttactgttcttccgtggccaaccatggcggccaccagccctacccccgctccggccactttccctggacagtgccctcgcaggagtactcacacccgctcccgcccacaccctccgtcccccagtcccttcccagcctggcggtcagagactggcttgacgcctcccagcagcccggccaccaggatttctacagggtgtatgggcagccgtccaccaaacactacgtgacgagctaacgccacgcaggcggcggngcgctggggaatcttcctccccagcccccgggctcgggagttatgcatccagagacctgcccttctaccttcctcgcctcccctcttcctcattccattgccccaggtnnnnnnnnnnnnnnnnnnnnnnnnnnnnnnnnnnnnnnnnnnnnnnnnnnnnattatgaatctcctggacgcagaggtgacagtgggagctggcctgggccaggacggcaggtggccctggagatgggaaagtgtctgtgtcgaggcgctgagctctctctctgtttctccttttttcctctactcctacctatctccccttttatactaataatcttat

SEQ ID NO: 443328 - DNA, 673 bp, Homo Sapiens
  misc_feature (401)..(445): n is a, c, g, or t
aagattctcgtctgttctgtggacaactgttactgttcttccgtggccaaccatggcggccaccagccctacccccgctccggccactttccctggacagtgccctcgcaggagtactcacacccgctcccgcccacaccctccgtcccccagtcccttcccagcctggcggtcagagactggcttgacgcctcccagcagcccggccaccaggatttctacagggtgtatgggcagccgtccaccaaacactacgtgacgagctaacgccacgcaggcggcggggcgctggggaatcttcctccccagcccccgggctcgggagttatgcatccagagacctgcccttctaccttcctcgcctcccctcttcctcattccattgccccaggtcttttccnnnnnnnnnnnnnnnnnnnnnnnnnnnnnnnnnnnnnnnnnnnnnattatgaatctcctggacgcagaggtgacagtgggagctggcctgggccaggacggcaggtggccctggagatgggaaagtgtctgtgtcgaggcgctgagctctctctctgtttctccttttttcctctactccttccccttcacacccccgtggctggaaggaacctcggcttccctgaaagcttgggggtcccacccttcttaccccacccggcaggaacgccca

SEQ ID NO: 443329 - DNA, 779 bp, Homo Sapiens
  misc_feature (35)..(35): n is a, c, g, or t
  misc_feature (72)..(72): n is a, c, g, or t
  misc_feature (139)..(139): n is a, c, g, or t
  misc_feature (146)..(146): n is a, c, g, or t
  misc_feature (214)..(247): n is a, c, g, or t
  misc_feature (280)..(280): n is a, c, g, or t
  misc_feature (365)..(365): n is a, c, g, or t
  misc_feature (486)..(486): n is a, c, g, or t
  misc_feature (726)..(726): n is a, c, g, or t
  misc_feature (778)..(778): n is a, c, g, or t
caaaggactccttagtgagagaacacaccttatcnttttaataaaaacacacgatatgcctcactgttgtcnacactgattgttaatgttcccaattactattattagcattctaataattctcagggcagtttcctcnagtttcnaagagtaggctgcctaaaagctagaaggagacagaatagataagtgtgtatcttagtccttaataaannnnnnnnnnnnnnnnnnnnnnnnnnnnnnnnnnaagttgtctcatcctaatctccaatctgggtanctggagccttccattgcccaagagaagggaaagaactgtaggagtcaatagggtcatagaacccctggggattgtttttttcttntttgtcttttcttgggcttttgacactgatatatctggagttgatttggtttgggatttaatgctcctgacttccatggatccttaggcccagacgccttctgcgggcatcacttccctgnagcatcactcagcatggaagtgggcagtccatttttggagaataaactgtatccctacctctccatttctatcaacatagggaccccatgggtatgacaagcttgctgctttaggaatgaaatgatatgaggggagggaagcccatgtcgggtcttttttaatttgcttagtactgcctggggccaacataaagagctggctccctctgaacatcctgatacctggtctcaagtggagcngcatacatcatgccttcagcagaaggcagtggaagcctttgataccaatccng

SEQ ID NO: 443330 - DNA, 332 bp, Homo Sapiens
  misc_feature (50)..(50): n is a, c, g, or t
  misc_feature (127)..(127): n is a, c, g, or t
  misc_feature (198)..(198): n is a, c, g, or t
  misc_feature (204)..(243): n is a, c, g, or t
  misc_feature (296)..(296): n is a, c, g, or t
  misc_feature (316)..(316): n is a, c, g, or t
aaaaactactgtatgtaacggaattgcagaatatgctgcacatgtatttnatttagttatccttgctttaagaatattggatgacatttcctgacatgtgggagggagaaactccctaacttttttnttctgcttttaaactgtaacatagttgaagatttcttttttctgttctcattgattggggcattttgtacnggtttnnnnnnnnnnnnnnnnnnnnnnnnnnnnnnnnnnnnnnnntaatctgttttttgatacattcctatcccttgtgtttatcctaccactgcctncctggctatcttaaacaagntcatacatttgaaaag

SEQ ID NO: 443331 - DNA, 447 bp, Homo Sapiens
aacataaagaacacctcgcacgggtgacgtgaaataccacatgggcttctcgtctgactccaagaccgatggcggcctggtgcacctggcgctggcgtttaacccgtctcaccttgagattgtaagcccggtagttatcggttctgttcgtgcccgtctggacagacttgatgaacgggtcgtctgcacgaatttgtgccgccatccccttgagtaccgagttcaggtttacatcttcgatatccaccaccacgcgttcagggttactcaacgcgaactgcttatatttcagctgacgatttgattccaccgtcacgcgggtgtagctggacgcaggccagacgcgcaccgccacgacctggctgaccgcagccagactgacctgacttacgctcaatagccacatggcacccgcgccttgcagtaaacgacgacggctgattgcag

SEQ ID NO: 443332 - DNA, 335 bp, Homo Sapiens
agctgatcagctgtcgttactgtgttttatgtgtggcccagggaagccaaaagatcagacaccctgtcctagacagattcaatgcacacaacaacaggaggtgggggtcacacgggcggagagccaaagactagggctcccccaagcaggcagggaacagagagtgggtgagaccctttccttgggggtcagggtagagccataagaaaaggcaggaggggattccgttggtgcatttgaatgtcactaggtcacagtcaggggagggtagcaaggggaacttgtagcagagccagccctatcacactggtgcacctggtcaccccagctcgtgc

SEQ ID NO: 443333 - DNA, 469 bp, Homo Sapiens
  misc_feature (1)..(1): n is a, c, g, or t
ntcttacagtaccatgggaacaacagtgattgacttgcaaagttttctgtctctatggaaaatgcaaaacagtactacagaaatacacaatgcactgtaagcagcggtttgctgtagtggtccaacaggtacaagcaaacattttggctcagctaggcagtaatccacttaaaccacatcccggggctacggccgacccaaccacagctcctgtggggatcaaaaagaatgggtctgtttaaaaataaaaattgttatgttttgtgctgctgtccaaaggactcaaaggacagagtcatgaggcagaagtttcccaaccagatctagaatcactgggaccacttccttcctttcccttctaccaacctagagacttggactatggtttcaaagtgaaattggcatttctaacaatgaatacccacagccctcacttctttaaatatcaacagagaggttccttccacca

SEQ ID NO: 443334 - DNA, 1089 bp, Homo Sapiens
  misc_feature (1021)..(1021): n is a, c, g, or t
  misc_feature (1042)..(1042): n is a, c, g, or t
agcggaggaatggacttttcctgaagctaaatggaacaccacagccagagttttcagtcacatccgtcttggcatgggccatgttcttattatagtccagtgttttatttcttcaatggctaatatctataatgaaaagatactgaaggaagggaaccagctcactgaaagcatcttcatacagaacagcaaactctatttctttggcattctgtttaatgggctgactctgggccttcagaggagtaaccgtgatcagattaagaactgtggatttttttatggccacagtgcattttcagtagcccttatttttgtaactgcattccagggcctttcagtggctttcattctgaagttcctggataacatgttccatgtcttgatggcccaggttaccactgtcattatcacaacagtgtctgtcctggtctttgacttcaggccctccctggaatttttcttggaagccccatcagtccttctctctatatttatttataatgccagcaagcctcaagttccggaatacgcacctaggcaagaaaggatccgagatctaagtggcaatctttgggagcgttccagtggggatggagaagaactagaaagacttaccaaacccaagagtgatgagtcagatgaagatactttctaactggtacccacatagtttgcagctctcttgaaccttattttcacattttcagtgtttgtaatatttatcttttcactttgataaaccagaaatgtttctaaatcctaatattctttgcatatatctagctactccctaaatggttccatccaaggcttagagtacccaaaggctaagaaattctaaagaactgatacaggagtaacaatatgaagaattcattaatatctcagtacttgataaatcagaaagttatatgtgcagattattttccttggccttcaagcttccaaaaaacttgtaataatcatgttagctatagcttgtatatacacatagagatcaatttgccaaatattcacnatcatgtagttctagtttacntgccaaagtcttccctttttaacattataaaagctaggttgtctctt

SEQ ID NO: 443335 - DNA, 317 bp, Homo Sapiens
ttttttttacagtctgtaaaggtgtgactttataaagacatctccagcttcctgtctctgcactctgcgggaagcaatgcgagggcatgtccgcggctcagagaactagagcaagtccctgatgtacaggctgcgccgcacggcgttggagacaccctcgttgaagcggaaccagacctcgctcctgcccaccgctgtgcccatgcgccgctccactgagtcctgctccggggccctgttcccctgcactcgggactgctgtgctcctgacgaccacacgtccaaagaagtccttctcaggctgttcctcccgggcc

SEQ ID NO: 443336 - DNA, 286 bp, Homo Sapiens
  misc_feature (2)..(2): n is a, c, g, or t
  misc_feature (6)..(6): n is a, c, g, or t
  misc_feature (34)..(34): n is a, c, g, or t
  misc_feature (40)..(40): n is a, c, g, or t
gntatntatatattttcaaagtgtaaacgtgttncattgnccaaatttccagagtaataagtaataaaaccacaggtttttcaaaatgttttttaaaaaagctttgtccaatccaccactaacaagaaacttagtggttcttgagggtaacccttcacagaaataggtgaagagtgggcagcagggacagtccctggagcatctgtgatcccaactagggtactacgggacaggagtgcatggtcataagactgtcctgcacatgaaggacctggtgagatgtcca

SEQ ID NO: 443337 - DNA, 792 bp, Homo Sapiens
atgggatttcattatctcagtttactttaatttgcttgtttacacacacgatctgtgtgtacataacagtggcaagagccattctctaaatacaatctggtacccagactatgacagatgcacgtggaaaatgaggcgtcagtgaattaatctcaacatagaaaggcaaaataagcatggcagtattctatgatcacagatgcccccagagcctgggggtaaccgacacttttcaacataatacaggacaattttaacaaaagacccagactccaaatggcacccaaaatatattcgtttctctgccttctctagaggagtcagaaagttctaaaggcttactcaagaaaaaggaggcagggagactatggcctgctaagcacagatgctgagcactttacatgcaccatttctcttcatctccacctgacagacgatgaaaacgaggtttgccatgatcacacagctatcaggagtggtgccaagatatgaacccacatctcatgtttgcttgagcccaaatcctttcacttatgtcaggctgtttcacataggaatagaaagcatgctcccaaggaagaggcaagggggctaagcatggacaagtggcggaagcctcatcgatacagaaggctctgcaattgacactttccacatacagttaatttagtgctgagcccgcatcagacccacgtgggataaatatctggagatttaagtgtcacaaatgaacttctggggtcaccctgtgcctattcccttttggtgctgaacatgacactttggagagcc

SEQ ID NO: 443338 - DNA, 424 bp, Homo Sapiens
  misc_feature (366)..(366): n is a, c, g, or t
  misc_feature (391)..(391): n is a, c, g, or t
  misc_feature (422)..(422): n is a, c, g, or t
acagaatctgaggaaactttattgatctctttatacttccagcattatgagagtaggcaatacaatgttttaacccaaccaagctcaaaggagtaaacctttttcctgaaccataaatgggctggatgtttcctccacattatagtaccatctcctaaatcatcctttattcacctccatgacaataataacccacaactcagtgcaggatggagatgcttttgctgtttctcttcagaggtcctcactggagtgttcttatcttcttgtgggcttctggcatcctatgatatttaacactcagtgcctcccaaatgacaacatggttacataaatccttctttgaaaatacatgaagagaaaaantacatttctagctaatgactaaganggctctaacaagctggaagtcaaaagaatanaa

SEQ ID NO: 443339 - DNA, 749 bp, Homo Sapiens
  misc_feature (301)..(310): n is a, c, g, or t
ttctttttttaaaattttatttaaaaaaccttcggtgcaatattaaaaagcaatacagccagctggagcgacaatcaacagaaagaaaagagggaggagagaaaaggcccgaggaaccccaacccagctagtcccctaggggctggaggccaggggcagactgagaaggggggcatgggtggtaggggagggaggaaagaccacccaccaaaataaacaggcagatccaaacatttatacaggaaacatctggctgaacggaagaggatcttggggagatgagaagccccccacatttcannnnnnnnnncctaaaatgtcctggactgggtggggagggtcagccacctggggtttaaggagcaatcccctccccacaccgacgtgctgaggagcagatgtgtgtgagacagacacaaggggcaaagataaggacaagagggtgccctctccttggaatctgttatgagggctgagggtgtccccgtccagctcctggactctgggggatcttgggtgagatgggggccggaatgggctggggcaggggtgaggctgggcgctcagcctaagaagccatcggggtcatcatcctcaaagtggccttgctgaagcaccttgatgtggtgctcgtagattttcagggctggcccgaggcggatggacaggccggtgagcacatctgtgcgctgcatgagcagcaaagatttgccatcaatttcctgctcttggaaagctgtcgcctgctc

SEQ ID NO: 443340 - DNA, 746 bp, Homo Sapiens
  misc_feature (16)..(16): n is a, c, g, or t
  misc_feature (550)..(550): n is a, c, g, or t
  misc_feature (609)..(609): n is a, c, g, or t
  misc_feature (695)..(695): n is a, c, g, or t
gcggtaatagtaaaanaaaattggcagagaaaataactgtagactaggataaagcatgactcctccatagcattgttgcttgtatgtacatctgtcactccactgaaagggacctagtcactttaaagaggccttttatctcagcacgagatatccaagcgtgaatgctaaggcttgatgtttccattaggatttagcattcgagatttcagattttatttatagtcattgatgtgttttgctgtattataacacatttaaagggaaattttattatggtttttacatgtagtcatttcataaaaatatccagataggtaaatggaagaaaatagtagattttagtcatggtaccaaatgcaagaggctgttgaacagttgcttgtttgtttacagtaagttccttgagattttcagtactgtagttgccctggacattgagtacagttcagccttactctgtttttaagtagttgtgttgtcaatttcatgcttttaagtcctgatgatccttggagatgggagaaaaagataccagggataattaaantccacagccagtttcatcagtttcctcatccatcctgcaaataaaaatgttaacaaggngccaaacttattcgttctggttttacaatttattttgaccgttttttgggtgaaaattgcaaacagccaagcaagtggctggaatncccagtctaagaaattcaaaacaatcactgagtagccctaattacattaat

SEQ ID NO: 443341 - DNA, 706 bp, Homo Sapiens
caagtttataaaggcatttagtttatttttcaaaaaaatactttgctagaagggttgagtactgtaattttacatgatcataatctctaaataaattctttttctgaccaacaggtaccagttaagtgaacagctcgtctaggtctgcttttgtaacacccaaatacaattagcacttctctgctggtattccctgggccgtcttaattatctagaggccaggaggcaaagcctagcacgtaacaaagtatgtgctttgtaactgctgattaattcagtttcttaactaggcagagcaggtcatcagtgtatctaattcacactatttaatacactgtcttgctgaagagtctgacctgcccagaaccccgttatggctagcccagggaagcagtaaacggcaaagcagagaaaaggggcagctaagatgaggctagtgctggctgagtcccagttaggtctgttactgttctgttccaactataaatccaggatgactgttactcagattcagtgctatgtagaaaatagaatgcacagccaaaaacataatttggggatgactggcagcacctttttttccctttcttaaagaggctaactgaaagttgattaggattcttgagagaacgtaactaaaagttgaatcaaatctatattcactgctatagatttaataaaaggaaagaccactgtaaagatgcat

SEQ ID NO: 443342 - DNA, 364 bp, Homo Sapiens
  misc_feature (332)..(332): n is a, c, g, or t
  misc_feature (342)..(342): n is a, c, g, or t
gccaggcagtggaggaaggtgcttgcgggagctgcgaacacacaacagtgtgtcggcatacttatagacaattactgaacaaattatatgctcagctagtatgcttcaatccaacattaggaaatcgtttcaagaaactgttttaaacatttttatagcaatgtatctttaatacttttctcagcatggggcagaagagaactttacatatttacttgcatgtactttacatctttttgtctgctgtacagatctgtaggcctattgtttttccttccactaattttgaagtgtctcagtttaaagcatatttgttggaattatattatgtntccatggttntcctggatacctttctttgccc

SEQ ID NO: 443343 - DNA, 1040 bp, Homo Sapiens
  misc_feature (951)..(964): n is a, c, g, or t
aaccagaggtggaatctttatttcacaagtttcaagatacagtacaaaacgattctgtacatctctctattaacaggatttgtttacacaattatattacacttcaccaacctttatactgcatttcattaaatacaaaatacatttacaaaaagagtctaccatggtgttccttcacaatgccagcttaaggtcttttaaaacttcctcttctacatatttatagtggttacatcttgattatatcaacattatgagttttatgagtttattttctaatcaaagagaatagtgtcagcctgtttctcaaaccaaataggaaaaacagcatgtgagatgattccctgcacataaccaaggaatccttttcatgcacacaacattggacttttacttgtgcagtcactttaacatacaaatcatctttccttgggatcgttttaaattttcttgaaataccaagtgggtggagagcttcttttcaatgaataccacacatttaaaatccggatcgtgcctcaggcattcaggagtgttatattttaatttatatttgagagtgatgactgatgaaaaatatttgcatgaaaatagaaattttcttttgttctgatcatttcttacatacttctagtcataataatgtgtaatacatatatatattatgagattcactttcaaaacaaatatcagctgtcactgaaatatagccctgcttgtcttggcaggtaaaggggctgttttcatgacacatcttgttttgaaatgtgcatgtgaaatgttagtccgaacctctgtaaaggaagtttttgcgtatgtagttagacattaatacacatgctatacacataaagaattgtgtttttcatttataggcctgcatgcatacttccaaaacactggtttgaagaatgaacatgaggataaaagaagggagagaaagacaaagcnnnnnnnnnnnnnnttcctatatatatattaataaaatacttaagtttcctggaggcatcaacggctctttaaataaatcatcagatccc

SEQ ID NO: 443344 - DNA, 680 bp, Homo Sapiens
  misc_feature (223)..(284): n is a, c, g, or t
  misc_feature (446)..(446): n is a, c, g, or t
agggcagacctaggagcccctctgaccactgaatccgtctccacaccccttctgccaagggaagccccttcaggaaggaccccccaaagctgaggggctgaatgtagccttttcaacagagaaggctcccacttgagagcagcctctacctgaccccctggaccacagagagccactctgaccctcagccccctcgcttcttcagctaaaactccaaaggttnnnnnnnnnnnnnnnnnnnnnnnnnnnnnnnnnnnnnnnnnnnnnnnnnnnnnnnnnnnnnnattgcggtcttagattatgtttctcttgctaccaaacagtcatgtattaactctctttggatgatgaagtttaaagagtcaataaatagaaacaccagatgactgcattggtggccacagtggcctcctgtcagcaacctcagggctcagtctccctggccnacatgggccttccgacgtcgacacacttgggaagaagggaggccttggagacccagaagagtgctggacggcgaggttgccacgatttgctgtgttacctgggcaggtggctgggctgcagtttcctcatcaggaaaataaaggggttgtaccagttcagtgctttgtaaccagggttacatggtagaatcccttgcagatgacatgtaaatgcagaaacatgattcgtaactt

SEQ ID NO: 443345 - DNA, 362 bp, Homo Sapiens
  misc_feature (38)..(38): n is a, c, g, or t
  misc_feature (195)..(195): n is a, c, g, or t
  misc_feature (214)..(214): n is a, c, g, or t
  misc_feature (266)..(266): n is a, c, g, or t
  misc_feature (343)..(344): n is a, c, g, or t
ttatgtatttgccacttaatttctttagtcattaattntacacccaccagtgaattcctatggccagatgaaaattttgtggtatacataattagagagaaaatgatcatggtgggtattcctgtaagtttgacgaacttgagaagttttagcaccctcccctaaatgcatgaagcccctctatttaatttctcncctaaaatagagacacgtnaaatactctgtaataataagggatcttttgctgtgtctgacaacttttgctncgcagtcaaaaaagctgttctgaatgtgtcaatttttgcctatctagcttgatgtgtcattctattctttaaaaacnnttatatacaataactcag

SEQ ID NO: 443346 - DNA, 377 bp, Homo Sapiens
  misc_feature (189)..(189): n is a, c, g, or t
tcctttttggacttcttattctctttctcacactctttctttttaagaactgcacaggaaccaggacttggaaaaatcatattctgggaagcagctttgatagtagccaaagagatgtcttcccaaaaagccactaaatgttttaaagttaagggaagaggagacttagacttcattgtgttatgcatnggacatttcaaaagtggtctcggttttcccatcctcacatttttcatgcagaggtggttccttaagcatagacaataccttgtttttgttgatgctacccatcttagatatatctggtccatggggtgcaatattaaacatattcagtgcagatgatatttctaatgaatgtctattttttaacttgg

SEQ ID NO: 443347 - DNA, 391 bp, Homo Sapiens
  misc_feature (231)..(231): n is a, c, g, or t
  misc_feature (233)..(233): n is a, c, g, or t
  misc_feature (315)..(316): n is a, c, g, or t
  misc_feature (338)..(338): n is a, c, g, or t
  misc_feature (364)..(364): n is a, c, g, or t
gtgaaagcccctgtcacattcctctgactgcagcacatggggcctggtgcgggtgagtgtctgagtaggaatttgatgtcagatctacccctgccctttcctctcaggcaggagatctgcagagaatcactaagcaaactctacagcttgggcaaggtgcttttcacccccatctttcacccacttcacacccggatttttgttttgttttgagactccatttgaaaaaananacaaaaaccctgcataagatctgtagagataatagactccaacaggcgtgatttccaggcctggttagcccacatggcatcnncctgcaagttagaaacacatgncccttccaggggacctaacctcttgnttgcacagtgtggcaggccaagcacca

SEQ ID NO: 443348 - DNA, 446 bp, Homo Sapiens
  misc_feature (281)..(281): n is a, c, g, or t
  misc_feature (417)..(417): n is a, c, g, or t
  misc_feature (421)..(421): n is a, c, g, or t
ccattctccagggcagtgattctcaagctagatacacaacagaatcatctggaggacttgttaaaacagaatgctaagccccatccccagtctccaattctgtggatctggggcagagtccagtaatttgcatgtgtgatgccgctgctgctgctgttcttggaagcacaccttgagaaccactgcctggggaacagcttagctgctatgagaatctgattctgtgttcatattccgtatcacagatagctctcggcttttcaattgtggtttcttttttnaatgtcttactaagggggaaaaaaggaacgccactttatataagcctgaccttttggtaagcctgggtagtaacttcccatgtggagtaattaatctctttcatgcatgcctcgtgctctggaaaagtaaaacagntttngttagacatttaccaagtacttttt

SEQ ID NO: 443349 - DNA, 362 bp, Homo Sapiens
  misc_feature (49)..(96): n is a, c, g, or t
  misc_feature (235)..(235): n is a, c, g, or t
  misc_feature (244)..(244): n is a, c, g, or t
  misc_feature (269)..(269): n is a, c, g, or t
  misc_feature (341)..(341): n is a, c, g, or t
  misc_feature (351)..(351): n is a, c, g, or t
cctggttataaatcctgcaatatattacattttttaaaatcctagtacnnnnnnnnnnnnnnnnnnnnnnnnnnnnnnnnnnnnnnnnnnnnnnnnagtagcagcagtggttacctgtctgagcacctacattttcttaggaggggatcgtgtctcaccagccaaatagcccataaaccttctcaaaaaaagtgagccaggggggaaaagtttaacacaagttttgatttcacantgtctctangccccacaggccccaaactgggggnttcactgattggaaacaatttgcttctccattgctttcttcttgggggaaagggttgttttttcaaggtcantgcctttcantatgttcttca

SEQ ID NO: 443350 - DNA, 336 bp, Homo Sapiens
ctaatcttgagatttccatcagagtgctgtggtataataccttgatgaatacagtccatgttaatgccaaaaaaatgggaagaggtcaaatttcctcctactgatggtaggtagcccacctgaatccccaagttctttcactgtctgtgagatagcctccaaggatattttaaaatatgagagctttcttcagagatcttcttcctttatgtgtcccaaaaacgcagtcacctttagctatcttaatcttgctttttcttgatagaaaactagaatagtctttctgcatttctgtattctcagcagctagctttaccatcttttctgagatcatct

SEQ ID NO: 443351 - DNA, 541 bp, Homo Sapiens
ctcggtacccaacaaccccggacaataaaccaagtgcattcagatccctgtctcgagctctgctgcagacctgacctgagagaactctccactttgatttgcagccagaacctcccattccaaccacagacagcctgctttgcaccaaattccttacttacccagcccatccttccctatttcagtaactggtaactccatctttcctgctattcaggccaaaaaccttaatgtcatcattaactcttccttctcttacactccacattcaaactctcagcaaatcctattggctcttttcaaaataaatctagatatttgaccactgctgttgctgtggcccaggcccaagcctggaaccttgcagtagcttcctaacaggtcttccctcttccttctgcccttgtccactaaagtttttcacaatatggcagctagaatgacccttgcaaaatataaatcaatcaaggcactcctctgttcaaaccctccagtggttcccatctcacttagcagaagccaaggccctccaccacctgcc

SEQ ID NO: 443352 - DNA, 1149 bp, Homo Sapiens
  misc_feature (534)..(560): n is a, c, g, or t
  misc_feature (849)..(892): n is a, c, g, or t
ggaattctcgggattttgggtgctgtttcttttaaatcctctgtgccagggctctggcctttagtaaactgtttttctgtcttacgtcatgctgactgggtgctaggggctgattacaaaggggaagagttgaacagacatcaggggccgatgaaaccaaaggactaggagtcaggagaacaagtcagggattaggagacagcggtttggtttattgttatccagctggaggactcctaggggcagcagcaggaggaataccagggccacggaggggccaggagtctcacagtggagggcagactctaacagatgccagctgaacgctcgctggccctggatgtcatacgagttggggaccagaaatctgggctcagagaacccgtccagggagatttgaagccatgggttatcttctagagttgatactgataatatattttaatttttattgatgtttaataccttctgaaacaggagggtaagatcagatgggaagcccctctgttggaggatcttgggaaccttggtggnnnnnnnnnnnnnnnnnnnnnnnnnnngatcgagctgtggacatccttcttaattcgattctgaggatttgtttaactaaaaagttcccaaacacagaaagggcctccccacctgctttggggagctgtctgtgctgggagtgccaggcatcccatgggacccatcactgccagtgtctgtgcctcccgaagtcacccctgggtctgccctggctctgtctccttctgggacaggcagaacatttctggtcagtttctccatggtggcctcccacccctttgtaaaggggaggacattatggaaattccctggtcnnnnnnnnnnnnnnnnnnnnnnnnnnnnnnnnnnnnnnnnnnnntccgaaaaaggggaacctggaagcgagtttctcggggcggaaaacttctccgcgcaaggcccccacccgccctcaaagaaaaatatgcgtcaggcgcccgccacccgtgtgggcactcttcccactttcgcggttctccagaaagcagcgggtacagcctatctccttcgttcccccgccgaccctgtttggcgcccactggtgcacgcggcgtattgtcccccggggagccgaccacctcgaatcctttggggggt

SEQ ID NO: 443353 - DNA, 578 bp, Homo Sapiens
  misc_feature (62)..(62): n is a, c, g, or t
  misc_feature (67)..(71): n is a, c, g, or t
  misc_feature (74)..(75): n is a, c, g, or t
  misc_feature (78)..(78): n is a, c, g, or t
  misc_feature (82)..(82): n is a, c, g, or t
  misc_feature (84)..(84): n is a, c, g, or t
  misc_feature (88)..(88): n is a, c, g, or t
  misc_feature (90)..(90): n is a, c, g, or t
  misc_feature (92)..(92): n is a, c, g, or t
  misc_feature (103)..(103): n is a, c, g, or t
  misc_feature (122)..(124): n is a, c, g, or t
  misc_feature (141)..(176): n is a, c, g, or t
  misc_feature (419)..(430): n is a, c, g, or t
  misc_feature (479)..(479): n is a, c, g, or t
  misc_feature (506)..(506): n is a, c, g, or t
actacaagaagctaaactcagcaaaaaagtacaagaaagttaactggtgccagttaagtccnttttnnnnnccnnttntttntnaaancncntctgtgtgttntctttatttgttgcttttnnntcctcttctgtttgtgnnnnnnnnnnnnnnnnnnnnnnnnnnnnnnnnnnnntccttgcagcagaagctccacagacgtttaataacaacaccgggaggggtgggggagagagagctggacagtcagatgggggcgccatagccagacaccaaacgtggggacaccgggggaaggcaacttaactatagctaaagtcgggggttttgcaattctcagttccgatggggccgctgagtggggtggggagcggtgcgagggctcccaggggctccggcctgtggcttctgttggaannnnnnnnnnnnaaagaaagaaaactagggcgatgcaatgtccagacagaagccgggggcncggggctcgagatcgggggctgtgtcncactgcaatctggaaagacgaaaaacccaacaaacctgaaggggataggtaggtgacaagtggacgggaaag

SEQ ID NO: 443354 - DNA, 1146 bp, Homo Sapiens
  misc_feature (1045)..(1045): n is a, c, g, or t
cttttttctttacttaaaattatttttccttttagaaagttcaccaggaaaccagctcccctcccaccacgccgggcaggccacagccatctttttaaaatccgcgctgattttccctcacacccccaaacaggaactcctcaggatggcctcagaaggctggagtctctccctgtctggcgggacaccctggtggcggtgaaggcccctctgccacaacggaggtttctgattgtgggacacagtctggtttttgttttcttcctgtcttctaattaaaaaagacattcctgggtgacaggcacagtgcaggagtgtgagctatcgaaacaacctggtgaagtctcgcaaggcccagcaaacttgtttacattcctcagcactagtgacttgcttgtggaagtctgtaagttgtttgtgtgtcactgtgacggctcccacggttgtttcctttggcaaaccttttaaggaattttctaaccatcgacaaaaagtcggtctgtcaacctgcatgatctcccagagcacttcagccacatctggtagggtatagggggggaggcaaaagcagcaggtgtgcagcagctggctgacaagctgctgtccaagctggttcatcacctgtccaatcagttctttccgtaattcaaagtcttcttcatgatcattggctacccctgtatgaatgaggtctcgtagaaacctcatgacactacaattggcatcccggtggtccagggtagtagaggcaatggcccactgtaagatagggatgaccacttggctccgcagcaaggtgacaggctacgctgaataaacctggtggctagccggaacaggtcatctacagtgtcagggtgattctggagaccattctgctgttctaggagctgaaaggtggggatgcacagtgcctggagcatgtctagagtccctgccgacagccttcttccatgccatattcatccacaaggatactgccaaggtacaggaagcaggaatgctgatgtacgtggtacacattcaccatctgtgtgactagtgngctgagcagtgctgcagatcctttgcctacacagcgaacagcaaagcgcaggcacctgcaacaacgctctacaatccgattatcagctcggtgcttattta

SEQ ID NO: 443355 - DNA, 387 bp, Homo Sapiens
gagaacccccctcaagagaacttgaagaaggagcagaatgggaccagtgagttcattttagtgaaggctgatgcagcataacccccgggccttcctccagcagcctctccaggcctccttttctttctgaaaggtcttagggaggtaggattaaagctccagacagcgttgtaagaaaatatgtcatgtgccttgagaaaggtgattgtgaaaatgaacacttaggaagaggtgtcaccattaccgtctgagcctggccccaggaggtacacatccgcattctcacgactttgtgttttcatgagcacagcctgtgtcctgggtggatctgggagcatcaggaggcagcctttccttcctctctctccctcctccctccctttgatt

SEQ ID NO: 443356 - DNA, 177 bp, Homo Sapiens
  misc_feature (25)..(25): n is a, c, g, or t
  misc_feature (27)..(27): n is a, c, g, or t
  misc_feature (29)..(29): n is a, c, g, or t
cataataccattttcaactctgagngnanaattctatgataccatctgacatacaatatgcatccctcctggattttccctaacctttaacttctagctcttccccaccctccaggactccaagatgcaaataaggattgctagaacagtgccctctcctaaccttttgctgttttt

SEQ ID NO: 443357 - DNA, 277 bp, Homo Sapiens
  misc_feature (100)..(100): n is a, c, g, or t
  misc_feature (133)..(133): n is a, c, g, or t
  misc_feature (239)..(239): n is a, c, g, or t
  misc_feature (256)..(256): n is a, c, g, or t
  misc_feature (269)..(269): n is a, c, g, or t
caaaaacccatgaaccacaaactcaaatttctcctcaaatggggttaatctgacaaatgaggcatggacccagccttgtggaaaaagcattccacgctanatgagatcttggtctttcttgtgaggctacgtntatttatgtaaatatgtctgtgaggcaccttctctaaggttttagttttctatgatctattagtttagtgtttattaaaggatcaaatgtatagaattaccagggnattcgtgggggaattcntttttagcaaatnttaaaact

SEQ ID NO: 443358 - DNA, 2289 bp, Homo Sapiens
  misc_feature (1322)..(1330): n is a, c, g, or t
gtgctttgtctttttattattctttattggtcctaccaatgtgactctttacccaggcccactgttcctatgcgcactggctttgtaggcattcacatcatatgtctgtgtcctgaaaatctcaattaatttctccttcctattccttttccatgctctgcctcattttctcagaaattgaaggcatttgattattatttttttgtttgggtctgtgtaaaggttccttggcaggagaacatgcatatgactttaaaataaagaccaacattctgacactaaggtaatgcacagaaaaaatacagtactcagacatcattgcaaataaataccccatacagatgaagttatctcaaatgtaacaatatttcttatgaatcaacactgtaacggaaggtaaaaataggagtccctacaactaggaataagaaatgcttattccaggaaacagaattcttttatttttgtcatttatattattataatttttccttttttggagaaggaaggacagtttttcttcctccaagagtaccaatttgaccactcccactaacctcactcagcaaacaaaacaggatgtagacctggtttgctaaggagttttaatgagttctgtttcctgaaattaacagtgattagttacaccaagcaagagaagatataatgtctcgctttcacatttgcaaagaatactatggctaaccctcatcccctactgcgcatgccaacacagcgtcggccctcctgataccctcagctcttcacaaacgtggcgttcatacagcttgctcagcttgtcccagaaggtccatttggttcccaaagcacactcaaggttttgtgtttgctttcattttctaagcccctgaatttgcaagtaaagaatcactgactaacagaattttggcacaatgactggtttcttttccctcaatgaagatgcccaggtctgggtgtgaggagcacctggcctcacctggctggtccacgctggccttcagcatggccactaagctctttcctggctcgcttttgagaatgatctgtgctgggacacctcccttaactgatgaaggcactactggcaatgattactaacaaaaaggtgttgaaagagaacaccctaaaaatcgacgactgtagaattttctaagtgtaccacaatttggcacaacaaccagagtaacaaaacaattccaatttggaattttattggtacagttgtataaaattctgttaatcagtcatgcttcacaacgtcctaaaacccagaaaattctggaatttgtaggtaatactactcattcaataatttatcnnnnnnnnncaagtgcctatttcttttttaaccagagcaaaggtcaagttttcttcttgttacattgaactattcctaggaataataataatcccaatatgaaaaacccccagaatctgaataccctggatttcttaatgaacatggcatttaaaatctgtaatttcaaacatgaaccacaatgccgtatgatctaaaggctgctgaaccacagcgtggatacacttagctgagctcctcgctgggtcaaagcactcatctccgagtctaaagctacacgctatggagcacacagctctgcctcgtgctgacaccagacaaacacggtgggagctgaggcggacagctacaggaccacgagcatagaccacggcacctgagaccgtctctacgcgaggaattaaggaagcaaatataatatcaaaatatcaaaagtgcacaggttgatcggataaaaaaagaacatgtgtaacaaggagcccccgtggtgggcgtttccagtgggctcctggcgagcctggcagccagggaagaagggtcttcggcccatacagaggcctttccacgcagcagctcgcagcatgctcaacattaaagctttttttcctcccattaaaaacctggggaatgctattttgaaaagaattgcagtggcatatccaaaaagtttctaagtgggcttttaggttgcccttccttcctccttgtgggccacgagagggaaggggaaggggctgcagtgtgacagggccgggtggccaagtcctcctggcagctactctacagctgaaaacgggagaaaagagagcgttagaaagcggtcatctgtcgcttcctgtttatctgacaattgaagctctccacgtgctgggagggcgcgagcacgttagttggcagaagagaagacctgcagtgttagcaggggtcccagtcctcgtgccgaattcgccacccaggcctcgctcctt

SEQ ID NO: 443359 - DNA, 1399 bp, Homo Sapiens
  misc_feature (169)..(169): n is a, c, g, or t
  misc_feature (261)..(348): n is a, c, g, or t
  misc_feature (354)..(371): n is a, c, g, or t
  misc_feature (506)..(542): n is a, c, g, or t
ttggggtggaaatttaaggaaaaagttcttaaaaaaattaattagccaggggctttattggtttttccaccttttattcccacagttacttccgggagggttgagatggggagaatcttcttaaggcctgggagtttcaagggtgcaagtgagccatggatcacatcantgcattccagcttggacaagagcaagactgtgttctccaaaaggaaatagtagggctttatggtccaagcatgtgggctcacacctataatnnnnnnnnnnnnnnnnnnnnnnnnnnnnnnnnnnnnnnnnnnnnnnnnnnnnnnnnnnnnnnnnnnnnnnnnnnnnnnnnnnnnnnnntgattnnnnnnnnnnnnnnnnnnttagccaggcatggtggtgttcacctactgtagtcccaacgactcggaaggatcacttgagcccaggaggtcaaggctgcagtgagccaagatcacaccatgccctccagcctgagcaacataatgagactctannnnnnnnnnnnnnnnnnnnnnnnnnnnnnnnnnnnnaataagactttatatgagtggtcattggttatgatgttcttattctttataagagaaaatctgtgtatactgttacagctgaatggcatttggtatatggcatgccagtcttccacatgtactgatgtttaagaaaggcttggatccagtgtgtattctggatgtcgggggaaaaaaaggcttggaaaccaggttatcctattatttaaaatattaaaaattacattattttagaaacagagaaccaaatacaagctgatactaccataaaattaccataaaatagttttgctcttttttcactgtttacacctttcctccctatattaagttgttaagtacttgagaaacgtacttaacactgaacttcccaatatatttgggaaggtatgatatgaatgttaagtataaaataatacgggtagttaatgttaaaagaactcagaggaaatttcccctcagggtaactacaaagatgttttctatgctgcatttgtcccgagatgtttatgtaactcattcctctatctcaatcattacatacccctcattacaaacactcctatgtgctctctgagctcatctgaagagaacagaattgagtcgatgatttgagttatgattttctccattctcctagggactgtacataattagtaccattctagatgacacagggacttagggctttttctcctgcaaacctaattgagaaagcctgtgatagacactagcacacctccttctctttccccctactcccagactgctctggcctcaaacccatcctatctatttcatcaatggccaacactgtcctgtctgcacccagagtgagaagctcccctgtggaagta

SEQ ID NO: 443360 - DNA, 693 bp, Homo Sapiens
atgagccaccacacccggctattcttggtattctttattcttggttctctagcctttagaaaagaaaattctatcttggtaaggaaaatgtcatttaatcaagctccagtacagcttgtgtcaagacctagataagaccaccttctagattgtgttcctggcagtatgacattataaaactaacttgagaattgtcaggatatctccttgttccctgacgttgttattgtaagaatctactacattccttaagaagttaaccataatgccgagttgtcaccgaagagatgagtagttgttatcttgccaaggaattatcttctgtagtagcctgaatattggcgttatatccaaaaaaggcgttaacctccatcgagagacttcttctgcgcctctctctcagcatatgcttgtgatatttgaagtgtgtaatagattggagctatcaggtcacttatttctgaataaatgtattcttttttcttcatagctgtgaagagggataccaaggaaagttctttctgctgtctttctcttcggtaatgcttatcttatgaacactcaactgaaaaaacactccacctaaaagcaggaaagatggcaattctaaatagcagctattatccccgggtataaactatttttgttgttggcttggggctttgctgcaggtattaatagttaaaggaacac

SEQ ID NO: 443361 - DNA, 1052 bp, Homo Sapiens
agcggattgtaattctctaattttatcttttctaaaaaagttaaacaattggagagccctctctggagggctctcagagtagctctctgcccattgttctgaattaacttgtgtcccaccctggacaataaatggacagataaaccctttgaaatacaagccaccaccccgtgagggattaagagggcagcctggttttcttagtgtgcatggcttcagctgtccgtcatagttgtcatctggatatgttcacccctttccactccttcaccctggccaaaaggaaaatatttccactgtaggtgctgtaagaacactagactttagatcatcacaatctactgtatttgttaatggacagggagtgtgtccggatggagcctggtgccttcccctcggccttgcagagggctccagcccactgcctctgtggtagccgctggctctcagaagtagcacgtgggcaggagtctctcctctgatccaggagcattggcaggtttgtagttgggactgctggttaagttggagctgtgtaactacttagtttttggtagccaatcagaacgcagtgtcccacatattccagctcggtacatgttgataaacagactcatccaaactttcaaaatggattcgtactaaacatgctcaggttttaaattttggtttgctttgagcttttgcctcttatgtggcctcttattactaagtagttacgaatgaacccaagtccatcccaggttattcccaagacaggctctcaaatgaccttgtgacgcacccttacacctggcatggacacccacaggcaagggtccacaggccctgctaccctttatcagcaaggagtggtgggcctgttattgacagtggcagtgtgaaccctattgatccctagctctgcaagctttgagactccaggtatatcaacatacgttttattagcatccagtgcccgtatatctagaaaggaaagtaaataaatatacattatgcatcattagaggagtttagcctgtttgccggctggatgtaagggcagaattaca

SEQ ID NO: 443362 - DNA, 355 bp, Homo Sapiens
ctacagttctgggtattcatatttgtttcagtcagctaatgttggactctgttagcacagctgtttggaatttaaacttttcaagaattctttcatccttattattcattcctgttttattcttggatatcctaagtgcatacccagactaatgataatatcaacacttgttcagtatggttggtcatttttaaaaataaacaggcaatttatgggtgacccacacaaagaacagctgctgccatcactcacgccctctccattgttgatggcctctgcaactgacattgtcccaagcagctgctgacagagctgccagtacctgtttccacgtccaacctttattctattcgtt

SEQ ID NO: 443363 - DNA, 1040 bp, Homo Sapiens
  misc_feature (85)..(109): n is a, c, g, or t
  misc_feature (365)..(379): n is a, c, g, or t
  misc_feature (405)..(454): n is a, c, g, or t
  misc_feature (545)..(648): n is a, c, g, or t
  misc_feature (850)..(850): n is a, c, g, or t
  misc_feature (939)..(939): n is a, c, g, or t
  misc_feature (1004)..(1004): n is a, c, g, or t
ggggcattggctttcaccacctatgcaattttctacacatctgaaaattaccagtttatctaactccttaaatgttcctctcttnnnnnnnnnnnnnnnnnnnnnnnnnttgctggaagaaacaggaagcatccaggtccaaatgacagcataacagactatgaagaaacagggcttaagtgcccatctagaacaagatggtctagattacaataaggaccccatgggacagaacatcaaaacattcaactttcaagtaaatgtcttggaagtaaacatttaaaatttataggacttcctctggcatgtaggtatgatattagaagagtttcctttgacaaaggacaatgacccaagaagtaggnnnnnnnnnnnnnnnaaataaaggagagacagtctcactcnnnnnnnnnnnnnnnnnnnnnnnnnnnnnnnnnnnnnnnnnnnnnnnnnnttttaactcctgggctcaagcaatccttccaacctcagcattctgagtagctgggatcacaggtgctccccatcacaccctgctaatttannnnnnnnnnnnnnnnnnnnnnnnnnnnnnnnnnnnnnnnnnnnnnnnnnnnnnnnnnnnnnnnnnnnnnnnnnnnnnnnnnnnnnnnnnnnnnnnnnnnnnnngagtgagccactgcctctgccttcaggtagcaattttattagcaaactataagcctaaagtaatagttaaaattctcactgtgatattcattactaacccctgaacctgtacccttcagcttaccactacagtacttctgtagtagagcgagtatgggttttggtatcagacaggtccaaatttgaattctggttctacctntcatttatcaaatgactttgggcaaagtacttaacctctctgagctttagttcccttctctgtaaaagaataaaatatttcagtcttancgtgtagatgatatacagagggcacataacaaatgttagatctctcaaatgtttttctgtaaccnaaatatgcttacaactgattaaagaatgttctcact

SEQ ID NO: 443364 - DNA, 341 bp, Homo Sapiens
tagtggcaatcaaatttattaactgtaaaggacatcaataagaacagacaggaccagaaattgtatcttggtgatccacatgccaggagtagcgcggcagaggatggagagtggaacttagcgattgaggcgcagcctgcagaaagctgcacttctgcactagagattaaataagagggtcaaaatcaacataaactaaaccctttttcaaagtcatgtaaacacaaatgattgctgcaactggaaaacaacattgaaaataaatgattcgtgtgatgcatatcgatttcaacaaacctttccttaaacctttaacgttactcttacaagcaaagtctttt

SEQ ID NO: 443365 - DNA, 473 bp, Homo Sapiens
aaagcccaagacctggagcgagctggagtggcaggccctggaggatgagaaggtggcaggagtgcactgggatacaaagaaaccaagattttctgggaattctcagaggcctggatccacgaaaaactccgcacctgccatcgaaaccaccaggtgtaccggattatggctgagcagctgtgagaacatggcttcctgtggaccctggagcaatgttgctatcggttcaaaaacctcctgaccgactactgcaaagccaggagcacctacacaccaggcaccagtgtcttctatgatgagatggatgccctgttgagtcttggggcactttctaacacctttgatgccttagaggtggtaggaggccttctttgggattgagaggattccaaagggaaccagggcatagcactagaagatgtggcgggatggtaatgaaatagtggaggagtctcaagaggaatcctggaggc

SEQ ID NO: 443366 - DNA, 461 bp, Homo Sapiens
  misc_feature (393)..(393): n is a, c, g, or t
  misc_feature (404)..(404): n is a, c, g, or t
  misc_feature (432)..(432): n is a, c, g, or t
  misc_feature (440)..(440): n is a, c, g, or t
ttttttttactttgtgggattttatttaggtcaagttcttagtacacggcaacaattccaaatacaattaaaaaattaaaaagtgatgttcctccactcatctggaggtggtttaatggcacacaaggaacattactggcaacagactgctccctcaagttcccctggatggtttttactcaactcataataccaccaactctccctctgggagctaaaagtacaactggccagatcacaaattgtttacattcttttttgtaagccattttaagaaaaatggtgcatggacacaaaatatgataaaaactgcttttccatagaattcttaagttgcaaaagaggtttcattttaatgtgaaaataagctttttttgttgggttttctttttncttacaaaaanccttaaggatattcagcagggtcctttntacacggntgggcccgctttcgtttaatg

SEQ ID NO: 443367 - DNA, 507 bp, Homo Sapiens
ttttttttagcggggttttatttgtttatttcctcaaaagcagggatcaggagttgcttgggagaggggcagttgggagctgctgggggctgagcccaggtcacctgtcccctgacccctttccagtctagggctaaaaatgacctgaaatcgtctggtgtgccttggacatggccaatttcaaccacagtgcttgcacccccatgtgccaagaaacccggttttcccagcacctcctcctgccctactcttcagtattaattggggtgtgctgggagaagggatattccacatcacacctcccactctctgcagccagggaaacggatcctagcgcccagtttccaggacctgaaatctagtgtgttccaatcaggtgcactgatggggccgctcctgcagctcagggggctgcagatggggagggacctccaggttacaagaatcggacaggctgaccttctagaagtgcagctgtagggagctgttccaagtctcttgctctcc

SEQ ID NO: 443368 - DNA, 1279 bp, Homo Sapiens
ccctgtatatgtcttcttattgatgattttcttgttttttagaaagctgcagtttgtgaatttctcttgctttttaaaacagaatatttccaaaacttgggcatcaatgcttggtctttttaggtgggggatagaagactgggccatcttcacagactctcagaccccggctctcggcggccccatttgccagccagacttcctgcttgggggacggctgctcccccggctcggtgcagttttgcagctgctggtcttgcttagtgaggcacagttctatctgaccaattgtctgtacttcctcatcctggcttggtggaaggcactggattttgggtatcactccatatactctggcaagggcatctttaaaatctgcaacttggtagtaattgatggatggttttatccccaattttagaagcacactgttgaggtccagctccctgtagagttccaggcttctgccaaagtacttcttctgggagttgagcgcatccacctgggcggcgcaggtcccatgcttttcccactcatgcttccagaagcggctgcgattgggaaacgagtgaattacgtcaggccagtatgccctcatttctggcaaaagatccttaatctcttctaaattgcagggccacgatctattacatccttcacttttatcgggccatagtccatgtattgtcccagtaatccggagggtctctacagtcgttttgaattttctcgcatactgtctcaggccagtgctgaaccataattagttttttccactcatggttgtcacgcaggcgcttgtccgcaccgcccaggcaaagcaacgccaggcagaggcagcccagcagggccccgcgcagggctgcagggcgcatggtgccgacctgcggagagaacgctgccagctgccgctccggctcccacttcccacctgctgcccgaggaagacttccgggagaaacgctgtctccgagcccccgcgccgccgcgctccctccgctgcagcagcggccaccgggtgcgcccggagccctgggacggcctaaaccagtatctcgcgggccccgcgccgggctccgggaatggccgcagcagccctggagacccgggcccctcggagctccccttcaggatcgtgcacacaagcgcgcacgtcccgggctctgcttcgcgaccccacagcgaccccagctcctccgcgctgcagccgccgtccgcccacgaccacggtcagtcgcgttgctcccagcccagatcccgggaattccggaccggtcca

SEQ ID NO: 443369 - DNA, 590 bp, Homo Sapiens
  misc_feature (56)..(56): n is a, c, g, or t
  misc_feature (70)..(70): n is a, c, g, or t
  misc_feature (83)..(83): n is a, c, g, or t
  misc_feature (121)..(121): n is a, c, g, or t
aattctgggccttaaagaaccctggcccaaaatctctttcctgcctgcttgtcccnagaaattctgcggncaaaaaacctaanagacttcccaaaattttccgtcctttcctaagaaaacnacttaataaatgcaactatcctttaatcaggaaatcatggctgaaaaacggcaacatgctggttggaagtccctcgttttccctaatggccgaactctgaatgaatgaagaatggttcccagatgggcatcccaatactctgcacccactctgtgtgattcgtgatgtagaatgatctggaaaggcttggtaggctcagaacattcctcaggaatgatcccagtagccgaatagtgcacatgcagaagctgctggagggcagtgaggtctacaccaactcccctggatccagctgtcaggcttgggcgacagcagagatccccactgggaagtgcagccgggggaagggcgcacccacctgttgaggtccagctccctgtagagttgccaggcttctgccaaagtacttcttctgggagttgcagcgcatccacctgggcggcgcaggtcccatgctcctgtgccgaat

SEQ ID NO: 443370 - DNA, 310 bp, Homo Sapiens
  misc_feature (11)..(11): n is a, c, g, or t
  misc_feature (24)..(24): n is a, c, g, or t
  misc_feature (28)..(32): n is a, c, g, or t
  misc_feature (251)..(251): n is a, c, g, or t
  misc_feature (253)..(253): n is a, c, g, or t
  misc_feature (282)..(283): n is a, c, g, or t
ctcgtgcgttncctctagtatgantatnnnnnaagtttgggggaagagaaacttgcagtgaaaaggagttttttcattcctgaaagttgcagatccacaaaactaacaggataattgggcaaataaattacatataaacacacacaatctatatatgtatatacaatgctatatagatatgtatttcttatatcataaactacagtaggtaactttaaggatttcttcctatccttgtacaatgacatgantnctttctttgaaactgcaatgtatgtatgnncaaggttatttacagtgtactatggtt

SEQ ID NO: 443371 - DNA, 492 bp, Homo Sapiens
ggagagtttgataattgtttcgagactctcctctagcgtgcctgtgttccgtgtgtccccgtgtgcaagcgtgtgccatgccaatctgcctcgagggggcctcacccgtgtccgcggcgcccgccgaggcccccgagggcctgcttgggagtgtgtgccggtgtgcagttgtacgtgtctttctggtccatgtttactggctgtaaataccatttttatactccacatcgcagacctgcgtgatttgtacaatgtactttatttctgctacgagtaatttcatgaagtttcaacttgcaaactgacttttgggacaaaccaacacacacacagaagagaaagcaaagaacttggaactttgggttgactcggtttgagttttgtgtcaaagaagatttcccgcggctgaagaggttggtgttcctgttacgtgtttcaggtgagaagcagcaaagcgtcttaatgttcaaaacgcctctctttggtctggag

SEQ ID NO: 443372 - DNA, 793 bp, Homo Sapiens
  misc_feature (7)..(7): n is a, c, g, or t
  misc_feature (35)..(35): n is a, c, g, or t
  misc_feature (58)..(58): n is a, c, g, or t
agctganacacgagagatattttttaaaacgagcncaaactcaacttgcgggagtganaaactatgaaaactactgagtgggatgaacagcagattatacattgcagaagaaaagatgagtgaacccgaagacacagcaacagaaaccacaaaacaggcacaaagctttactgagctgcggtggggcaaagccaagcagcctgacgcccgcctgcccgacgcccgcctgcccgacacccacgtgcccgacacccgcctgcccgacacccgcgtgccgacacccgcctgcccgacacccgcgtgcctgataactgcgtgcctgatacccacgtgatacctgtgtgcctgaggcccacgtgcctgataccggcatgcctgataactgcatgcctgatacccacctgcctgatacccgcgtgcctgatacctgcatgcctgaggtcctgaggagtagagggacagaaaaaacacctgcagatatgaagtttcaaaatgatgcaaatttcatgaaaactacaaagacccagatccaaaaatctcaatgaactacaagcacaaggaacacatagaaaaccataccaaggtccatcgtaatcaagttgctcaaaagcactgagagagaaaatcctggaagcagcagaggaacaaacacacacgaccacagacggctcatcagacaccacgcaggtgaaaaagggagaccaacccctctcaagcactaaaacaaaccaacatgaccgcagacggctcatcagacaccacgcaagtgagaaagggagaccaacccctcatc

SEQ ID NO: 443373 - DNA, 440 bp, Homo Sapiens
ttacaaataaacggggcttttattgtgtgtccacaaaaacaaagtcagggtggcctttggttaatcccctccccccaacaagatgacaaaaggaggaatgcatgtcaacaaaatgacaaagaggaccatggagggcctgagtctgctgcctccctggtgggacaaggcagggggagcaagcactactctgggctaggcccagcgccccccaagcaaaaacacataaagcccctgcccatggccacattcccaccaccactgctaatgcagacagccaggacttccccaaggacctagctctgaagcccacaccctaatggatccctgtagaatgggctgtcttgatgagactgcatgaacaggtcaatgaagatgaggactatcacaatcaccagtagaagttaaattttggcccagatcgggacctgacgacctggtcc

SEQ ID NO: 443374 - DNA, 417 bp, Homo Sapiens
tttttttaaaaatatagatatatttatttgtcattagcaaaaggaagttaaatactgatagaagatgcaaatttgtcctttcatgcatttgtggagcaaagtactaacttgttcactgtcatttcccctcacaaggagttgagcccctagatgactcaggctaaccctaagaacctacctagccttcttagatattcccatcaaagaacaggtggagtgtactaagtatttctgaaaattctaaaccaaatcagcaaaaatggcctgactgtgggaagactgttcgttcaaactgccttatttccatcatcttgatttgacagcttcataataaccttcctggatatattccctgtgggcacgcaagcaaacccgggttttacgtttttaatagggggatttattgtttttaaatgc

SEQ ID NO: 443375 - DNA, 272 bp, Homo Sapiens
gtttattcattaattctctactgatgaacgtttacttttttgtgagatcttgaccatcaggaacagtattgcattgcacgtccctgtattttaagttcacatatactggtacttttatttcagtgggctggatttccagggatcttaatggataaggaatagatttgactaggaatgtgttcaattactgttatatgaagaatcttgaagcaaaaaacattaaatatgaggaagttattttctaaagacagggtttcattcctgttgtccca

SEQ ID NO: 443376 - DNA, 578 bp, Homo Sapiens
  misc_feature (50)..(80): n is a, c, g, or t
  misc_feature (576)..(576): n is a, c, g, or t
aactttttaaaaagttttatttcaagaactttgttttttactggtatttnnnnnnnnnnnnnnnnnnnnnnnnnnnnnnngtcagttgaataacagcacaggtttagaaatcacagcagcagaagcaatgtacagacagcacagaaaaaacaacccaatgtatgcaattctgttcagtttctttgcttattttaagtattttttttgcctcctgtacaaaatacataaaagcatgccatgagatcagaaaaagaaaagagtttaacaaatggttacaagaaatagactctgtacaagaggagataatgtttcttcccctaccccccacccactacccccgcttcctctcttcttgctctgctttaggttaaattattctgaagacagttcacatccaagtcagcctggtcacctttgccaccctcaagtttgggcgacatggagttctggatgttaaatgactcctcctctttcaggcaggacttgagaacctcctggattttgtggggagcactaggatcatcatttgggtgagagccctcggcaatggtggagagggagaagttatcattgtgnag

SEQ ID NO: 443377 - DNA, 275 bp, Homo Sapiens
ccagtattattttctattcctttatatgaaatttttaaaagtagtaagtatatacagtatgcttcagctagttctaaccaagaggagccactctagatcagtttctctagcattcatcggaagatgattaaatgcaggaaatcacttcctcagcagcacatctaaaagccccaatgtgcagctcaacccttgatgaattgcaagctttttgcaagagcccagacctaggagtactagatgacctaggatagatagtatggatccaactagggtct

SEQ ID NO: 443378 - DNA, 351 bp, Homo Sapiens
  misc_feature (25)..(25): n is a, c, g, or t
  misc_feature (45)..(45): n is a, c, g, or t
  misc_feature (68)..(68): n is a, c, g, or t
  misc_feature (88)..(88): n is a, c, g, or t
  misc_feature (103)..(103): n is a, c, g, or t
caagtacgaaaaagggtttttaagncctacgaacagtcctcccantccatgacctttaaccaggattnctgcccccctgaggtgtaanttttttgttcctatntttttcccacgtactcccacagcccaacatccacgaggtgtaatttttaatttgatcagaactgttaccaaaaaacaactgtcagttttattgagatgggaaaaatgtaaacctatttttattacttaagactttatgggagagattagacactggaggtttttaacagaacgtgtatttattaatgttcaaaacactggaattacaaatgagaagagtctacaataaattaagatttttgaatttgt

SEQ ID NO: 443379 - DNA, 904 bp, Homo Sapiens
  misc_feature (795)..(795): n is a, c, g, or t
ttgatgacagtgtttgaatcatcataaaaaaaatacctgcttttcatctggacaacccaattgagccactttatctccttttggcaatctgagtaggcggggaacctaggcagggctggctttcttagcgtgtaacttgtgtagcagcacagggcccacacttagaaggaccccacacttggttcaaggctctgctatagcggaaattcttaataatgtttgaagaagggccccatgatttcattttgtgctgagccctcaaaattatgtctgtttcgtggtgggaaatatcctatgttttcttgctcaaacacctttctctctgaaagcagaaaaaggcactgatataaagggaagagaaggaggctcaccggagggaagagaacatagtgaagattcccgcctttggggaggtctggaccacccagggcctccactgccaccttggctggcaagggagaaatgtgttgtgttgtcttagctttaaaacagtcacagttcttgctctatcatagatgaacaaatactttcttgatcattctgtaagaccaggaggttggtaagagtgactaaccagcctaactttaatacacatgtataaagatgttcacagagaaagatgctctgtagagaatttgctaccgaagttggctcaagaatttgtttttagtgttatttaccaagattaggacgtcagtggcttaaattctttgaattcttttcaaggactgcaagattatttgataaagagtagcatgaatcttgtgctctaatattacacagtaaagttcaaangaaaggatgttaagtccaaagactttgtttacataagaggggaaaaatgggacatggggattagagggaacaggactggataggttttcctttccttttccatattcac

SEQ ID NO: 443380 - DNA, 415 bp, Homo Sapiens
  misc_feature (19)..(19): n is a, c, g, or t
  misc_feature (21)..(21): n is a, c, g, or t
  misc_feature (29)..(29): n is a, c, g, or t
  misc_feature (45)..(45): n is a, c, g, or t
tcaggaacgcaatttgggnanctggtcanaaattgatgcaggaangtgctggctggagcctggctacaaagactcatgggtccctggccatggaacctgaagtcagtcctataactgtttggattccaactgacggcttgaatacaggttcagctccacctctgcttccagaagatcattctggcagtgaggtgagggcagattgtaggccgtctggctggagggagggagacctgttgggaggcagtggcaacaattcaggtgagcaggtggtggccaggacaagggctggcgtgggtgacataagagtttgagaggaactgagaaggaagaagggcatgtaattggcggaagacagcaactgtgcgaaagggaggaggtaaaggtgacgctcaggtttctagatcaaggaacc

SEQ ID NO: 443381 - DNA, 840 bp, Homo Sapiens
gcttataaaaaccattttaaattaaaaaagggaggaagcatcagtgcacacagatggggacacaggggcagagggcccagccccaagtacagtgtggtcaccccacagcccagtgggcaccagggcagactcccctcgcagcacagacagctgaggcccgggtgctggttcctctaggtacagctttggtccttgtgggctcagaggtctgcctttcggaaacttgctctgttcaaggagttcctgaggccgggtggggtgggtgccatcagctggggcaggcgctgggtaagcaggggctgcagagcctcccgcaggcggcagtagttgcgctccagctcacggtggtactccttctggtccggcccaatcagggctttatttttccgcagcgcatcctcacatttctttgcagaagtcctttgaagcagagccgcaattttgttgtgatgccggaagagcttggggtcttccgggatctctgctaaaaacacctgggccacctccaggggaccctggttcacggtgggccctacagagccctgaagcaccatctgtagcatcttagcatctggtgggtcctgctcggtggcaaaggccagctcccgtgtcttcttctgcatgtcctcgatggccacctccactggcgtcagcaccgtctcctcccggtggcacacacggatgcgagtcttgactgtaggggaaggcgtggtcggtgctgagcagcgtcttacgcttgtgttgctcgggcagctccccgtgtgcgcgcccatccggcgtgaacggcgtgcagaacaggaatgtgcgaagcccatagttgcggtcaaaagtaggtcaccc

SEQ ID NO: 443382 - DNA, 375 bp, Homo Sapiens
  misc_feature (162)..(162): n is a, c, g, or t
  misc_feature (326)..(326): n is a, c, g, or t
  misc_feature (366)..(366): n is a, c, g, or t
  misc_feature (369)..(369): n is a, c, g, or t
  misc_feature (375)..(375): n is a, c, g, or t
cttttcacccaataaaatcctgctctactcaccctttaatgtgtctgcgtgcctaaatttcctggttgtgtgaaaagaacccacttacaactgaactaaggagcaaaattctgcaacaattgctgcctgttttttaatacctctctgggcccaataattaanaggacttgtgttcctcagataaaagttcttttcttttctcataactgaatatttttcttagttttaagaagccataggaaagacgcatttctgtaggaagtaactgtacctatagcccaatctggatgcagttctttccttcttccaagcctggggggtatgtntcctctgtggatgaaagagtgaactctgtaaaatatttgnggngatttn

SEQ ID NO: 443383 - DNA, 315 bp, Homo Sapiens
  misc_feature (7)..(7): n is a, c, g, or t
  misc_feature (9)..(9): n is a, c, g, or t
  misc_feature (306)..(306): n is a, c, g, or t
ttttaananaaaacccaatttggcccccttagacttctcaagtccagatgctacttagcctttcctccctgctctctattgcctgctcttcctcaccacatccctgcttttctgaaagtccttccttgctgtgcaacaaatatgacaaaattcccaaggcaaaaacctttaacacctcccatctaggataacacttatattttcaagattctcacttcattatagagatccctataaaaaggaataatacaccctcccgacagagatactgtgaagaaacaccagtggctcagcttcagctgcacnccaggcatt

SEQ ID NO: 443384 - DNA, 938 bp, Homo Sapiens
  misc_feature (737)..(738): n is a, c, g, or t
  misc_feature (740)..(741): n is a, c, g, or t
  misc_feature (853)..(891): n is a, c, g, or t
tggatacctggggaaaattggagaacttatgcgtaattcagcttaaccatgatgaaagattacctgaccaaaggagcacataaatatgcatacagggtaactgttatattggtaataccccgataaaggattttgttagcattttaggggaacgaggattggtgggatccttgggccacaggaatctgaggcaacggaagatatatagagtgatcgtccccctgccgaaggaacctggcacctgtcaagcagatgctgcagttcaaacttcagcttttaagatagatagctattgaaggcagagggtcagcaggaggatgtgtatttctaatctaccctggtaaagtcataggtaagactcaaaagcgggatcttattcaaaaggcaggtatttcctttgttttctgtcttgaaatagccccttcccctaaggtgcattctctcaagttttcagtattgctttatttgcagtgattaaaagagatgagagactttggagacagacaacgtaagcaacacatacacacatgaaatactctaggcagagatgaatataaatctggcctaataaccagttttccatgtaacagtgattttgtgtttcgggctgaagcagtggttatattaaaagcccctaattcccttatccctttaaaagatttttacagttctccaaccacaaacagcacttctaaaactaactttactttctgcccataatttgttctacatggaanngnnaaatattactttggccaggggtgtgtgtaaatgtggcagaattcctaggcaggctgacctttacagtatgggcctttaagatactggatcctggttgggcacagtggctcannnnnnnnnnnnnnnnnnnnnnnnnnnnnnnnnnnnnnncgacgcgtgggtcgacgatatcccggaattccggaccgtaccagcct

SEQ ID NO: 443385 - DNA, 457 bp, Homo Sapiens
tttttttatattccagtaaaactttatttagataaataaggagctagacagattttgcccatggaccatagtttgatcatggccaacctatgatctaaaccaaagtccctaggcaagttgcaatagaaaagttgtgtgagacagtgagattttgcctttgttattcaatggcaagctagcccatgctgacacagaaattggtcccttgttttttaaaatgctaaaatactgaacactggcttaatggttagctggcaggcattcaggaaattgctatcagaagatggaagaaataacttacacaagggtaatttatattatggaaaggtgaaactgccccttgagataacctgaaaggcagatcatctaccctttactaaagaaaaagacagaaaaacaaaatattttgtagttgctgttcactgcacttgacaaaacgtacagaagagatgaactc

SEQ ID NO: 443386 - DNA, 485 bp, Homo Sapiens
  misc_feature (394)..(394): n is a, c, g, or t
  misc_feature (417)..(417): n is a, c, g, or t
  misc_feature (430)..(430): n is a, c, g, or t
  misc_feature (484)..(484): n is a, c, g, or t
ccccaggaacaggcttccattgggaagaaggcaaagcttgtcaagaagcctcccaggtggcccttgaaatgaagaaggggatatgtttggtttacttaaagaaggattcataagtgatgatggctttccttgaggtttcatcttggtgctgctagagccactgctcagtccatgcttggttatgggagaggagcctggcttccccccagactgggatgaatttttggactggctagatccagaagacccctggctagaatacatactgctacttaacttggaacttgatgaaccttctgatttactgcttttcatcttccctgaggtggaagcagatgaggaagaggaggaagaatggctatggtggcttttgctgcctgaggaagacacaganccactgctggtatactgactgtnagaggaaggcttnccaccatcactgttcccttaggaatctgaatagtgatttggggatggggggggng

SEQ ID NO: 443387 - DNA, 1152 bp, Homo Sapiens
ttttttttgtgcttcttatgtttctctgtgctgtattctggaagtggtcggataccatcgtctgagctgggactattctgataagatttctctgctatggaggagcctgactcactttcactgtccagattctggggggtatatgctggtgacttactatggctgggagagccacgctcatgctttggagtggaaccactgatgagtggagagccatagtttttagaagaagccatttgaggcctaagcccttctccactactttccccaggtttctgcaaagtcactttggctttaatgctaggggagcctccatcatgcttactgatgataatttttgccacacctgtgctccccacattttttgactctgaggtcttcttagaagaatccactgaactcccggaggtggaaacctttgatttgtctttatcacttttctcacgcttgccctgaaactctcctcctgacatgttatgtttggaggacataggatggctggaagaatttgtgctcacccccatctggccgtccagtgggtcttcacccccagggccactggtgacaaccccatgcttcagtttatctatgacagctgtcaagggacggcttcttgtttctgcttggagatttttcctttagaactcccatgctggttctgagagggatgacatggaagagccacttgaggaaaaggaggaggaagatgccgtacaggaattagatgatgggggagttttctgggacaacgagcctgaggatcctaaccctgaagatgacttcatgccagagcttgaactagttccagacatatgagaaccaccagaacctgaactgataggggacttggctttagaggatggaggagtctccaggaacaggcttcatatggagaggcaagacttgtcagagcctcccaggtggccttgaatgagaacggggatatgtttcggtttacattaaagcaaggacttcatatagtgatgattggcttgtccttgaggttctcatctctggtgctcgctagagccactgctctgtccatgcttggttatgggagaggagcctggcttcccactcagactgggatgaatttttggactggctagatccagaagacccctggctagaatacatactgctacttaaccc

SEQ ID NO: 443388 - DNA, 814 bp, Homo Sapiens
  misc_feature (687)..(728): n is a, c, g, or t
caaattctcccagatcctgatcaggtacttctttatagcaacacaagaacagcctaacacacaggattaagttgattccaggtaaataaattaagagaagcaatgactcgctggagacagcagcaaattcagcccagttttattgcaaataaaacaagtcattcaagtgaattgtggaaattgagggtgcacgtgaaggggtggcaagggaacgggactcttgaagatggtcagtgtttccttggtttgaacttcaaagccacactgttgatgcaaaacctctgaccattgggcccaggtccatcaggaaacacgtgacctagatgagcttcacactgcttgcagacaacctctgtgcgagctgatcctaacgaggtatccagacgtctcaggatccctgtgtggctttcatcagagccagacgtaccatgagcctcggaaaacgaaggccacccagtgccagagcagtactttttctcagaactgaagagtggactgtcgcagcacacgcaatgatacattcctgcttccttgttattcaggtagatcccactgaaaggcggttccgttcccttttctcttgtgacgtagaactgctccggggttagtttcttttgccactcactcttggcaagaggcagctcacacgttgcaagagaccctgcctcccccagtcccggcccggtnnnnnnnnnnnnnnnnnnnnnnnnnnnnnnnnnnnnnnnnnnaggcgcagttccgagggtcaggccccggagcaaccagaggagccgcgccatgacgcccgctccggcgccgctccgccccctccgct

SEQ ID NO: 443389 - DNA, 448 bp, Homo Sapiens
  misc_feature (16)..(16): n is a, c, g, or t
  misc_feature (172)..(172): n is a, c, g, or t
  misc_feature (444)..(444): n is a, c, g, or t
ctggagattgtatttncccctccttttataccgtggcaatcagtataaatgcaaagccagtagagtgtcaaattatgcacattggaattgacatttgtcatcatattaaaattcctgtgtagccccatattgataggaatttaaccaggaagcttgtctcaggactggagtnacacatttaatcatataagcagacttgaggactggagaccctaaaactgcttgcttgcactggccatcatctcccatcagggtaggtggcagtcctttctcctaaggagttagtcttgtttatatgtattcaaggaaaaatacatcagtcccttggaactaaaaggcatgcagtcctgagtccccagataggtgaatattgtaacacatacctttcccgaaatatgtttctgggatgctgagcagagaatagtctccttgtgatgtggatgnccgg

SEQ ID NO: 443390 - DNA, 1138 bp, Homo Sapiens
  misc_feature (1103)..(1104): n is a, c, g, or t
aaccatttgctcagtagaagtttaatggagaaatcgttgtttaaaacaatcagtcaaaaagaacagctcttttacaaacaagttatggcagtggcaagtcaaaaccccaggttcaatttcctattcctttcacctgcccctagaaggggcaagaggcgggtgagcaggagagatggggctattgaaatggtagctagaggaattacaaaaatacactctgatgtagcaacagggttgtggtgaaacatgcccgggggctggggaggaacaatcagacgggaaggttctggaggcaaacgaagcctgcgggatctgcaggcgctcagtgccttggggaagaaggaatcctgattcccaggcggcaggtctggggctgagcacatgctgtttgggggatcacctggacgctcatgggttgcagtggccggtacagctgggaggagcgccccttccggctacacattaccattctggtgcagggtgcgccggcgctggctggactgcatgctcaggaccaagtattgcctcataaactcactgaaccgcttctgattggccaacttcctgggcgactttcggggcccggtgaaggccccgaatctgttctgcagctgcttgtgctccatctcaccagccttcttcatgccaggcttgggctcttgcttgtccttgaacaagctgcggactcggggcattcgccgcagatgctgcatctccgaagctctcggctggtagagagcagccgccacatgctctggggcggcagggctgagctgccaagagctcctggccatgaccttggtgcatggagtccagagggggctggggaagaccttctcttcacactcgaggatgcacacctccaggtcgaaagctgtcccagggctgggtggagcttctccctggcatgtgagacagtccctctgacaactgctgaacacactggagaagagactgagcagcagcaggtcacaaagcaggactttcatggtgcaggagcaggaagcacggtagctgagagctgtcagtcgccggctccctccgatggatgcgaggctcggttccgctttctcagccacaccagcatatatatcctctccccnnacgcacagccctccccttccctgcccacctccat

SEQ ID NO: 443391 - DNA, 448 bp, Homo Sapiens
  misc_feature (335)..(378): n is a, c, g, or t
cttaacagccataatttaaactagacagtatgggaacagctggagttagaaatcctagaaatcctgcttctgtaactgaccggtttacctctgacttgacttcaaacaggaagccctgaagattgaccttttcaagtacaacacttaaacaaagaactttccctctggaaggatttgtcggctacccttccaaaaacagacaggtgcggcctgacttcaagtgcaggccccgccctccctccggtgagtggccctagccctggaggcagctccatcagcctcagcatcccctcccggcgcccgcacgctcagaaaaaccacaggagcgggcgaannnnnnnnnnnnnnnnnnnnnnnnnnnnnnnnnnnnnnnnnnnntattttactccagcattcccttccacatttcgtattaaatacctgaaatatattaatcttaaaaaacaat

SEQ ID NO: 443392 - DNA, 325 bp, Homo Sapiens
  misc_feature (147)..(188): n is a, c, g, or t
  misc_feature (252)..(252): n is a, c, g, or t
  misc_feature (292)..(292): n is a, c, g, or t
  misc_feature (309)..(309): n is a, c, g, or t
tgaataaataagcatcaattttattgaatcatgaataatttaagactggtacaatcatcagctttattctctatgacatggggcatgatgtccagcagatcattggcaaatccaaaaacctcatgacaaatgaaaattaaataggtnnnnnnnnnnnnnnnnnnnnnnnnnnnnnnnnnnnnnnnnnntggaaacataccgtacacaaaatactcaattcctagttttctctttaaaaatggctagaaaaanttcatcaaaatgcagcactttaatcaattatttacaattnctatgttacaatgaaanaatgtacatcttatag

SEQ ID NO: 443393 - DNA, 303 bp, Homo Sapiens
  misc_feature (285)..(285): n is a, c, g, or t
attttaaaccactttttagtgtcatataacctcacatacagaaaagtacataaatataaatatataacttaacaaagttcttacaagatcaacacacgtttagctatcacccatgtcatgggagcattgccagcatctcagaagctctttgcattcctcttcccagtcacagttaccttttattctctaaaggtagccattgttttgcctgggtaatcataatctctttttttaaagttttgccataatatctttcggcttaatatcatagtttgggggcagggnaaggttaaaaaataccta

SEQ ID NO: 443394 - DNA, 2863 bp, Homo Sapiens
  misc_feature (232)..(240): n is a, c, g, or t
  misc_feature (316)..(325): n is a, c, g, or t
  misc_feature (374)..(484): n is a, c, g, or t
  misc_feature (1914)..(1924): n is a, c, g, or t
  misc_feature (2070)..(2070): n is a, c, g, or t
cccaaggcgccccaggtctcgcttccgcccggcgatttcggttttaccaaccccgtttgggagggtttccccgttccccggaagggttatgtatttccccccttcttcggataggggccgggcggggggttaatttaatttgagtccccttgggatcccttttgaaaatacccaaaaagacccccagaatccctttcggattttttcaaaccccccggttccccccgggggnnnnnnnnngtggggatcccaccccttgttcttgtcccggttttttttggaaccaccttggcccagtttcctttccttttggggnnnnnnnnnnaaaaaaaggtttttaaaaattttttgggggcggggggggcggccagggnnnnnnnnnnnnnnnnnnnnnnnnnnnnnnnnnnnnnnnnnnnnnnnnnnnnnnnnnnnnnnnnnnnnnnnnnnnnnnnnnnnnnnnnnnnnnnnnnnnnnnnnnnnnnnnccttttaaagttttattaaagtttaatggtacaatattttatctctttttttgttaatgccagtacaaaaatacagttgatgacttgacaaaatggctacacctagggcttgaaggtttgagtttctccaacagtaacaagggaaagcatgcttccacctggagccgagtccaagcacacagccagtcctgcacacgcatgcgtgcaaacagggaagctcaagcatgagaagaggaaagaggctgtagaaatttgggaagaagcccacaattattcccaggagaaaaaagggaaaaaacaggctgatatccttggtagggggtagaataactgatttacacttaggatttattgttattgttgttgttgttgttttttaatgataagctacttctgcaattttaacgttgtagaaaagatgctactagtctcctttcaccactaaggtgagtaaagtgggaggaaatgggaaaagactcaaatacttaagtgcgaggagtaaacatccaagtggctcaagttttgtgtcagaaggtttcattctttacattcaatgacaagttgacatttaggtgagagggaaaaggagaagaaagtctgccactctccgctggatccacaaacatgcagaccagcttctgttagcagaactcttccacagtgagagcgctccttccagtgtaggtaggaatgaggtttcctggtcggcttaattgttctagatgattcctcaatattcccttccctgctgctttccttccagaacactaactctgatgaaagaaggggcacattcatgttacaattcatcttcaagatgtttctttctgaaggcatcacccgtcagcctttcctgagcttccttcatcccctgaacaacttgctcggcactgacataaaaatacttgtagctggggtttccattctcattgatgatttcaggatgcaccttgccactgggatccagaaaaaggattcgtggaatataacccccgtcagggctgaaatcttcatctttgggttcctcttcatcctcaagatttaccataacaaaattatgggagagttctgaaatttccgtagattctgcaaatttgggctttagagctttgcaagctccacaccaggatttatgaataatcaccatcaggggcagtccactggcagctgcttctttcttcccatcttccagtgtcctccaatgaatatgatctccaaaaccctttccaagcccattatgtccatcagaagagatgacgaggagcaggaaactgaagcccagcaaacaggtggccccgagacgaggccgcgtctccatggcagtaggtgcgcggggccacggggctgagcggacgcagggccggagtcccagcagacggtccacacagttcgccgagcgccgctcagcacaacacctctacttcccagannnnnnnnnnncaaactctgaaggaagtgatgttagacggatgtgggtggtgcctccggggtccggtttgggatggagtgagcttaaaggtgcagatcacgtagaagggtacgagagctgttctcgagcgcgagttgcttttcgtggattctgggtngtccaggtcccgggacggagcgggaatatgtaggccaagatagtcggggcgggggagaggttcgggagaaccgttgctcctcgcgtccgccacccagtccagcccctccccccaagaaccgctgcacttcctagtcaaaagcaaattattgattcgtgaggtcagtcgctcccaacagtgggcggattgcccactggcctcggattctccttacccctccacaaatcaagactggacaactggattttcattgttaggttcctgcgagggtctctgaggagacctggcaagcctgttctgcggtgcgtgggctcgtgccgtgcagacatgcactttcccgctggagaagctctgtaccttatttttccttgcaaccgcaaatcttctactcagggatgatgcaaccaactgatgcaagctccaagaaaaccaaacttgggacctcttattgcaaaactgacttaggtggacttaggacaccaggatataagtcactgcaggctaaagtgtaaagcttctggttatttttcttgtagcttgaggatttcttcccaatttttccccttcgctgtataacaaacaggtgaaaatgtccggtctttttcttcctggtactagttgagtcctaaagtccgtacttaatgcatagcgaaaaagcgacctaacaaaagtacacacccaaataaaaacataccgaccacccttttattaggttccctaaaattgtaggcagggacacaatagaacgctcgggagactgcaatccccaggatgccgcgcggccccctccgct

SEQ ID NO: 443395 - DNA, 445 bp, Homo Sapiens
  misc_feature (2)..(2): n is a, c, g, or t
  misc_feature (93)..(95): n is a, c, g, or t
  misc_feature (215)..(215): n is a, c, g, or t
tnatagtcacttccaagcatcacacactgggtgccagagccctttatgttcagcccagcgtcacactcctcagagccccttcaccaatcatgnnncagctgctggcaggaagactcttcgcagctgcatggggctggagtggtttccagagctctatcctggttaccttggactaggggtgttgccagggaagcctcagtgttggaatgcaatgncccagaagccacaacttatcagtccccagggggaaagactctcgcaagtttctttgttggaacgaagctcaactcatataaggagtttggaaccccctaccggacttacaacctccaacttctctctaatgaggctcttgggagctgtacaaaaaggctggatcaggtgcaacaccaccataaggaagagtggattcggtggcatcacgatgctcttcacaggatacttc

SEQ ID NO: 443396 - DNA, 231 bp, Homo Sapiens
gatacttcgtcctgtgttgtagctggagtttcagacgtctgaaaaaattgtgccgacccctgccctggaagagcacagtacctccatgcattggtgtggcgaagacgactggggattgccgctctaaaacatgtttggattaggaagcacgtttaagtaggagaagccttcgtgacttctctctagtgccttcgtgaccctgtgttgcccactgaattgccctgtggaacc

SEQ ID NO: 443397 - DNA, 810 bp, Homo Sapiens
  misc_feature (313)..(336): n is a, c, g, or t
ttttttttactgaatcaagaaactctcagatgcaagtcaaaaagcagaaaatatttttacaatattaaaaagtcatctgtagttaggttcggcatattaatgagatcctgagcactgagcatttatggacaatatggccttcgtttgatgcataaaaaggaaattcaacacaaacacgttgttaaaaccgtgccagaagatgcgctagagttttctctcattttaattacaatcagtgccagtatctgtattacctgtgaaggcctccaagaaagggtcatggaagcttattgggaataatcctctcaattannnnnnnnnnnnnnnnnnnnnnnntcagatcattgtggtttagaaatagatatttgcatggaaaagtttttatctcttctgtttcctctcctgtaagtaaagatttgcaattgtaatgatcacccacgggcctattgacagtggattctggtgccgatcatcttattgggaagcctggggtggggggttttctgatttggtctcttgagtggcgggaggtttactgttccacgggctgttgttccccagcgcgggtgaattgttgaagtcctcctcgtcgtccatgccgattggccgcatcatattgcgtgttttctaatcctagtgattagcctttcgtccgtcgtccccaaactcacctcccatcagagttggctctcctaccaccatcacatcctgtgaacagcagctgacattattacagggaaaccttgggagagagaagctcagcttaaaataacagtgggaggagtcggggaatctaggacagacacactc

SEQ ID NO: 443398 - DNA, 394 bp, Homo Sapiens
attttctttctaagctgagagttttcactgaagggaagaaactgattttacaattaattaagagatgaaaaacctatagcttagcagttaaacacctgggtcctagacccagataggcctgagtttgagcccaagtcacctgcaagctgaatgttcttgatcgttatttaaactctcttagcctcaggtcccccatcttcaagtggagaagacttcctgccatagtacacaccacagcagatcaccaaatgtttccagctctctgctgctgtggacacttcctggcttactgatttgtgagtgagtggggccatgtgattggttctagccagtgagttgtatgcaaaatgaagcaaatcacttgcactccaaacacttaactggcagctcaaga

SEQ ID NO: 443399 - DNA, 468 bp, Homo Sapiens
ttggtttttctaataaacatttatttcaagtgttatttgttaaacatttaattgttgagatttgaaaatgaacattattatttattagacacattttataggctcattcaaaattcttaacttttgagttcctgctttcttcacagcagtgcactcactactttctggtatacaagaagaacagcttgtccccactcttacagtgtaatgaaattagcagtataatgaagaaaagtgctgtgtaggaatgactgagctctaagacaaactggtaagaacaattaggtactaaacaatgggagtactagggagaagattcattttgagtgggagatgttggaacactttggaaataacactgaatttgggttctgaaagatggatataattttgatatgcaaagttatgaggaaagagttactgtataatccagccattctccctaggaatatacatcccagagaaatg

SEQ ID NO: 443400 - DNA, 304 bp, Homo Sapiens
  misc_feature (217)..(225): n is a, c, g, or t
ggaagggttctccttgagtgctgcatcatctgtcttagatcccgatttccccataatcatgtttattatcctttccaggttgaagattattctctcttctaaagaaaatagaagaatattaggagaaaagacacttgaaaatgttcactcttttattcacattacatcatctgtcttgaataatgggtctatctctttcctgttgctctggccctgnnnnnnnnnttagctttttaaggctgcttttgttacgtgtgcattttcttgtaatcccgtcattctgggatttaataataatagtatt

SEQ ID NO: 443401 - DNA, 570 bp, Homo Sapiens
  misc_feature (503)..(519): n is a, c, g, or t
tcatgactcagatgatgacctatgagtcatgggtatccaatttataggaagccaagcttggagggagatctgaagcattccattacccaatcccgaaattccaaatgtagcccacaggttaggatgatgggcccaagcctagatgagaatgcaaagagaccaatgcccatcattcattatgttcttaaaatgcaggtgcacaaatgcagaagagggagccccggcccccattgcatttcatgccaaagagatctgcaggtctgaaatgatccccagcccagtgtgcttcattagtatgaggcggtcttccctacacagctgccaaacttaggctacaccagaggatggagtaataagagcccccatatgccttgcctcagccataatagctcgtatttattgcgtgcctattatactagatgctgctactccgctgtgtttacaggaatgatctcaattatcttaatacccgggggtgtatccgctttctttttcttatttcnnnnnnnnnnnnnnnnnatgagacaggtcttcctctgttgcatccttacatcccgcccgtaccagctt

SEQ ID NO: 443402 - DNA, 1035 bp, Homo Sapiens
ctcttatttaatattctattgctcctccttgtacatatcatatcgccaactccaagcctgtaacaagtattgaacaactccaaccctattaacaaccgtccggaaccaaacagaccgtaaaactgcaaactctccatcacaagaggagccccgaaccaccggtcgcccggtcacgctctcaagaagtcatctcttacagtttgtcaccaactgcgtcacactgtgccacacacggtgctgttaacatgtaactaattaggatgtaacttatctgaactaatttatagaagtaaaattcaggcctcagtcacactcagccccagtgccacatgtcaaggctctgggccaccgggctgtgctccataagacagcgctgaatgccgatctcaaaaaccagtgggggtatgggtccttcacccagagaacaagtgctccagcctttcctccgggtttgtaacctgagcagattgcagggaaggtgatgattcactcctggataggtgaggagaacgtggcacatggggaaaggcgtggaaacaggtcttcttcaggcctcggttcaatctaattccagctctgttaggagaccatctgcgtaatcatggacaaaattctcaattctgtgggcctcagtttccctgcttgccaagttcagagcctttcaggaagtcgtccaccgaggcgcccctcctcttgaagtctggagagtcataggcgtcctcctcgtctgaggcggcgtactgccccgcgctgcttctctctaggaagacgctccttttctctaacctgctgctctcgccaccctctgcgcggcctcccgggccatggccttggcgacggtggtggacaccggggtgccctgtggctgtggcaggatgcggggcccacgggcggctccagcatgtgcccatgcacagggccaggtgcacaggcttctgctcccaggcctcatccatcctggcgtggggaccctcgtgccgaattcccacccagcctcgtaccttagaccgttatatattgcctcttataaccagg

SEQ ID NO: 443403 - DNA, 1312 bp, Homo Sapiens
  misc_feature (1099)..(1135): n is a, c, g, or t
gggaacaggaactgtttagggcagtaattgtttggtccataattatgctaagtaagtttttccgctccatcccgtttatgggacgaccatattatgacataccaaacaggcacaatcattcacttataaccaaaagggagtaagacacccatttcagactgaccatttgtgtataaccccaagggtcaaccacacaaactaataaggctatatatacagctatgcagcaataaaatggtcaaacactgctgatcctaaaagtgagcaccaatatatacatctgaatatagaaaaaccattgaaaccaaacacatatgggttagttaaaaggtgccattccaaggctatacataatcacaggaaaaagtatttacactgcttggaaaacagctgcaacaaagagtttattgccaatgccctttataaacttctctcctatgtttaaatacagatgttacgctcactatctatgtgaaccacacatcttatttctggccctttataagatccctgctcaagaatttcaagcaaatatgttctatggcttcacccacacatctattctcatagctttcaaattataaatatcacaatgaactagagctgtagcttaaaacatctagcctaggtctagaaagtaaaataagtattttaaagtatcctttttacttagtttagtaagtatactgtgaaattcagagttctgagtaaaatatatttatcctaaagtagcagagtcagtgtgtacttgaagaaacagtgaccacagcaatgcagttctttggtgatgtgcccactctctgaattacaggaccagatgcgtctcagtccgtcacctcagacacatgactcggggctgaagagtggggaagggccctgggtcccagccacatgctatcaccaatgttgctaagcactgcttttaagactcccagggcactgcatgaaaaaacagcaactggccccttccataatcagcaatttgcaatatacagtgtcctacaagatagaatgccacaacagatgattatctggtcaaaaacagtctttgtacaggaataggttaaagcaagagttctttgattattgttttggcagnnnnnnnnnnnnnnnnnnnnnnnnnnnnnnnnnnnnnttacgaagcaggctttgtgcatttttgtttgctgtatgtgtgaattttacccttttatgtatattttttcatcagccaatttcaaagctagctgagccaaagaatataactgaatgaaaataacaaaagagataatctaattaccaaactcctaaaaaccaaattccagtaggtttt

SEQ ID NO: 443404 - DNA, 773 bp, Homo Sapiens
  misc_feature (15)..(15): n is a, c, g, or t
  misc_feature (715)..(715): n is a, c, g, or t
ttagaaattgcaagnaaaagagcccagcaaattccctccatgaaagagagttggtaaatgttgaatctgaccaagcatgtctctctagcaaaatagaaatctcaaatcctctctgagatatttttgaaagttggataaagtggcaactagagcactcactgggagaggagagtgtaaataaataaagttggtttgaacctggcatgttaattaagggcaaatgattcctgatttatttctagccggtgcttctatggcagtatgatatgattttcaaccctaatagctgacaggttggttaagaactgtggaaatcacttccgagactgactgagcacataaattccctggcatggttttgggtaattggcttctgcacagcagaagaatatgaatgagtagtcatatcaggataggtgatcgatttgattatttggatactttacatttcaagctgactgaaccaatatcgctattcttaaacatcattagtaaaatctgatttatttgccaactgaaataagcttaatataaattcctgctgtagaagatcacctctattgtgtttttaaaattttttggtgattatagtgtttctgagatacagtctctgagtttaaaagtaaaccaaggctgggcatggtggctcacgcctgtaatcccaacactttgaaaggccaaggtgggaggatagcttgagcccaggagttcgagnccagcctgggcaagcacggtgagtctcctgtctctgtaaaaataaaaacaaatttaaa

SEQ ID NO: 443405 - DNA, 1050 bp, Homo Sapiens
ggagtcctggtttttgcttcatttccttcaccaccattatccaaagattgtattgagcagaattttttagacaacttccctagcagtgacaccctgtccttcattgcaaggatattcctgctgttccagatgatgactgtatacccactcttaggctacctggctcgtgtccagcttttgggccatatcttcggtgacatttatcctagcattttccatgtgctgattcttaatctaattattgtgggagctggagtgatcatggcctgtttctacccaaacataggagggatcataagatattcaggagcagcatgtggactggcctttgtattcatatacccatctctcatctatataatttccctccaccaagaagagcgtctgacatggcctaaattaatcttccacgttttcctcatcattttgggcgtggctaacctgattgttcagttttttatgtgaaaatacctcaactggtttttttcaagagctctcctgatattttgagccttgacaacagttctatataaattcacttgtaaatgctgctgttgtgtaattctaaatattttctaagataatttgaaagcaagggaaatagtggccccttaatgagtattatattggggtggggaaaggggcaaaaagaaatgatcttagttgtctttacctttctcatattaactcacctctttatttcttgtggtcttttctgaatagaaatgtatgccctaggaagaaatcatgctgggttttgcttttagagataaaaggtggtggatttattttgcctgcagtaaagattctcagggtgtcagagcagcatattgtcaaatcctgcttctgttttatgtttcagtgtattcactttcattttcttacttactagaccatttctgcagtttgcccaaacctctactgtttgggacagtaagccaaatacctcatttttaaaaagaagttttcatggcatcagtgttaataaagtacatttttactgagtcttaatctctatttgaagaaaagtagagacaaaagtaatgtcat

SEQ ID NO: 443406 - DNA, 404 bp, Homo Sapiens
  misc_feature (18)..(18): n is a, c, g, or t
  misc_feature (32)..(32): n is a, c, g, or t
  misc_feature (40)..(40): n is a, c, g, or t
ccagggacaaatcagggnaaataccccagaancccagtantggacagacctccatgcctggaggaggagccacctctgagagcaggaggagctgcccgaacccttcctcacagcctccttttcctgctctcgacacctccagcttgcagatagacagccccagcaccggcagaatgaaaaggtcctgaggcagcagggctgtggctctggtaaataaaagaggcctctctttagtaaggtagaggagctcagactgcacaccctggtctctgacaccaaggctcgctccatgcccaggactaggggcagcgtgggagctgctggctggggccatgctcgcaacctcttctctgccacgtctatctccagcgatgctctcagctccagggctgagcccagtggct

SEQ ID NO: 443407 - DNA, 773 bp, Homo Sapiens
  misc_feature (643)..(678): n is a, c, g, or t
  misc_feature (709)..(709): n is a, c, g, or t
  misc_feature (727)..(727): n is a, c, g, or t
gtaagggaaagaagttttattttcaagcttttaagagaatattacaaacaacagagagttttaaaaaaccctaaaaactagtttaaaaaagtacttgacagtgtccttttaatacccatggatgacgcgaccactgtgcagtgacaaccagaaactttgcaggtgaacacccagtggccttccctggcagggtccccagagcgagcaggaggggtccaggggtagtgctccctgccaggcacccttgggcccacctggctacgcgggaaggagcagggagcacaaagcactgagcatcagcctgactgcctctttggggagggttccaaacagggagggttccaagcagcaaggaatacttagattgggctccactccactccttggggcacactggtcaagctcctcccaaccactgcagctgctctcttggaagcccgtaggtcaggggtgccctaccgtgaggggactgggtctgtgcatgtgccaagacaagaaggggctggcattgcacatgtcctggccatggtggggttgggtagttgggaaagttgctccgggattgacagcttccaaagctgaagccacagcagcagaactgtgcttgaaatatccactggaaatctgtacttttctctagggnnnnnnnnnnnnnnnnnnnnnnnnnnnnnnnnnnnncctgtaaacatctttgaaccaaatcactatnaaataaattaacaagggnacagaaggacacccttttccaaacctaagccctcttttagcccacc

SEQ ID NO: 443408 - DNA, 1808 bp, Homo Sapiens
  misc_feature (6)..(6): n is a, c, g, or t
tgtccnagtaatgccaacttggaggtgaagggctgactggggcagctgagaagtgggaccttctgtttggcaggcttcctctccctttgcctggtcatggttttctggtgagaagagtgttcctggccttgctggaggttcccatggccccgaactaacagtgtttttctgaaatttcgacctgctccgtttgagagagtagaattccctcatcaagtcctccacctcccactgctcttccttcagcctctggcagcagtgcagggcggcagggtcgatggggtgagcttctgtgttgaagatgtaccccccagcccccaggatgcactccccatagggggtgatcaccgcgtcgaaggtggacccattgttgtggatgaagttggttgggtcaaacaggaggtagaggtatttcacagtctcggccaggaagaacgactccatgcggttgtccagcttgtggtctcgcagatctttgattgttgcaaatccgcactccaccttgctgattttttcaatggattccacagcatctcttccgagttctaggagggtgggatcccccgtggcacggtagaggtacattgcgctttcaataagttctggccgaagtgggtagccctctcgcttctcccctgtgtatccctgaggaatgttgtagaattccgggagccccccaaactgcttccatacagtgtagtagttgaggaaggtcctcatggcattgtcaatgtctccaatgaggctctgaagaccaggccagtaggcctccaaggactggaagactggcatggacacagtccccttgtacatctgaacccacaggtaccagtcatcgaagcgggtgtagttccggatggctttgttatactctaggaacatggccatgagcttcttatcctgaagcaggatggctcctttcaccaagtactcaaagtaggagtccacgccagccccgatgcctgcgtcctgggccacccacttgccagtgagcacatcaatgtggttgccgaccagcccgatatctgaccggctctcccagaggcgcatcaaagccactctggccacatcttcgaacaccgggtcaccagtgaggctgctcagggtggcaaattcaacaatgaaggtcccaatccctgccgtacaggtgacaggggtctctcctgggttcacgccatgaagtaagttcactgttccatatggcatgccagtgggggtctgaaaggctgggaggagttttcgggccgcctcctcagccattctcaggagaggcccggaacagggccatccagcctctacttccaccccagccttcttggagagcagatgagcagacaggagtcctcctaccactcgaatgtttgtttcaaacacagaggcgttcacatcaatatcaaagtccacgctgtcctggagcacttcaaccactctttggaattctgagacattccccaaaatcagcaaggtgtccagtgcatcaattagagtcagagaaaaactgccccaggtgtcgtgcccgtcacaggtgagaggtcgcagctcatcgaagggaaaggcattctccaggtagctgtcgtaggcgtggtagaacatggccttgactcgctccctgtagtgggcgggatctggcgcggagccgtcgggacctggcgcaccatggtgctgaggcagcagcgcgcacaggaggccgagcgggatgagcagccggaaaggcatagagctcgtgtcctctcagcgcccccgcagcagcagcagccactgcaaccagttcatcctgggagctgctgcgggttcttccatcccggaaa

SEQ ID NO: 443409 - DNA, 400 bp, Homo Sapiens
  misc_feature (3)..(3): n is a, c, g, or t
  misc_feature (6)..(6): n is a, c, g, or t
  misc_feature (130)..(130): n is a, c, g, or t
  misc_feature (142)..(142): n is a, c, g, or t
  misc_feature (152)..(153): n is a, c, g, or t
  misc_feature (157)..(157): n is a, c, g, or t
  misc_feature (168)..(168): n is a, c, g, or t
  misc_feature (199)..(199): n is a, c, g, or t
  misc_feature (233)..(233): n is a, c, g, or t
  misc_feature (241)..(241): n is a, c, g, or t
  misc_feature (254)..(254): n is a, c, g, or t
  misc_feature (258)..(258): n is a, c, g, or t
  misc_feature (284)..(284): n is a, c, g, or t
  misc_feature (340)..(340): n is a, c, g, or t
  misc_feature (359)..(359): n is a, c, g, or t
  misc_feature (361)..(361): n is a, c, g, or t
  misc_feature (376)..(376): n is a, c, g, or t
  misc_feature (381)..(381): n is a, c, g, or t
  misc_feature (387)..(387): n is a, c, g, or t
aanaanaagcattttgatactttctttcaattatggagatctctgaggaaaacactcctgttttctgacctcaaattttaccacttgtcaatttggtatctagagctagcattatgatgggaacttacantgtacagcagcncttatgtttnnactnccgagctacanggtaagcttgaatggggagcagaagactgcnccctacatgtacattggcagcagcccagcagcanctgatggncagaggtgctggngctncagagaagcaggctctatcaagttgngcttattgatatgtcctgttgagctttatcttagcgatctaattgtgcttaggtcncagttccctaggagcaggncnctgaggaaaatagangtaantgcacnatgatgtactgag

SEQ ID NO: 443410 - DNA, 667 bp, Homo Sapiens
  misc_feature (163)..(163): n is a, c, g, or t
  misc_feature (171)..(171): n is a, c, g, or t
  misc_feature (288)..(288): n is a, c, g, or t
  misc_feature (540)..(540): n is a, c, g, or t
  misc_feature (549)..(549): n is a, c, g, or t
  misc_feature (610)..(610): n is a, c, g, or t
  misc_feature (618)..(618): n is a, c, g, or t
  misc_feature (626)..(626): n is a, c, g, or t
  misc_feature (635)..(635): n is a, c, g, or t
aattttagaaggaaaaaatttattcagatgatgtgatagccatgtcactgttaagcctgaacttttctttcctgggtggtgtgaaaggtgcaagaaaacacaagctgcttttaataacactcttgcactgctttctccccaaagctagatatatcaaaacatngaaaaatnaaaaagctttttaaggtgtaaggagcaaatggaatagtggataaagccttttcatctgtttagtcattttacacccaagtttctctggagtatttgcctggaagtttctaatcaaanaccattagactttgagtttcacaaactcctcttgaagctcttccagtgaggcctgcacatcggtatgaaacacattctttccaaaagctaccactggtagattttaagaacaagctcaggagcacatcactcaaaataattccaagtatttcactttttcccttcaaataacactcatgaatctggtccttgaaagactagccaagaaaattagacatttttagcattagtttgctcatacatacatttgcnatattttangggtggaattttggcagtttggttggaggtattcatatgacggcgaatggtgttgccatgncattcagngcaagganttaagctcnggggtaaccccgtgaaatttaccttggaatgt

SEQ ID NO: 443411 - DNA, 794 bp, Homo Sapiens
aggagaaatgtcctcttgtggagcattctcagcacctcagaagcacaagcaggggggtcttcccagcccctccaggctccaaattcagtcaccctctcatgcttcctgccacagctggagccagaggccagcagtgcaaagatgcaacaagatgcaacacggcgcagtctttcccatgccctgaggccgagcagctcccagagaggagaggagggccttcagccttcccccctagaaaggccatgagccactcagaaccccagccctcaggccactttattgctcaagagtggtcagtctggggtatctgcatgcctgaactccatgatgatgtcgcctgtgtcggggtgaaactccactgcatagctgacagtccgtgggccacccagcagtgctctgggatctggggcagggctgaagaagtagacggcctgcttgcagtgggggttccagcagcagcccccctcggggtctgcaggctccaggaggccagtgctgagcgtgcactccggggtcaggtggtactccatccatagcaccgctgcgtggctctgcccgggccttctgagctccacagtgccctcggcacacaggggctgcaggggcaccggctgctggaagtcaaaggtcaggatctgccagggctcggagaggctgcggcatgggtactcccacagcgggtggggctcagcttccctgctctccctgaagtccagggcacgctgcgaacagaagggggcctgggggctgcagagacagccggcagctagacagagtaccgctccccggcttgc

SEQ ID NO: 443412 - DNA, 474 bp, Homo Sapiens
gaagttgacttaactttattcacatgatagctataagggctgacaaagacttcctctaacattccttctggcaggttgaattagagtttggttgcagaccgtgtgggttgaagggatgtgtggtgagacagatcaggggcttgtaacaatcctacatcatcatgaatccagtttaattttaactttgtggcttgtctaacacattttcagttaagagttggggaataaatctaccgttccctggcaaacacttggcagcccttgggagcagcatctttggagaacacataatcaatcctagcactacagcatagcagatattgtgagtgcaggtcacaggtgccctcggatggagaatggcatcctgtgacaatgacagcagtggggtctcagggcatagagcaggcagctccggagcatctcagtcaatcccaggaccatggcatggcctctcagtactgataggacctcaca

SEQ ID NO: 443413 - DNA, 756 bp, Homo Sapiens
  misc_feature (11)..(11): n is a, c, g, or t
  misc_feature (628)..(629): n is a, c, g, or t
  misc_feature (631)..(633): n is a, c, g, or t
  misc_feature (693)..(693): n is a, c, g, or t
  misc_feature (741)..(741): n is a, c, g, or t
ttgtacacttnaattttgcaaatttcatacaaacataacaatactgctccatataaacttttgtataaacattaaaggaaatatacacatattttgttcttcttgtgcttccaaagcacagaatgtataagtccatctgaagactttctatcatcacatgcaagaacaaatgtcagaggttgggggcagcctcaagtgcactttgtaatgtctctagacaaaagagaagagagttggaggtagattgtttggtgactctccctgccccttcccacagagaaataagttacccaaatagcagcttcttacttctttgattcaaactatcctgaatattgcatggtttaaaaggcacaactaggaattgttgaaaactttgttcagcacacataagattgccatttcctttctgtacacctattctttctgaaggacacagtaagagcaccaagttgtgctccacttgcaggtggcccctcgccactctgagaatgcctggaatggcaaagttcaagtgagtgacctctcattacccgtggtaggggcagtggtgtttaccgaatttagcctgtgaattaataacatcagcttcctcaattgaggaaaacaaaacaaaacaattcatacnntnnnaaattattaaggcaaaagcccagctttcactgccagataatcataaaattcaaaagcccnactgctgcttcttagcatctggaaagcaattcccttgactcaaacatnccaggaggcttcaac

SEQ ID NO: 443414 - DNA, 326 bp, Homo Sapiens
  misc_feature (295)..(295): n is a, c, g, or t
  misc_feature (297)..(298): n is a, c, g, or t
  misc_feature (300)..(300): n is a, c, g, or t
  misc_feature (306)..(306): n is a, c, g, or t
atttaagaactggaggtgtcagaacaaaatgccaacagtccccgacccagtggaggggccctggaatggattcccctgagacatctcatcaatggccagctcagttaagagacttctcagcaagtttcagcaagcaatgctgcaagcagcctctctaatcccatccagccccagggtggctgggaggatgacaggcaggaatgtgctttgcagtcctcactaccaccgattccccatcccctcctcacccagtaggccagtggttccgaaccagttgcagttttgacccaagggnannanttggcnatgtctagagacatttacgg

SEQ ID NO: 443415 - DNA, 1473 bp, Homo Sapiens
aaaagttttactgttaatcacagattcacaactagagatatcatttgcatatcttagaacgctaaagacctgttaaaattttttaaccaatcagccaaaatatgtgccccacagatttctaatgttcataatttagaatttatcacatataatatttattaatagtttatttgcaaaattattattcttaaaacacttctttccaacacatttacaatgttcatgtgttttaaagaaaaaaccaccctcatttaaaaatgtactactgactttaatgtgtggttataccagtgccaccaaattagaaaagaaaaagaaacatacagctgtattggatatgtagttactactacaaataatgacaacacacgtcctatacaaagatcatattcacgcttttctaccacttctcagtcattgtcagaaccatttggaggtaagaaaaccaatgcatcattgaaaatatgcccaaatgccctaaggcggtataccccatacatcatcacatgcatctgatttggagtcagtccattaaaagtaacagccatatctgaacaacagccttctactacctggttggggtgataagtcattgcctctttaatagaaagccccaacagatttggtattaaatacatcttttccatcagcatcttctgcattttctgcaaatactccagcatatttcaggcaaactgctagctgtttatcttcagatatcttccaaatcatccctccctgttcaggacacttttctgggatattgagaaggctgttaagtcttttcattgattctacacttaagacaattcctccttccatacccacatattcaaggtctccagattttatagtgtggcctagatagaaaggctgtgatggatccttttttaacaaaaaatactttaggttttcaatgatagcaaacgtagtggggcgtgcaaggaagaaccagttgtattggtctctatacttatcaaaggcgtatttgtaagcttttctcatcattaaccacatgtcatttgtgtccatattaattgactcaaacactttaacattttcagaactgaagaactctgctttgtcacagtgtttggtccaagtctcctttactgcagcccaaagactcacatctttgggttttacaaggataatacagtatactcgaaagctcttactgagctccatgcgctcatcctctgaaattttcaagatatcttctttgttaggagcttgtaggtgatgatgctcatggtggtgcattctatttccatgaccaatcctaatgtgtcctagcatagtgatcaaagcacagaaaatgcttccaagcatcacacccttcaaaaaggagctgctttcagaaagcatttttcccgcgtctagaacggcttggggacaggaaagcgcagccgcgcacgggtttcctctcacgttggcgcaccactccgttacgctcctgaccaggctgttcta

SEQ ID NO: 443416 - DNA, 669 bp, Homo Sapiens
  misc_feature (57)..(57): n is a, c, g, or t
  misc_feature (128)..(128): n is a, c, g, or t
  misc_feature (140)..(140): n is a, c, g, or t
  misc_feature (168)..(168): n is a, c, g, or t
  misc_feature (189)..(189): n is a, c, g, or t
  misc_feature (212)..(212): n is a, c, g, or t
  misc_feature (306)..(306): n is a, c, g, or t
gactagggaaaagagggtgcagggcacggctgctccccaccaccaggtctgcatttnttcatcatcatcaggagcagaggtgaccagagggttcagagtgggaggcggggccagcccaggccaggagngcctcagtcttnccagggctcaggccacccagggtaaaangtgccagggaaattggtgggnacctgagaggaggaacagatgtngaggacctgagggtgctcaaagggccaggctcagcctcaagcagtgttttcattgccaacacttactgtacccactccgcagagccccgctggngcctgggccccagggccacagctagcctgcaatgtgtgtactgcactttacagtttgcaaagctcttccatacccactctctcaccgaagcctaattgaggctcttggaaggagtcaggcaaggattgtgcttcccccattatacaggtgacaaaactgagtcctggggaaagtgactggtccgtggtagagccgggacccaatcccctctctctcctccctgttggtgctgttcttcctgcccaacacctgtttctcttttcctcaaggggtttggggcaggagcctgggcacttactccccgtttttgctgtttctccttctgaccctgctcttgggtctaataaccccatttatttgtaa

SEQ ID NO: 443417 - DNA, 877 bp, Homo Sapiens
tcccagagaactgtgggatctccacccgggttggtccccaggctttctcccaaccctgaagcccccagcaggggtgcagagggcagccccagatcgtgcagacatcacccgaggctcccaaactggcccagctgcctgaggcctgcatgcctgtggccaggtaggacacatgtgcaggtttgaaaactaggcctacaagactgaagagtggactgaagcaaaaaggggagaaacattagaggcctacagtaggaagagaccttttatagagttttcaggaaattctcacaataaacttgggcacaaagaccaaattgctgaggccagaagcctgcttatggtactgtgacttatggggagtagaggccaaatcagagagggctggctggtgataccccagaccacttgcctcttccccttccctggcctacaaataccaggcctcctggccctgagacctcattctgggtttctatatgggtcaaccaaatgccatcctttcactaaacccaggtgcaaaatggggggtgaaggggggaagctggggagtacacagcacccaaaagaaccgagagagcaagttttccaaggctacaggaacattggcagagctggtggccacaccagatgggagtaccacatccccaccaggcttcatgcttcactgctagatgcagggggctagaagggtctgatgaatcaggagctgaactagaaccttcaagaaaagaaaaggcaagggggtggctctgtgccccgccaggagaggaaagaagaatgtgtgtggattgtccacagtgaggccagaaacgatgagatggtgttaggcagaaaagaagggagagggcttcccatgagaatctggctgggcatggga

SEQ ID NO: 443418 - DNA, 288 bp, Homo Sapiens
  misc_feature (255)..(255): n is a, c, g, or t
  misc_feature (287)..(287): n is a, c, g, or t
attgtatcatcaaaataaataaaacagggtaataaaaataacaattagggtgactgatgtcagacactcatatcaactcatcattttcttgtagcctctgattctgtactttcttgtgtattattaaagaggtaaatgctctcttaaaatgcctctagttcctcagaggtaggaaaaataaactcaacctgctttggacttgtgtatttacttgggttggtttccagaatctccttattcctgaaacagtatgancatgtagttaaactactcctttatatctgtang

SEQ ID NO: 443419 - DNA, 2413 bp, Homo Sapiens
  misc_feature (1896)..(1943): n is a, c, g, or t
  misc_feature (2149)..(2195): n is a, c, g, or t
aaagtaagttccccccgttgccaaaattttgcaaatcccaggaagttcccccagctggaaggccaaccttccaggggggccggggaggaaaaccaattgttcacaagagacataaagcccccagaaggaccaggccagctgaggaaacccagtttgccaccgccactggaccccaggatacctaggcaagtacccttctcctcctgggaatctactgctaccaccctcgaaaggtatgacttttttggtctatgatctgaagaactcttttccccaaaggaagagttgcttctgagaagaggtggaatgagacaagttcaagtatgactaagaatcatgccaaagtccaaggtcagtgaagaacccatggcaaaaaaaatccagaaaagccaacatcttgctacttcaaccaactacctcattggacccaagagggtgtctacacaacatttcagggttcaaatcaggatgctgatcatgtccctacaaaccctgtagggtgactttcccaactagacggtgatcagcttatgccccgaagcaacagagacagacattgaaactgccaaagttcaaaaaataaggtggaaattgtgcttccttcaaaatgaattggcttcataactgccttttctcctggtccagcaacttctttctcccacgttgctgcaggtatttattgccttatgcttgaaatgaaaaggcgaactctgaggtgcaaggactgggcagtcccaagagggcaggggtctggaagtacagtagtcagcacatgctgtgctcccgtaatggcttggccttccttcagtcccgagaacctaccctgaggtccgtctgaagttcatttgcaagcctggtgaccactcactatctcactggggcagcatgacagaatgaggtcttcagtattgcacaggtatgaaatgtccatgagtcttaaaaacaaaaatcacagttgctcttggggctgggccgattcctccatcccagttttagcaggatgtggccgttgccacagggcttctgctgagctctgagactgttgagtgggtaggcaccggtgccagcaccgaggcagggaatgtgcagtaggcaccctgcatgtcagggctcagtgtctgcaaatggcctatcagtgaagagcctgctgcgctccccttggcaggagggaggctgggggttgggcgtggaggccaggatctcagattcgtactgcaggagctggcccatgaagccaaagttgggcgagaccatgctcctcctctgcttgatgtaatcgaaggcctccttcaggcggaactgcttggtcttcataaggtaagccatgcagatggtgggtgaacgggagatcccagcctcacagtggaccaggaccttgcctcccttttccctgacacagtcaatgaagtctattgcttcttgaaagtgggagctaatgtcagccgtgtggctgtcttccacagggatccatttgtagtgtaggtgggtcatgcaggcctcggaggtccgtcgggagacattcagcagggctgtgatgtgcaggttggcgaggaactcgcacttggatgcatggtaggcacttccaaggtagaggaagggaaggatttcaactgggccaccctggtcataagctggcctgtagctgacatttaccactggttttccacactggctgatgagggctctctcactctcaatcttctcttgtgaaatgggttttacatccacgcaacactcaggatattccgagtagaaagtctcatatccccctttgaggaagtagacccgcgggccggcgggtaggcaagcgagtagcgaggtgaggacgacacgcgcggcgctctcctctcgcagcttctgccagtggcggctgccctggtccagcaccaccacggnnnnnnnnnnnnnnnnnnnnnnnnnnnnnnnnnnnnnnnnnnnnnnnncgtcgggcagcacgtagcgcgccgacaccgcgccgccccgggcccgcggcagcaccaccgagttgaggttgacgttgagcgagccgcgcacgttcgaggcagcgaaggccagatagggccggcagtcgagcaccacgcagcgcgccgccgcctccttgcggagcatcttgcgcagctggcgcccgtcgagcgacgtgaccttcatnnnnnnnnnnnnnnnnnnnnnnnnnnnnnnnnnnnnnnnnnnnnnnntgcccacggccagggtgtccacggccagggtgtccgcgggcgaggcacgggagggcgacccgcggggctgcggccgcgacggagcccggcgcccgagcggcggcgcaactccgcgttcccgccccgctcgctcgatagccagcccggccgctcctcgtgccgaattcgccacccaggcctcgctgcgttagtattttgggaactgcagacgggggggg

SEQ ID NO: 443420 - DNA, 490 bp, Homo Sapiens
  misc_feature (136)..(150): n is a, c, g, or t
ctccttttactatttttattttacactataaaaaacaagaacaacaacaacaaccagtaacatactgcttttcttcacattcacacgggtcttagaaaattattgccttttcccctggagaaataactaacagacnnnnnnnnnnnnnnngtagtaccacgttgcaaaatctgcaaatcccagaagtccacagcttgaagacaacctccaggggcagggaggaaaacaattgtcacaagagacataagcacacagaaggacaggcagctgaggaaaccagtttgcaccgccactgacccaggatacctagcaagtacccttctcctcctggaatctactgctaccacctcgaaggtatgacttttttggtctatgatctgaagaactcttttcccaaaggaagagttactctgagaagaggtggaatgagacaagttcaagtatgactaagaatcatgccaaagtccaaggtcagtgaagaacccatggc

SEQ ID NO: 443421 - DNA, 1383 bp, Homo Sapiens
  misc_feature (436)..(493): n is a, c, g, or t
tgtggtggttgtttgctgctgtgcgtctgatgtatggggttgttggccttggggtgtcgtgtgtgtctggttggtggtggttgggcgttgtgcgttgtggtcgttgggcgtgatccggctgggtggtcttgtgtctcttctcgaaatagattctccccctccttttttgcttcccgacaacctaaggctctctctttagctacccgccctccgctgctctccgtattgattaagtgaggcctcctcctacctggttcggcctgccctgtgcgtgtctaaaagtggggtggtgcgtttgtctggcctcctcccgtggtcgggggatgttatgtgtgccccgcccccccgccttgttgttgtgtcatgtctacttattattttctgtcatttgttcttgttgttgtggtcttcgttctgtttttctttctttctgtgnnnnnnnnnnnnnnnnnnnnnnnnnnnnnnnnnnnnnnnnnnnnnnnnnnnnnnnnnncttcctcttccccatcggggttgactctattgaaatgtatactgaaatcagcctcagattcagcattctcaaagttcagctcgcggctgaaacagcagcaggatgaagagccctagcttctggttggccaagtgttggtgtctgacccgggctgtggtggttattcacagggctggacttctgtttcggtggagatggcaacatagcactgggaaatcccatgttgttcagagcctccaaagttccatcaggatcaatcatagcattgattgcttgcagctgcttttctactcttttcagttcctgtaagatagaagaaatctccatgcttgaggttttcacaatagggacttcactttcggctcttaatttgctttctatgtcatcccaattccgatctttgtctttaaataatattctgatctttccagctgtcttatctatagattgtcttatcttcttagagaactgaaagacggatgacagcagcagattatctcccatgacttcatccctgctccaggttctccgccttgtaattgttaagtgatcgggaggctctgctgcttgaggtcttggatcaccagatcgaccgttgtttccttctggtgttttggaatgaactaatggaggaatctttcggaagttgaggctttcatcaaaaacacgatcaaccaacttacgcatttctccatgaagatctcctacctcttctctagtgtctatggcagagccaggggtggtggcagcagtgcttactgtggtactaggggcagtgcctgatgaagtcactgaatctatctctcctgctacatcgttgatctcccgagcaatgagagcaagatcttggctgatcctggctatctcttctcgatgagcagtcactcagg

SEQ ID NO: 443422 - DNA, 327 bp, Homo Sapiens
  misc_feature (15)..(15): n is a, c, g, or t
  misc_feature (53)..(53): n is a, c, g, or t
  misc_feature (77)..(77): n is a, c, g, or t
  misc_feature (211)..(211): n is a, c, g, or t
  misc_feature (241)..(241): n is a, c, g, or t
  misc_feature (243)..(243): n is a, c, g, or t
cccctaggcataaancaaaggctaaaagagcagaacatgaaagctgaacctgnattatattctaaaccctgttgagnttaattttacttacaaagcagaatgttagtttgcgcagcttagaatttaccccctatagtccagtaaaaatacctggtttcttatcagtctctaaattgtgatattgatttggaaagctccaattttaagagcntcattctaaattactaggcaagtgcagacnanaaatatacataatctaaaacagatcatagcaagagaaagcaaatttctatgaatttgactgagtgtggggtttgcctcgtgccg

SEQ ID NO: 443423 - DNA, 490 bp, Homo Sapiens
  misc_feature (402)..(402): n is a, c, g, or t
  misc_feature (434)..(434): n is a, c, g, or t
  misc_feature (475)..(475): n is a, c, g, or t
  misc_feature (489)..(489): n is a, c, g, or t
caagacctcgtctcagaaaattggaaactattgactaagagaagtttctaggtttgcactgaattgtcttttgtacatacagtgaattgttttgctgttctccccactccatattaatgcaggagccaggttggtctgttaggatgaacaaaggttgaggggagggcaggattcgtgcatctgggggccaaacacatgttccgtcttgattgccttaagagttactagcgaggtcagtgttaggcttgcaatagggattttaaaatacactaactagttccttagctaccttcacatacattctataggccttcttaaattagcactaacctccacttccttctctgccccattgcctcccaaatatgctatggagctatttttgttaccacgttataacgngaatatttatacagtagcctcttcaggctttntaattttcattccaaaaatgccgggggtgatgctttacacnctacaaagtatggnt

SEQ ID NO: 443424 - DNA, 790 bp, Homo Sapiens
  misc_feature (674)..(674): n is a, c, g, or t
  misc_feature (747)..(747): n is a, c, g, or t
  misc_feature (766)..(766): n is a, c, g, or t
ggctaggtacgaggccggtggttaatcggccgaggcagcttctttcaatgcttcaccaggagcaatatcagccaagaccaagttttcgaggaaacaaatattccaggagctacagatatgcccttcaagacatggacaaatttagcttgaaagacagtggccgtggtgacagtgaggcaggagacagtgattatgatttggggcgagattctccaatagataggctgctgggtgaaggattcagcgacctgtttctcacagatggaagaattccagcagctatgagcactctgcacggagcgagtgcagggtcctgggacactctgaccagtgctggatgccaccactgccctcaccgtcttctgattataggagtaacatgttcattccaggggacagaattcccaacgcaaccccagcagcagcatccacatcagagtcttgaggatgacgctcagcctgcagattccggtgaaaacgaagaagagtttttccacctttggaaaggactccccaaacgatgaggacactgggggataccagcacatcatctctgctctcggaaatgagcagtgtgttccagcgtctcttaccgccttccctggacacctattctgaatgcagtgaggtggatcggtccaactccctggagcgcaggaagggacccttgccanccaaaactgtgggttacccacagggggtagcggcatgggcagccagtacgcattttcaaaatcccaccaccanctgtgggccgccacttggnactcactccagtgtgcagccttct

SEQ ID NO: 443425 - DNA, 266 bp, Homo Sapiens
agtctgcatttatttgggtgtttgcaagatgaagcaggaataaggtggccctggctacgtgtttgctgcttttcattttggggactgtgggtgagcaacaatagaactggtatatggtgattctggttatttttgaaaaaaggtcaacactggtattttactagaatactccaaaaagttaaaatatggagcactcaagaaggacttcctataaaacttttcacttatcacaattgtgctgttagtcgttcacagtattttaatag

SEQ ID NO: 443426 - DNA, 594 bp, Homo Sapiens
  misc_feature (83)..(83): n is a, c, g, or t
  misc_feature (95)..(95): n is a, c, g, or t
  misc_feature (279)..(279): n is a, c, g, or t
atttggtgggtgggggccagaagggctctattaccctttatccctttcctataatatattttccccttttatattacttcccngaattttaaatnaaatatttatttgtgtttgtgtaactacaatgtcaacattgtgttagaattatattaatccagttattttatagccagcaaaatggtcccaaacgcattaagaaaaccaaaagataacttagctctgccaaagtagcacctaggaaaacagcacttcagtaaaatttctcctgctattccttantagcctagttgcaggcaaacagcaacaacttcaaaaacataggcagaaatgcaagaaggaagtactcaaggaactattttctgtttctgaaaaaaagatcttattagttagtatattctctaaggcattttataatctcagagtttgcaatgattgccaaagcaggtacatggtaagacttagcaagaagaaaacaagatgaaaatgactgaccagtgaaatctgaacttgttccaagtaattagattttctaaggagaaaaaaggcacaggaggtgcacatttcaatttggctcaaaaataacgctgtgccgaa

SEQ ID NO: 443427 - DNA, 504 bp, Homo Sapiens
  misc_feature (384)..(384): n is a, c, g, or t
  misc_feature (439)..(439): n is a, c, g, or t
  misc_feature (458)..(458): n is a, c, g, or t
  misc_feature (466)..(466): n is a, c, g, or t
  misc_feature (473)..(473): n is a, c, g, or t
aaatatgcaggagctatggaatctgaaccctgtgtctgcactgaggctgattttgattgcgactatggttatgagcgacacagcaatggccagtgcctgccggcattttggttcaatccatcctctctgtcaaaggattgcagcttgggacagagttacctcaatagtactgggtacaggaaggtggtttccaataattgcactgatggcgtaagggaacagtacactgccaaaccgcagaagtgcccagggaaagccccgcgggggctgcgggatagtcacggctgatggaaagctgacagcgggaacaaggacacaacgtcactctcatggtgcaattagaagagggtgatgttcagcggacactcatccaagtggactttngcgatggtattgcggtgtcttacgtcaatctcagctccatggaagatgggatcanacacgtctatcagaacgtnggcatttnccgtgtnaccgtgcaggtggacaacagtctgggttctg

SEQ ID NO: 443428 - DNA, 328 bp, Homo Sapiens
  misc_feature (9)..(9): n is a, c, g, or t
  misc_feature (199)..(199): n is a, c, g, or t
  misc_feature (315)..(315): n is a, c, g, or t
  misc_feature (322)..(322): n is a, c, g, or t
atgcttttngcgtctccagggtgcctcaggaaacatgaagtgggcattgtagaacttggggctactgtgtaactttggaagaaaaagttaagggtacttttaagtggatactgttttgatgaaattgcccaacttcagggagcccagcttggagaaggaggacgtgagtattccttacaaggctccgaaacaattcttntcttcacttagttttctttctgtgctctgcatcttatattccagcagggtcttccaatgcatggtttaataactaccagaactggccaggtgcagtggctcacgcctgaatcccanaactttngggggc

SEQ ID NO: 443429 - DNA, 954 bp, Homo Sapiens
  misc_feature (74)..(74): n is a, c, g, or t
  misc_feature (161)..(175): n is a, c, g, or t
cctcatgacggtttacgtttttttggtaattttggtgccttttacgcaggtgtgaaagccgatctgactaccgncgcttttgattggtcaatcgcattctcacaagttttattatctttttatgtgacgctccgttgttatggtgttttcgcattcttaannnnnnnnnnnnnnncgtttcaggcacccgttactattgtcatcacccgtacagcttatattataccgggcctatttggaaacattagtcatttatgatcccatcactttctaccatttttattacatttaaatccactccggtttctgcggttttcatattctcgctttgtggtagagagtaaattctctctgggtgtccctaacccgatttcgtttacatgaaacgtcagagccatggcagcatgttcccccatggggttagtttgagccccttggcctcttgggtgagtggaccacatggctgagttaggactccacggaaggaaggcagtttgctgtggtagtccccactgcagactcctcatccttgaccttagtccacctgtccaactctggccttctattgaggagagcctgaaccccacaataaatcagaggttcaacttacgaaagaaagtaagattgggttgtttcagtcaagtaattcttccaactgtttgccatgaatttgcaggtatctctactctaagcactggggaggacacaaatcccaaggtccccctcggtgaccttggcccggaagcatattttcccctcattcccccccatggcctcagccagattagaaagaaatgctgtggtttcactgacctttggctatcttttcactgtttcatgttcccttttgaagccacttgtttcagctaaaaggacctcctggattctataaagccaggctttgactaatatctttcccagcacacgctggctctgagatccggagaattccgg

SEQ ID NO: 443430 - DNA, 724 bp, Homo Sapiens
  misc_feature (385)..(385): n is a, c, g, or t
  misc_feature (402)..(402): n is a, c, g, or t
  misc_feature (533)..(578): n is a, c, g, or t
aaaaaatgcagcttgttttatttttatataaactaaaacaccagagttcatcgattcctatattaaatacataaattataaaataaccattcataaaactttacatacagtaagttgattccaatctctacggtaatacatacagtacatgtacatattcggtgtacttcagaggatcattctggtgaaactcagtcaatttttatttttctttcattaataaacaagcactgaagtgatatatggagtcatgctaatgagatggaaagaaagaaccccaattgaggcagttgattgaatgaaagctctgtgaaattggacccttggctacattaacacagtaaacacctgggggaattatggtattccaaaccacattagctcntataccttgagtccccnaaaggtattggatcttgaaggctaaaacatgcatgaaccctgttgagatggaatttttagctaataaaagtatgggacttttggctaattttaatactgtagattgtgctgaactttctgttgctctttgnnnnnnnnnnnnnnnnnnnnnnnnnnnnnnnnnnnnnnnnnnnnnntatttgctggtttatgggcctggataattgaaaaaccgagtggtctctgcctcagtcaacaattggaaataatagtagtgaacagaaggtggggtaagggagagaagaggtagtcaaggatgggaagagttcaaacactaaatgct

SEQ ID NO: 443431 - DNA, 531 bp, Homo Sapiens
ttcagaatagatcaatggttattgtataagtatttttatcctaaaacattatgacattttttgtttcttattgagggtagataatgttaatattaaactactaataggaggcccttatcacttctcttttcattttttccatgcagtgataggtattattagaaaaaagttatttcttgagttacacctaagaggaagaagtaacatgatggaaagtggttggagatagcacccaattaacatcgacagccaagtcttctatttcagaatattgatttatttcgctttggcttttgatgccatcatgagatttaagtctgcagtttcaaaagctcatgctacttagaagagatgatttttgcagcttaaaaaattgcttgtgactgcagtatgtacacagttaaaaagctgttcactgcccctttcaaccttttcattttgagctttactaagagaatgcttttaggaacagaattcctaaagtgtaattttttatgtataaataaagttttatctatatctgaaaaaaaa

SEQ ID NO: 443432 - DNA, 301 bp, Homo Sapiens
  misc_feature (295)..(296): n is a, c, g, or t
aattacatttatctgctgtatagaatgccatattgtggtaatactgcaatgcacaagaaccaggcaatggaaatgaggtttcccctttcagaattcatcagtactgtttttctacatctcactcacaatcttttaaccattgatggactcctggccttaaccttctttatgttacgagtcaaaggttaaagggaaactggctcacaaacaaaggtgtgaaaaaagtttagcgtagtagtaattacacatttgtttcagaaattttcagtttggtatttcttcaccccgccccccnnttttt

SEQ ID NO: 443433 - DNA, 867 bp, Homo Sapiens
  misc_feature (586)..(586): n is a, c, g, or t
tgagtgatggcccctgtcccaggttgttattcttttcttcctctgggccgcccacgcggtcttcctcttccccgtcctttgggtctccctctccctcttttcctaagggaagacagaccattcatactacttgaattggcgctctgatagtagtagtaccatttcaagtttccattcttccaagcataacgggtgtccccaaaccaactaactatgtctgttctagcaagcccgctttctttggccaacttgtcatactcttctggtgatggccactgtgtccggacaaatgcactcttaagcatgtgcagctgctcaggtgtttttttacatatcttgcctgtactccctgacttaggtgcaccagattcatctgcaggagaagtttctccagcttcttctttggaactacctgcattactttcatctatttccattttctcttcctttaaagcttttgatttcttcttctctgtaaaccaagcatcgatttctcttctggtaagtttggtttgtgcccttaacctatttaattcttcatctgtaagtacagagctgttgagaaaacttgcctgaaggacacganagctgctctgcagttttctctttaaacttttggggagtaaagtcaggaaaaggattccaggattgcttaggctgtgcagtaccaacagttggggattccgtggtttcatcactggagtctataataatggtggtagaggaatcattgttgagatgtaagcactgattactctttgaatttctctggttgtaccttgtgtcactaaaccattttttaatctctcctttcgtcaggcctgttattttcataagtctgataatttctgaatcatggggaaactg

SEQ ID NO: 443434 - DNA, 331 bp, Homo Sapiens
aagaaaagagatccaaggatttcttctcagatttcacctcggagaggagccacccgaatccggccgtgggggtgggggctgagggaggatgcctataggaatatgcgtgtcaatcgcgcagcgggtcccctcctcctccagaaagcgattcgtgtaagtttaaacttgagacggctcggcggccggcgccctgctaccagccccgcgacattgtcacggccgccgggccgggcctgcgacgcagagaagaggcggcgctgcagcgagagccggggccgcgctcggctcccgcccgcccgccagctgatcccgggagcgccgggcggagact

SEQ ID NO: 443435 - DNA, 604 bp, Homo Sapiens
aggccggccgccaattttttgttgtgcgttttcgttttgttttaaacttaaaaaaaatttaatgataaatacatattgatagaaattattcaattctcctatgaatgcagcatccaaggatattctccatgttcatggctcccagcccttccctccaggctgatggggcaacttgagacccaccaagccagcagactcctccaccgagcgctcacccttgccatgaaattcctgatgtagggccacatgtttccggatgctacgcaggaggcagagataggtggcagcttggaaatgaagctcatgttgggctctgcacaacttttcactggtgacccgatgtgcacggaaagccttcacaaggtaccgataggccgcggtgtcgcgatagggtcggccggtggccgcgctcaggtagcgcaactcccgcagaagtcctcgaaaagtgtgcgacggggaccctaaggccgccattgtcctgtccttctccgagcgtggtgcccaacggcgtcctacgaccctgaaaacccctcctccggcccaggcgcctaatggtacggtcggacagactaccgactccccctatcgactgacgagcagtgga

SEQ ID NO: 443436 - DNA, 1117 bp, Homo Sapiens
  misc_feature (469)..(534): n is a, c, g, or t
  misc_feature (1006)..(1014): n is a, c, g, or t
ggggcaggcaagcgcgtacgcagaagcgtgcgcgcgcccgttcaacgtccggagcatcggtgcagtttcgagggtaaagcctttggcgcggtgatgtggacttttgttctctaactacaactcccagcatacgtcacccctcacgtgggcgctaggtgtggtttcgtgggatagggtcaccagtgaaaagttgtgcagagcccaacatgagcttcatttccaagctgccacctatctctgcctcctgcgtagcatccggaaacatgtggccctacatcaggaatttcatggcaagggtgagcgctcggtggaggagtctgctggcttggtgggtctcaagttgccccatcagcctggagggaagggctgggagccatgaacatggagaatatccttggatgctgcattcataggagaattgaataatttctatcaatatgtatttatcattaaattttttttaagtttnnnnnnnnnnnnnnnnnnnnnnnnnnnnnnnnnnnnnnnnnnnnnnnnnnnnnnnnnnnnnnnnnnggcgcgcgcgcgcgccccccccaaatttcccctcccgcgagggcggcgcccacagttctctcgccgccgtcccccccgctcctctctctcttgccccaagaggtggcgcccctctttgggaggagccgccgtctattatatcagccctcggagccgcgctggcgcgcgcgtctgtcgtttcccaccgtcgggctccgtcgcgcgggcgacacacacggtcggagtccaccgctgtggagccactccctctgtggggaagacggagagcacccctctctatcttctcccgcgggggcgggggcgccacacgcaccatttttggtgcgggcgaccaaaactctcctccccttacccagagcacagtctatttacacacaggctctcttcacaccagagagcgcgcacacatatatactacacactctccttccagcacaggcggccgtatactaacccgcgcgcgtgtctacannnnnnnnntggccgctccagtcatttgtccccgccaccgccgcgccattagaaacgatcctgtggccgccaccaacggcgagcatagttctacctcctctgcgcgcacaaa

SEQ ID NO: 443437 - DNA, 1287 bp, Homo Sapiens
  misc_feature (444)..(444): n is a, c, g, or t
tgcaccctggccgcgcgttttccgggtggcagattgcggggtgaactttgtatgtgagcgaggcaaattgcggtgaaattttggagaaaggagaattgggtgtaaaacccggggattttcaaagagctttactgttgcaccatatattccccgtaaaggaaaatatttgcggggaccccgccatttctgaatggacccgggaagggtgccgccagggactcaacctcctttctttatataggtccaccctttggaatgttggtttaaaatggtattccgctcgttgttccaaaaatggtttctttaccatcaattatgctatttgacaaaaacagggtatttgtgcagtacagacaaaatattaaaatacattttaagttaggttaaagtgcacagtacatctgataggaaataactgctagctcccaatccaaatttccgttntcagaaacctccccccccatttcccaagagtggagggcagccattgccttggttgatgttggtctgtgctgactgcacactgaatcctccctcctggtggtgtcttttcttttgcgtccccctctacatttgtcttacaaactgtggctgctgctgctctaaaaacttccaatggcttttcgaggaggtgaaagtgcagtcagcattcacaagacttagaaaggttaattactgggacatctgtgattgcagcgtgagtgcacatgcatggaactgcctgcagaaggctgccgtgttccgtgaatctctgagagcagcatgggttccactccttggctggttcttctctagccctattttgttgcacttgctccctcctcagccactcagcctcacaaactccacttactgcaccctccccttagcctgccttggtggtgctgcccacaggctcacaacgactcacttctgaggtttcacaccagagactgtgaatcttgcaggattttacagactacttggaaaaccaccaaccaccaaattaaaataaaatgagcacatctcagaatcatttcctcttttaaaactggcagttgtaagaagtgctggtttcctgattcaggtcctatgtgccttaagtaatttctgatactcagtcgaagcttcccttcaaaccctttttggttcaacaatcaactttttatcatctccactttcctatgccatttcttcattatctacctttggtgctaagctctctttaacgtaacccaagttacagtgcaaaagtatacttcaagacacacgatgctaacacttattatttctttgtgttaaaacgtg

SEQ ID NO: 443438 - DNA, 474 bp, Homo Sapiens
  misc_feature (157)..(214): n is a, c, g, or t
ctcggagcttgagcgccgccagccccaggcccaggcccgccgcctccccgcgacctctggacgggccccgcggccccacagccgcctcaggcagggcgcccggggctgcacgcgactcagcaacctcggcgcgccgcgcagcgcagtccgcagcatnnnnnnnnnnnnnnnnnnnnnnnnnnnnnnnnnnnnnnnnnnnnnnnnnnnnnnnnnnatcttggaagtgggcgccgggcggaagcggcgttcttgggcttccgtcttccgggtcgggggcgcgctgcgctatgccgccccctggcggcctgagggggccctgcgtccacgtgcagctcgcaccccgaggacaccgcgggccgcagcgaggagggacggccgcggggctgcgcgcgagtgtccgagcgggaatgcgggtcacccgtgctgtttatttacgcagctgtgttttctaacactaatacaatgcatgcatgt

SEQ ID NO: 443439 - DNA, 834 bp, Homo Sapiens
ccttgtctcccgcccggaccgagcgtaccgcggccccctcccccgccgaagggaaaaaaaagaagaatgatggaccggtcggattcccgggatcacttccagatggcggcggggcggggccggggcagggcggacggagccggcgagcgggatgctgcggactgcgctgcgcggcgcgccgaggttgctgagtcgcgtgcagccccgggcgccctgcctgaggcggctgtggggccgcggggcccgtccagaggtcgcggggaggcggcgggcctgggcctggggcttggcggcgctcaagctccgagcaggggccggggcccgcggcggctctggggcgcgttggaggcggctgcactaccagctcgtctacacctgcaaggtctgcgggactaggtcctccaagcgcatctccaagctggcctatcaccaaggcgtggtcattgtgacctgccccggctgccagaaccaccatatcatcgctgacaacctgggctggttctcggacctgaatgggaagagaaatatcgaagagatcctgacggccagaggcgagcaggtgcaccgtgtggcgggcgagggggccctggaactggttctggaggctgcaggggcccccagatccactgcagctccggaagtgggttgaggatgagggtcacccccagccctggcaaagacggagccgagctgactcctgggctccccgtgcactgtggggacttcggcctttccagaaaggagcgtatgggcccttgggcctctctggaccgtggccttgtttcatatcaagtaaacatgacaattactttcccacaagaaaagaaacacaac

SEQ ID NO: 443440 - DNA, 559 bp, Homo Sapiens
  misc_feature (236)..(277): n is a, c, g, or t
  misc_feature (444)..(444): n is a, c, g, or t
  misc_feature (456)..(456): n is a, c, g, or t
  misc_feature (523)..(523): n is a, c, g, or t
  misc_feature (534)..(534): n is a, c, g, or t
taaactccaatttgactttaataaattaaattccaagccatcacacagcaatggacatcatcatcgtctcccaacacacagaggtgcagccttgcgtggctccatcatcacagtctttaaataaagcccctaaagccatctctctggggaaggcttcccaccaggctcccggctccctccttcccacagagccactgctcacagagaaggcatcaagtacaaaaaacggtaataannnnnnnnnnnnnnnnnnnnnnnnnnnnnnnnnnnnnnnnnntggggagtacctgccccccatcccgggccggccctgctctctgtgagctgccaacattctcagaggcagacactggtgctggtctgagtggggacctgagggaggtgtgggagccccatcccaaagggaatttacccaccttcctgggacagaaaagaagggtcacnggggagagatgnctatatcatctattcacggagggtcctaagccacacttataaatagaaaagagataaataagggagnagggtcagttnaagagttagcacctgggattcgttc

SEQ ID NO: 443441 - DNA, 643 bp, Homo Sapiens
aattagtacaaatttaatcaattttaattaattttaactagctaattttaagtctttaattagttaagaaaggcaggatttcacataagaattacagatttcaagcttctcttgaaaagttggaagcaccaaacacccaagcccgggcgctggtggggagcagcgggggaggccgagctgctgacgagcgggtctggctcagagcagcgtccaccctcggccctcacaggccccgctgccctgccgccagggcttgagcttgcagtcttgggtccgcccggtctttctgtctgcggtggaggtagagacgctgacgtgctcagcttaggagtctcaggtctccccgggccgcaggccgtgaggacctctgctggtcattccccgggggctgcagccaccctcttccggggactggaacgggagcgtccttgtggccaggaggggaccctgctggtggccgcccgatgctcaggcccctctttccacctctgtgtgccccaccccagcttctgttctcggctttgacctgtgacctccgaccttcagaggattagggcgggggtcttcctggaaacctcagaggatcgtctgtcccgtggtcactcgcgggagtagaccttgctgcatgcgccctcgtgtaatt

SEQ ID NO: 443442 - DNA, 1051 bp, Homo Sapiens
taacttaaagaacatctttatttgaactttaatatacaatattacctttaatttataaaaatcacatactggaggacatgactggaaaccagtttaggagcagccagtgggtaccaatttaggagattatacttaccccacttattagtttaagaaaaaattctatcaatgaatttgagaccagtgatattgaaggatggcatttcaacttccaaatccagtaattaaaattgaagatactttaattcagcaaaaacttctaaattttctttaaaaatattttttcccaatgaagaactgaggcttatctttattatgttttctggtatacatcttacagaattttgtagaaataaaacagccacaagacatttgcaattatttaaaatcctctgcatattaatatgtatgtgtataggctgtgctgtgtttgatccccacacattacattcacaccgagctgaagcaacctgacagcatgttggacctggaaaggcagttcatttataatgtggaagagagacagttaagtctctgctccctctatcatcctgaatacaggcttcccctcctctaaaatttccccaaatagtgaaatatttgataaaattcttaaagaaaaatctattatctgttagcatgattggagcactgcaatgtatatgctagtaatatggtgtgtaatttcagcagcaattttatgagttctgcaattgctatgctccaaccaagtttgaaatggattagctgtaaatcagtggcaagctctcggatgaaggtatgctttaacttgaacatgatgccttcgacatcctgaaataatggctacttacctgtaagggattgaaactttgcagcgaaggatctcctttgggaatatcttcttgactctcagaatcaggcatctagaggacaggggagaccgtcgcagtccaaagaaaggtgcctcccataaactactttcgggttaaatctaatgtctccacgaacacattatttctaaacaacaagggcagtcacaattcgagcaaagtttacacttaaaccgaga

SEQ ID NO: 443443 - DNA, 384 bp, Homo Sapiens
  misc_feature (5)..(5): n is a, c, g, or t
  misc_feature (28)..(28): n is a, c, g, or t
  misc_feature (56)..(56): n is a, c, g, or t
gcaanacaaagcctttgttaatcaccancctttgtagcatcatatatatataaccnctttaattttttaaatgttggcaagcatgaaaagagaaaactttctctcctgggcaccataattttacaggtcaagaacaatataaatacaagtgtagtgtgccacagaaaatcatgtccaggtaattattgtggtcacacagaaatctgccagtgagtacttctgcaatgtgaggattctcgttattcttacttcataaatctaggtcttgacatattacattcccttaaggtagctatactatatgcctatgttctaagggaatagttgcaactgaaatgtctttgtatagaaatcaacaaggtcaggccaggcgcggtggctcat

SEQ ID NO: 443444 - DNA, 1320 bp, Homo Sapiens
  misc_feature (42)..(42): n is a, c, g, or t
  misc_feature (59)..(59): n is a, c, g, or t
  misc_feature (86)..(86): n is a, c, g, or t
gcccaatcgccctctgtcccgtttcctcctaaagggtaacanttcctgcctcctttaantgctggccccttcccatccttcctcantgtgtttgaacaaaggccactgcccaacctcccagcaagtcacagaataacaatgaagtctgaacagccacagaaaccctcactgcccagagaatgaaaagactgggccatggcgaagagcacagtaatgaagatgccatctgcctggccacatgcccacacaatgccacagcagccagacaggcacttcagggtctgtgcgcctctgtgacttggcaaatctgacagtgaaaccctggcacttccctaaggctcccctagttctgtgcatggtgagatgaaaataaggcaggacctgtaactaaaggcaaaacagggcccgaaaatgtgagcaattcaaaatacaaaatgtacaaaatatatatgaaatatgtgggtgtaaacctctccccccacacccataaaagggagctggtataaatggagtgaaatggtgctatactttggaaatacgactaaatggatggttattccaattgcctttatatttatttctgggaaaataaatccttaaaccttgactgacttttcagtgttaattagtcatgttgaggagaaacaaattctcaaattccttctctgcattacaataactatgaaactcacaagcagtgtgtaccaactcaaatagttaacttcatatacaaccaataccaagggtttcagtaattatgttttaagcaaaagcaaacgattgcagaccacatgatttaagactacagtttattcaatatgtctccaagcattaaaaagataattctgtgaagttaaactcagtaaaattatatcttaaagtgcttttattttgctgtttttaaaatctgtttggggaacaactcataacttctttaagtaattgatgtcaaataatgcaccctgtacttctggagaacacagcattttcaaaattgctcttttcaatctaattatatcagaaaaatatcttcaagagcttagtatttcccaatttttgatcctgatccttggtaacctttcatcaagatccaagcttatgcatagggttctcatctagacccatctgaaattctatacaaatagggagacatattaaatacaaaggtctgtgtaaattgacttaattactattttacaatgaaaaggaattttattacatctttacatcattttaaattggatattcctgtttaatattactgcaagattaaaaatttgcccccacatatctaaaagcagcttgctttttcttaaaata

SEQ ID NO: 443445 - DNA, 301 bp, Homo Sapiens
gggaaatattcctcttgtgccaattaaaagcagtcgttggaagcagaaatgaatttaaagcattacacgttatcatggcggccttgctttttccttccagtattcatccaattgcgctgatctcctgcatccacatcttgcgtaatccacaaagcagctatggtccagggctgcaaaatcagtcctgcctgattcctttagaattcatactacctcagaggagcaaacctaatcccctcagcctaatcctacctgtttaggatcatctaaacttgtccttcagaaagcttgatcagtttaa

SEQ ID NO: 443446 - DNA, 807 bp, Homo Sapiens
gagatatgattttatctctatacacatttgcccacccttaccaaagcaaaatgtggtcacaaggccataatctcatggactgagattttgacattaggggcaggcagtcatgggactttcttggaattgctttctactagcttgccttgaattctgaaaatctcaaacaacgaagaaagccaaacttaattatggccagattaaacagtggttaaaaaattaacagaagcagactatgtagcagctacagaccagttggtgctgccatttgggaagctgcagatggctgtgggtgggaaatgcctttactttcttaagcgatggagatgagtatggtgtgtgcacttgatgtttttttcatacccccaccccccaacagggctgtctgtcataggctgcccggccccgctttatcacttgcccccgagcgtgggaatcggagcgtcctgccgttcacatctcctgcattccgtttagcggaatcaattaggcaagacagaccctcagattccccaccccctttccatttttgtcaggtctatatacgtcctaattatttcagtttgggatgccagagctgtttcctggatagacctgatcatccttaaacaaaaagagaggaggcgcacacgtgggttgtggcgtaaatgtcactttcatttccaatgctaggcgcagagtaagacagaacatttttttaacactttgacaagaggggaggcgatctcgtctccatcatgtctttctgcttcagtagcttcctcaaggaaaccctcttggaacagagaagcatctgtccttgtattt

SEQ ID NO: 443447 - DNA, 1203 bp, Homo Sapiens
  misc_feature (1096)..(1131): n is a, c, g, or t
aatcggatttgactttacatattagggctttcatcttgatgagaaactcataacagcagcagctcaaactgattgttaaaaggaaaaaacacagggcagattaataatgcaacttgggacttcactcttctctttccaattcaaatgctggaatatgacactctttttataatattctgcccatgaggttctctcccttcttttctgccttcagagtcctttccaaaaggaaattactgccttgcattctacattattcctaatttccaggtggaaaaatgagacaaattaagtgacttctaaaaacactaggaactgtattttttaaaaacaagacaatacttcagattttcttgctttaattcttctctatattaccacagtaaaatatttaacaaagtccaagagattactgatatgcaataatgacctatgactttacattaatggagtgatgtatcaataataaactgatcagttaagtaactggaaaatgtttgcatgtaaagaatgattcactatcctttttatcttgtattgaaatcgtcaaaacatttaaaaacacaaagttgaagtaattttaaataataataactgtgaaatactgcaacatcttgaagtactttataaatgaccaaaaacaggtaaaattttgttcagtataacttcagtgaaagaagttttttgacacagaactacatatatttttaaattggtaatccacataagatatacacaaaaccttcaagtgactacattgttcaataaataaaactctacattgttttgtttttacagcctagtgagcttataactcagtaacacccttttaagaaattctagtctacagaatgacatgtccaaattgtttggtcctattaatttctttagcaaaacctccgattcctttatatttaattcctccacatatcatctttgaagggcctgactaataaatcacaagtgtaaccctccagtctccagtctggtttttcatgagtttcagttcagtgtaagccagcacactgacctccccatgaattttcccccgccgtaatggccgaattcccgggcatatgtccggtcccgtcgactnnnnnnnnnnnnnnnnnnnnnnnnnnnnnnnnnnnncgccgcttcctcgctcactactgcctgcgctcgtcgttcgctacagcaggctaggccctatatgatgatcat

SEQ ID NO: 443448 - DNA, 705 bp, Homo Sapiens
  misc_feature (410)..(410): n is a, c, g, or t
  misc_feature (561)..(561): n is a, c, g, or t
  misc_feature (671)..(671): n is a, c, g, or t
  misc_feature (681)..(681): n is a, c, g, or t
gtgttaccaatccaaagcaaaacttctttctcttcttcctccaggtgcttagctttagatattattattacatcagcatcacgtggtaggcagggttattcccatgacacagagggcttataatatttacaatggagtgagctataaggggaagggtgtgctgatagctatttttccttgttgttattggcttggttactagtttaatggcctagttgccaattaatggcttaatgtatttaatgttctatataagcaatgtacaactctttagtttctaagtcaaatacaccgtgaaaatcaccctaagtggatatgagaatcttccatacaaatagtaagcctgtgattatacattatcagtaaagatcaagaactatataaatgccatgttacattaagcccaaatngataatttaatgatattgagtcaaaaaagagatactggcagctactaaaaagttagaaattatgccctaatacacgccgggaccagcaggctcctcagccaaccctgtccctcggcctggcctgcagaggagggacccagcccatcttggngatcggcaggactcagccgctccactccccacagaaaccaggagtgtgtggacgtctgagccagtttctgattcccaccgggccactgggccctaaccccggaggggcanctgggccccnattcccctcttacccagaggggtt

SEQ ID NO: 443449 - DNA, 1721 bp, Homo Sapiens
gaaacagtagtgcagcagcccggccaccaggcggcagcgcagccccacctggccgccttcgttctcgatgccggccaggaagatggtggagcccacgaagaggcagatgcagaggtgcaggtgtatggtggtgcgcgagcccctggatgggcccgcaccagcagggaaagtgaggatgcacagcagcaggcagaagagtgacaggcgccagtcccaccctggtgatcagggtcagcttccagtcctccacgtcataatgagccataaggatcgcaaagctgctcaggtggctgcattggcaggtggtgctgccgttcttgctgcccagcacctggcagccctcggtggcccagtgccctcccctgtcgctgtcactcttccagaaggcacagagcagctcctgccgtggcccaggcatcacgtccttggcaggagggtctcttcccgcctccccatcggaggactcaaggtgggagaaggcgaaaaggatgggggagttgagttccttggtgttgttgtggctcagaaagatggagttgacggcagagaggcgtctgagttggacaccacggatgctgctttcatatatctcctccagttcggcttgcttcttggaatgcaggttcaaggaggcattggccagcaatgtcgtcatgttctggatggagaggatgcccgccacggcggggcctggatcctcggctccagctgccacagcccaattcagcttcatgcgtgcgctgctctgacccatagtgacgttcttgtcccccctgctcctggatcatcagggtcagctctgtgttcgaaggggaaatgtaggtgaagggggcctttaggcaggctcttggccaggatcctcatgatatcttcaaggtttgagagcagctgggtggctatgaggtgccggacaggtggcgccagggcctctacgtctccaggagcttccatcagttcatccaccaatttgatgacattctggatggtgacctcggctgagcttgtcttggagtctctgcccaggtcctggactttgtcgaagaatcgggaaagcgtctggctgtggactccagggggcggggtccaggtggagaaagtcatatcttcacagacagtgtccttttggttattcgggattccgtgtctgggcttccagcctgggcggcagcggcagctgtatgaacccacggtgttgaagcagacggtggagctgtcacactgatgctgcccggagctgcactcgtccacatcttgacaggtgttctcgctctcattcttgaatgtttttgccccagaaacaggctcatatcccgggctgcacacgcagtcgtagctcccctctgtgttccagcagtccgagaattttccgcatgacactttcgacggtgttgcacactcgttgatgtcgtcacaagtctccgtcggggtggtgatgatctcagaaaaagagctgaaccctggattgcagcgacaggcggtggcattgacacacgaggagttctgagggcaccaccgggcacagcccctggagtcctgggtttcagctcccggcagagtcagccagacacagaatgcgagaaagacgcggcctcccatggttggagctgccggcaggagcggcaggggaaagagtgagtgggacagggctgtcccgtctccacaggctgggcatattgcgcaacgctgggtcgacgaatcccggaattccggaccgtaccagc

SEQ ID NO: 443450 - DNA, 443 bp, Homo Sapiens
  misc_feature (20)..(20): n is a, c, g, or t
  misc_feature (36)..(36): n is a, c, g, or t
  misc_feature (44)..(44): n is a, c, g, or t
  misc_feature (52)..(52): n is a, c, g, or t
tgggaagaaatccctgtttnaaggccctcctttctnaagggggnttttgtgncctccctgcatgaaatatggtcttcttcggtggaaacaagtttcaagaagtcagttccttgtgacacttttcacagttctgttgaatctgatactcttcctgtttcagcatttctgtcatttccatttccttgaggctactgtcatattcctcctgcaggtggatcttcttttccctattctcttcttttgcttttgctgttttcctgtaatgataaagccagtgagccaggtattctattgggtcactgggccgaaccttcgccacctcttgccagtgcctgggccaggcaatttccaaagcacctcttcaggtagttagtttccatcctggcagcctatccgcgcgcccgcttccgctttgcggcgcctacactggctcctgaggcgcg

SEQ ID NO: 443451 - DNA, 1050 bp, Homo Sapiens
  misc_feature (272)..(272): n is a, c, g, or t
  misc_feature (303)..(303): n is a, c, g, or t
  misc_feature (321)..(321): n is a, c, g, or t
aaaggccgcaaccaatgaagcttgccccagccccaaaaggccccagggcctggcccccttacatggttcactgcaaaacaggattccgaaggtaaagggggcgagtttctgtggtgggcaaagtcatcgagttaggagatgccaaaggggtgaaaggggcaccccgcccaaggccagcagggtctgtgccacgaacatgatccccaccacactcagatgctgggtttctgtgtagctgaggcagttgccattgaggggggccgaggctgggnccgaggtgtgggcaggcacagggaagcctgnaagtcctgtggcatatcntcagggctggtgttgtcgtagcggtatggctccgagatgaagtgcgggagagtcatgagcaggcccgccagggccacaaggatagccccatagccaatcattcggggtcggtgcacccggctgccaaaatagctcacaaacacaatcaaggctgtgttccccacctcgttgaaggaggccagcagccccgacgtctggctggagaggccgaagcgcttctccactgtggagatggagctctttaggtagccggagatcatgagctgcgccagctgcagcaggctgtggcacagaacgaacagcttgatgttatggaacacacttggccgcacgtcctgagggtctgggctggctttgcctccaggtgtgttttctgtgcccattgtggctttggtttccttgtctggtacctggggtacctcacccgctggccctatcctgggtcccatgactgctggagtgcagtgagctccagcccctaatttaatctcaggacctggagcttagcaggggagaggaagcaaatcttctcaggggctcctggagacagcagcaggtgagccacagcagggatgcaataactggtgggagctccagacacttggtcagttcttcttgggccacacaggacatcagacttgtccagacacaggttagggagtcttgctcaaactcagccccaagtatctccaagtttgtctccctgggtcacatcccggaattccgacc

SEQ ID NO: 443452 - DNA, 550 bp, Homo Sapiens
aaaaaaacaatgggatgtcatgggataaataatatgagtcaaattttgccagaaagttctggaaatgtaggacttggtcttttataagtgcttttaaccttttcagactcattaatttcataaaccaatttaagcaattatttctatcagctacagatattttcttcacaaatataaagggtttgctcccctggcgatcctccagcctccaccaatttgtgcctgtaactgccacttgatagctgctcagtaagactttgtttaaatatcaggttctagtgccaacaaatccagaagtcagaaaaattctaagttacaatcgccagaatatctttcatgcattctattttactttattgttacagtttaaacaaattcagaaacgtggggtgtttctggctacttgagtaaaacgcactgcaaacgcaaagggaacaacgctgtaaacttaaatgatttctgaacagctcaggatcctcctggaggggatccttttcatctcacatattgattctgaacactatgttagcacctgctcccagaaggtccc

SEQ ID NO: 443453 - DNA, 610 bp, Homo Sapiens
aaaacaagtagcatacattttgtaattaacattgataaacactgtgatttttttggttaagactttttcattgatctgaattgcttaaattgcatatattgtaaaataggatcagatgtatattttaaactaatttcaatggattttcctcttgaaatgctttgtctactcagttataaaatattcagatacaagttttatctcaggtgaatactcttgtattgtttttgctttggtgacatgcttataaagggtcatcctagttacattctttgttttttaagtgtatttcattgagaatctttccatttagtctgatttttttcctaatattctagcaggctggggtggtataaagccctcctgacaagccttttgcctacaggtttacctgaaaatgagctacatatggtcgtcattttcttcaaactctcaaaatagggaagtggaaatttttctcccctatataaaattattctgcctagcagaaatgccagaaataaattaattgcatcttagtcttaaattaagtcctttgccatgaggaaaaaagtggttttttgcttcatatggtaaatctatattattcattattaatgtattaacagat

SEQ ID NO: 443454 - DNA, 874 bp, Homo Sapiens
  misc_feature (827)..(827): n is a, c, g, or t
  misc_feature (835)..(835): n is a, c, g, or t
  misc_feature (848)..(848): n is a, c, g, or t
  misc_feature (862)..(862): n is a, c, g, or t
gggaaaaagaccaaattttgaggtcttttacatacagtgatatggtactaaggagaattaaactcctactgcttcctctgaatattaagaaacaatttaaattgttataacttcataaaactcatgactgagtctggcaaacatgtgcaactcttgtattgctccattttcttgtcaatggaagaaacccttccacgtgtatgcaagtgggagatgaaaacctgcatttttaaaggacaaacagtgaatttaagcatgagtggccttaataaatatagttgtctttctttgctgctgtggaaaggattctaaacagatgtccctgaagtcttgcattgaatttagtcattattattactttttaaaatgttggtgcaattaactctggacctctcttgtgagccatagagatatttaaaagacaaacaccttatttgtcggggaagatgaaaccgtccctgagttgcaccattctttcttggtgcattcgcggttaagatactcaagcaggtttcttgcttctggctttgttcttgtcatcagtaagtataacaaactatgtaatgcttatgtgttgcataaacaatccaaatgcattcatgttttaaaagtttgtcctttaactatcagagggatctaggtcttggttagagaagtaagcagagttctttgcaagcttatttagcacattttgacacaatgttgcactgaaaacccgggccacaaatgtgtcccagtggaacagtttgggatgtcctcaaagaagtgggttctcactgcctcctacaaccggggttttggacctggaactctggcaactggattanttgaggtnggggagtaggggnttcccgtagggggnaattgggggtcc

SEQ ID NO: 443455 - DNA, 520 bp, Homo Sapiens
ccaccccaagctgggaaggtgggcttctccctcccatgtgtgggggcggccccctcctgagacctgtcatcacttagggggagttgggcaaaacctcctaggaaggtcctggacgcctccaccctgccccacaaggctccgtacttccacctgcctgggcagccctcacacccatgctccctcctttaggcaggcccagaaaggtgccccttcctgagggtgttgggggatggcggcagagagacagctggtattaggagcttccccatcctaatgtgcaggaccaagttgcccgctctgccagccaggggctccagccatgctggcacaggcatctcagaggtgtgagatgaactccgcctcatgcaggatgcccagggctcggaagcagtaaggaggatgctacagaaaggactgcagaaagaaaaaagccacatggttaacttttcccctggggggcaaaggggcccggctctcaaaaagaaagccaggcacagtcccaacaccaagtgtaaggcag

SEQ ID NO: 443456 - DNA, 701 bp, Homo Sapiens
  misc_feature (20)..(20): n is a, c, g, or t
  misc_feature (79)..(79): n is a, c, g, or t
  misc_feature (84)..(84): n is a, c, g, or t
  misc_feature (94)..(94): n is a, c, g, or t
  misc_feature (121)..(121): n is a, c, g, or t
  misc_feature (158)..(158): n is a, c, g, or t
  misc_feature (245)..(245): n is a, c, g, or t
  misc_feature (299)..(299): n is a, c, g, or t
cctcaatgtaaactttttgnttaggccaagttaaaaaggccctctttccccctcctggttggcaaaaaaattcttcccnacaancctccaaaanttctgtaaccttggcccaacagggtgnaaaataacaaaacctatcctttagccttgggaaaccnaccccagattttccctcttcccagagtaaattccctcatgtcactttttccccaggggcccagtcctcattttcctagattaggatnacagttggagacgcatagagggtcttgtgtttgccacaagaccactgcaccaanaaatgctttctatcctctgcatctaagagcaataaaaaggttacacataatccagggactacatttccatcagaggactctctcccatcatggttttgctgagattaattaaaattcacaaaagtattgctcagtttaattagacactgctgagagttagcaaaatgatgtttcaaaaaagtgcacttcagaaatgcctacgggctggcgataaagtaaggactctgcatcccagtaattaagttttgattgctaatgaggaatcccagacacctccctgtaaaagccagcatgcgaggtggggacaaacccctaaaattcagattttatacatgggccacctgtatggtcaattttgcaacaacactatgaccaaggcattctgatagctgtcaagatttt

SEQ ID NO: 443457 - DNA, 1321 bp, Homo Sapiens
  misc_feature (726)..(726): n is a, c, g, or t
ggtatgcaaaggtcccctttcccctgtcctcgcttctcatccttccttctcccctgttctctctactgatggcacctggtggccccgaaggttacacattgcactagatcactgcataattagcaagtcattcttaattatcccagagtggagaagataaagatgaaggcaagagcccaggttcagcgtctgcttccctggggtcatgacagaggcaggggaggagaagcagtgaatgtgaatctgggtcaggagtgggtgctccctgcttcttcctccccagcagcctctggggggactggtgtgctgaggttgatgggccatgatcagctccttctcaccttcacagtaatcccatgatgtagaagggaccattcctgtttttcagtggaagaagctgaggcagagaccagttagtgacctccccagggtcacactgctgctaaacagatgtgaaacccaggcctgtgggatgtcgtggttattgatattcatttcttacttccccaggagccctgagtccctttgaatgtggatgtgtgtcgtctgattcgtctttcactcccacggccccagcatgtgctctacaaatgggatgcactcaagttattgaacagtgaggggtggaggtgggagaaggaaagcaagggatgcttggagatggtcccctccggggcagatagaggaagatggacccttagtgagaccacgcgcagaacaggctgnggtgagccacttcccggtccgtggaatgttcccacagaaggcaaggttccttcttcttaagtggctggggcgaaggcgttgccattagggtatggggttcaagcaacttgagctttgttaaactggaccttacctttgaaagttaaggcccaccaagccaagggcggtctgggaccaggaaaatgacaaacaaatgggcaccattccccgcaccctcagggttggacattggttccatcaacggcctgggccccagtgaggcctaagggccttcccgacacagccttccagaccatcctgctagtccatggagatagcagatatagctgcaagctttctgatcctgagtctgcacttgtccttggcaccatagcctgtgaccgtaagagaatagactgtccggggtctttgtcaacaagcacgatgttccttagtctcatgggctcttggctaaggaaagagccccagggtcatgtcttctacctccaccttaggcaggattcacccttggggcacccccggaaggcgcttgtgagctggaacctaattgctatgcaaagtgatgcagttgtttatggaattttttctaacagaa

SEQ ID NO: 443458 - DNA, 647 bp, Homo Sapiens
tcttccttgattgtgtagctgtccaaaataataacatatatagagggagctgtattcctttatacaaatctgatggctcctgcagcactttttccttctgaaaatatttacattttgctaacctagtttgttactttaaaaatcagttttgatgaaaggagggaaaagcagatggacttgaaaaagatccaagctcctattagaaaaggtatgaaaatctttatagtaaaattttttataaactaaagttgtaccttttaatatgtagtaaactctcatttatttggggttcgctcttggatctcatccatccattgtgttctctttaatgctgcctgccttttgaggcattcactgccctagacaatgccaccagagatagtgggggaaatgccagatgaaaccaactcttgctctcactagttgtcagcttctctggataagtgaccacagaagcaggagtcctcctgcttgggcatcattgggccagttccttctctttaaatcagatttgtaatggctcccaaattccatcacatcacatttaaattgcagacagtgttttgcacatcatgtatctgttttgtcccataatatgctttttactccctgatcccagtttctgctgtgactaaagactggtgggg

SEQ ID NO: 443459 - DNA, 1271 bp, Homo Sapiens
  misc_feature (1189)..(1225): n is a, c, g, or t
ctatgtaactgcaagatgctgctcgccaacacagcaacaccaggcatttcaattaaataattttattgggggaaaaaaaccactttgagcaccaaagcaagaaaagtgtattattcaatcagtttcccagatcacatgccaagaacacaatgctcactgtggtgcctggcagacggtccacaaccagcgggtgcgttcagcttgaatggaccggggtcccacagtgtttgtgccacaagtcaatggccttgctcacgatcgcgtctgagctgtcctggggaatattttccagaaactttgttatcttctctgcactgttcagtgccataacttttattttaaaggttaataaaatttcgacagctacaaaaactaggatcttacaggatccactcacaactttatcccaaaccctctgtaaactggattcaggcaaacatcccgcaaagcacctcttgaaccagagatcataaggaagtttgggcgccgcggaacacatcctcagatgagtcagcagtctgccatcttccagattcaagtattgttcaaacgcttttggcaactggggcaaggaatcccggtacttggtatttaattggttcacaaagcgtcgggtgatccagtaacagtcgacactatcttccaccatttcctccatggctttagctatggcaagaaacacttcatcatctggctccagtggaaaagagggacttcgaggtaacttcccagactccagctgatacatgcggagatagacttcagcctgaggtgtggcatcactaacaaagcgaacgactttcagggcatgaaggacatccaagtactgctccttacgatacatcatcaccttggcatgggactcgtggtgtggaggcaagattcctagaagcaccttccataccaatgcacggtacatggacgggagagggaacctctgactaaaagtacaaagtttctcagtatccagacggtcatcttttaggagaatttctaatgatttcttttcttcaactccacgaaaccccactttctcataatatactgaacgaaagtttctctgagagtcctcagtcatatttcattctgggacacccgcgcgcgcccagacggccggggagacaaaactcagcgccgctgccgttgccccgctctcgacgaattcgagctcggccgatttggcctgatnnnnnnnnnnnnnnnnnnnnnnnnnnnnnnnnnnnnncgccgccccgccggtgaactccagtcgccctatagtgatcgataca

SEQ ID NO: 443460 - DNA, 976 bp, Homo Sapiens
ggaatttccaaatttgtattttcgcatgttcagtccatacctttattttaaggttataaattgtgacacttacaaaactagttctacaggatccactcacaactttatcccaacccctctgtaactggattcaggcaaaacatcccgcaaaagcacctcttggaaccagagatcataaggaagtttgggctccgcggaacacatcctcagatgagtcagcagtctgccatcttccagattcaagtattgttcaaacgcttttggcaactggggcaaggaatcccggtacttggtatttaattggttcacaaagcgtcgggtgatccagtaacagtcgacactatcttccaccatttcctccatggctttagctatggcaagaaacacttcatcatctggctccagtggaaaagagggacttcgaggtaacttcccagactccagctgatacatgcggagatagacttcagcctgaggtgtggcatcactaacaaagcgaacgactttcagggcatgaaggacatccaagtactgctccttacgatacatcatcaccttggcatgggactcgtggtgtggaggcaagattcccagacggtcatcttttaggagaatttctaatgatttcttttcttcaactccacgaaaccccactttctcataatatactgaacgaaagtttctctgagagtcctcagtcatatttcattctctagtagtgcaaacacacccgggttgagactaagtggtccgggagaagcagaggaagccgtgccctgtgcgctgaccgaccgccgggcaggcgggcaccgttggggcccagggccaggagggacgagtcctgcgggaaggagggaggcggcggggtacctgggacacccgcgcgcgcccagacggccggggagacaaaactcaagcgccgctgccgctgccgctgccgccgccatcccgaaattcccgggaggcccggtatgcc

SEQ ID NO: 443461 - DNA, 929 bp, Homo Sapiens
  misc_feature (848)..(879): n is a, c, g, or t
atttctctcactgttcagtgccttacttttatttaaagtttataaatttcgacagctaccatactaggatctacagtattccactcacaactttatcccaacccctctgtaaactggattcaggcatacatcccgcaaagcacctcttgaaccagagatcataaggaagtttgggcgcccggaacacatcctcagatgagtcagcagtctgccatcttccagattcaagtattgttcaaacgcttttggcagtggaaaagagggacttcgaggtaacttcccagactccagctgatacatgcggagatagacttcagcctgaggtgtggcatcactaacaaagcgaacgactttcagggcatgaaggacatccaagtactgctccttacgatacattcatcaccttgggcatgggactcgtggtgtggaggcaagattcctagaagcaccttccataccaatgcacggtacatggacgggagaggggaacctctgactaaaagtacaaagtttctcagtatccagacggtcatcttttaggagaatttctaatgatttcttttcttcaactccacgaaaccccactttctcataatatactgaacgaaagtttctctgagagtcctcagtcatatttcattctctagtagtgcaaacacacccgggttgagactaagtggtccgggagaagcagaggaagccgtgccctgtgcgctgaccgaccgccgggcaggcgggcaccgttggggcccagggccaggagggacgagtcctgcgggaaggagggaggcggcggggtacctgggacacccgcgcgcgcccagacggcccgggagacaaaactcagnnnnnnnnnnnnnnnnnnnnnnnnnnnnnnnngacgtgacatcaactccaggtcgccgggcgggcgccgggcgatcccgaga

SEQ ID NO: 443462 - DNA, 717 bp, Homo Sapiens
agcggtgaacatggtgatatctcagtttgaaaactagagggcctatcctgagtatacatcaatgtctctttgatggcctactttcctcagtgaggatctttgggaatacttgagatggaacaacagaaatgtgtgaaaggaagcagaaacttcttgtaaataacgtgactcccacgacgaactgcctgaggcttcagggttttttcttgcttttaacactcttaaatctcctctgttggttcctaatagatcccagaaaagggaaaaataaagctgcagttaactttcttatgtgcatccttccaatagagtactgtatttttcaggtgttttgcatttaacataaaagtcctcgggaaacaggtgtcaaaaacagagagagaaatcctgggccatcacttcacaaatatcccaaacaagatattcttttcaaacagggctccctctcagtggtcatgagggaaggttgataatgttctttgttggggactgtttatacaattttttttcaactgtgagctttggaatcgtaacttgctgtgagtccagcttctgtctactgccataagatggaccccacgtcagcataatgagggtggtatatatgctcgcacctagacatgcgcatccgtacctgtcgtaccttcacggaaggaaaacaggctactgacgtttcggaggagtagccgccagtgcctatcgctttctggagaaggg

SEQ ID NO: 443463 - DNA, 1021 bp, Homo Sapiens
gccattagaaaccattgcggggggctgttttttccttttgtggctggggattctttctttattttcaagccggcccaaaggcgttcattccggggagtttcgttgggcgtttcttgggccctggagggctgtgaaaacaggctccaggggctttccattttctctgaactacagatgatgttccagggatctgtcgacaccagagtttgcgaaatatttgcagataagccaacaccatgagacacagtggtgccatgtatgtcaccagaaagaaacagatgtggtacatcttgggataaatttcaccaccccagcgctcatcacacaccgtaaagagggtggttttattggctaagcctgggaacacggtgctgcactccatgacgatggcctgaggaatcattataatgcaggagacaatccagatgatgacaatgctgttacgggcccgctttgctgtgctcttaaacatcaaagggtgacagattgcataccaccgatccaaggcgatacagctcagtgtgaggacagacacagacaccgacacggtctgtagataaggaatcactttgcaaagggactgtccaaaaaaccaggtctcagtgatatccacgaccagtgtggctggaaggcaggtgatggtcacgagcacatcagccagagaaagattgactatgaagtagttggttaccgtcctcatgtggtggttcttccacactgccacacaaaccaggacgttcccaatgagagccacgacgaacacgatgatgtacccggcgatcaggacccactcatattctttcgggtgcaggtattccctccacaggtaccgcaggaattcctcgtcgtcatagtcggtggggtttaaaaagggctcttgagtttcattcagctccgaagcagatgaccagttgcgacaagggggggagtcctccaatttggtgccggacatcacgggctcaagtccggttccgctcaatgctgcaagctcctcatcccgggaattccggaccggtaccag

SEQ ID NO: 443464 - DNA, 1312 bp, Homo Sapiens
tatctatgttcatcattttggtactacgctattttgacctcatgttggtgttacataggaggatttcattgctatgggccatgtggcttgttgatatcttcatgtgcgttgttcctgtgaacatttcgtttgactgcatgtcgtggggcaggatcctcgtccattggcacattctgcatggtacctcgttgattgtgcactccgtgtctgtgccactgtcaccctagagggagtgcaagtatggtaattacagtgtttataagaatgtgtcttgttttagtccagggatctcggccgtctctgccatcattatccctgtggcgtatccggcccgtggcgacacagagcaggctgcctgtcctgaaggccaggctcggggcttggggctcatgcagatgggcacagcaccttctatctgagagcaccaacgtggggtggggagggcacttggtcaccacttaagaggacaggtccggagcaccatcttcagaactcagctatgttggagggtgggggtctgagaggttgttgggggctgggggaggcagcacccccctcaccaggcacaagcaggggtcttcaggccctcccacacaggactcccccacctagcaaccacagaagcctttcctccgtggctccctttggaggccacgtggtagggatgtgacgtgtgtccatcctgcccttgggaaccagaacacagggctggcagctccctggagggtggatctgtggcaccttggggaaggggctccccgatgccatctcacaggagcaagcacttgagaaggtgggctcagcaagtgccacacagcccagggccagatgcggggagctcagactcccagatcccatcctccagggagggcacagagccaccactgctcagacaacccaggccctgactgctcagggctccagaagcactggagtggccctgcctgcctgctacaccccggcctcagctcctttccttccacacccagtcccaggcacccgccaaggctgcagagtggggggccgacgtcaccctggggcctagggccagagaggccaggtttcagcagtgcaccctggccccagcacacccacagcagctgggagaaccagcacaggctccaagggatgggtgccaggcgtggccctgacaggaagggatgtggggcaggcaggggcgccggcagctctgtctgggctgctgggagctgcaactgaggggtctagggtcggggctgacgctggggccatttgcactgtttgaataaataaggttttttcccctcgcttttctttcctcttcactgtgcat

SEQ ID NO: 443465 - DNA, 695 bp, Homo Sapiens
agcggggaatgacgcgaaactcctgccttaaagccctaaatggcggcttcaatatcagccccactgagcatgaaattcatttacttaaataaaatctgaatctcagcccaaacctgggagattcaaaacctgagagcggtcttaccaaagacgcccgtatgtctggtgaagtcagttggatgcaagcagtttgtgctggtaccagggccccagctactgatgaagtggcaggagtccacagaagcctacttcgaagttcccggggcttccaggggagattgacgagattccttgggaggcgattcatgacagctgagttccttttggaggatccgtcttcaggcagtctgatcccccaggaaagcagctggaaaacaagagcatgtgaaggaagcgcagagctcctcgccagccagacagccagccccgcaccgagagtcgacatgcacggcagcctagacgcatcagttaaacttatatgtaggcttgttgaggaaacgactttcaaacacaaggcaaaagaaaaacatgaaaccaagggttccaacattcatcatccagtttcagagacacccttgaagggatgctacagctctttcttacccattcaaaccagtcggtctgctgcatacccacatcacagggggccctcagccccgacacacaggctcactcagccagggcatcagcactgt

SEQ ID NO: 443466 - DNA, 1740 bp, Homo Sapiens
  misc_feature (1663)..(1664): n is a, c, g, or t
ctaagttcaaaagtacatttatttaaaatgtgggcaagatatcaatataaaagaaaacagagtataagaaataaaaataatcaaagtacaaaacatttcaaatctttaacatccataatttagagatagcaaggtctttatttacaccattttatttctagttgaagtcccgtaacagttttgtgaaaacatttaaaaacctggcaaatgaatcataaaacctaatgtgggctcttaaagtcatataatacaaaacataatttatgtttcctcagaataaaattgcacatcttaaaaagatgcagtatatttattatatctgtcttcctgcttcacagtctgatcccccaggaaagcagctggaaaacaagagcatgtgaaggaagcgcagcagctcctcgccagccagacagccagccccgcaccgcaggagtcgacatgcacggcagcctagacgccatcagttaaacttatatgattcatagtccagcgtttgagtgagcactccagtcagaacgaactctgcattgtgaacatctatgcctctggcaaaatattctcggcataaatgaaggtcattttcacaggatattaaaattatttccgacaaactcgagttctgcttgtgctccatgagcttccggaaagatggctgcttggataacacctttcctcctgcacactctacgattgccttcatagtgggaagacttgggcagattccaggtgtgatgtaaaaatattttgccttaaagagtggagaaacgtgtgcccgttttaaggattcttccaagctgaaagagaaaagtacttctgcctcagcatctcggagaatgtagttctgctcatcaatgaacttctgacacctgaagcattcttccagccactctggcgtcactatgtgctttcaacgacagaaaatcgccgtcaggaactttccggtggcgagtcactttgctggcaatgaggtgtgtgcacttctgtgcagactccgcaacctctccaccaagaatgtagagcttcttaatatactgttgaacctggacaggctcgaatccagtgaaaagcacaaaggggtccattctggagttagctttttagtgggaggtggtacgtcttcaattctggctcttttggaagaaggctggacattagctacttcattctgtttcagtttgggaggtagtcttatactcatcaacaactctgcagacacttttaagggaactctccaagcatctaaaagatttaaaactaaatgctgggtaggggcaaatggatcctgcagactgaatgccgtgtagcgactatactgaatctgcctcagtgcctcaaagtttcccagaagaatgtcgccaagccactgggcgttgacacagggtatcctccactctttggctttttcatactttaaaccagttggttctttacagatgaggactgtgttgctgcggcatagataacccgtatatttggcacctgccaaataagccattaattttaggtcatctctgtcactatcaacaaatccagtcacagaaataatatgctgtgaacatggctttcctcctggtgggaaggccactgggaagtgaagggctcggtgcggcggtaccattttcttcttctttaagactgtgtttaaccagtgtgccagtaacanncatctctttctttctcttattgcctgtgcatacgcgctgctgacttgactctcacagagaaggtgcgcctcgtgcc

SEQ ID NO: 443467 - DNA, 531 bp, Homo Sapiens
  misc_feature (39)..(40): n is a, c, g, or t
  misc_feature (73)..(130): n is a, c, g, or t
  misc_feature (161)..(161): n is a, c, g, or t
  misc_feature (218)..(263): n is a, c, g, or t
cgatttagaatcacaagcttgtcaagtattggagctggnngggaccttagggagcattgaatctactcacttnnnnnnnnnnnnnnnnnnnnnnnnnnnnnnnnnnnnnnnnnnnnnnnnnnnnnnnnnnagctggcatccaaatcactattgtttctcanaaaatatcacatggtggcaaatggagcataactctgtggggctggacgacagctaannnnnnnnnnnnnnnnnnnnnnnnnnnnnnnnnnnnnnnnnnnnnncttacaagatggtactgaagatacaaagatggatgagacacagtcctgcctccaagggcttatgaaagtcattggaggccatgcttcaaaacctttcttagcagaaatattactgaccagggctaaggttgctggtgataacaaggcagctgctgccctggagaggtgatctcacaacaggtggcactttctccccttcactatctatcagaactaatgcctgttactcagctgctaggcattaaaattcttgaaaccctaaggacac

SEQ ID NO: 443468 - DNA, 719 bp, Homo Sapiens
  misc_feature (61)..(134): n is a, c, g, or t
  misc_feature (185)..(185): n is a, c, g, or t
  misc_feature (205)..(205): n is a, c, g, or t
aagagacagggtctcacactatgctgcccaggctggactcgaactactaggcccaaagccnnnnnnnnnnnnnnnnnnnnnnnnnnnnnnnnnnnnnnnnnnnnnnnnnnnnnnnnnnnnnnnnnnnnnnnnnntaaaggaacctaggtgatttagtcaaaagagaacactgcatgaaccaaggncctcaggtgcttcttgctgnccttcatttccacagaggagaacacagggatttagaggagatggaaacattttctaggcagttattgaataacggatctttggaggagttcgtggagtagtgtaaccagaaagtctttaaaattaaacccttctaatcgtttgtaagtgtagatggggggacttggaaatctccggggcctaatcatgctcgcaaaaggagtgacattaatagctttggagatggtgtcttcctctcctttcccaggttaagttcaagcagtaacagcagaggttctacctccttccatcgagtctttaagctggacccggggaaataactgttaggaaagaggcaagcatccaacccactcgagctgtgggctgacagtcccactgggatcgtcccatggagacaattgcaagtcttttgcatgagctaaaccccgctccacatggaaccgaaggtgctcattgtcagctaccacgcaatgccattatcacctttcagcccaagtgccacagaccaacactgg

SEQ ID NO: 443469 - DNA, 1068 bp, Homo Sapiens
cgtagatggagtacttatactgggtggacacgagtgctgtctacgcacaattaccttcaactgacaaactcacttggtaataacgctttcacggggcgccctctattgaatgcggcagcttttaggctgaaattttgctaacattacacacacggggtgctaaacagttaagccttcttcaaccaaactaattattatttaccgcaacggagtaataaagtatatccgacaccaaaaggagcaggagacaccgagtgaggtggcctttcctccccacatttaccgtagcccccaaggttttgcggtggttcgccaacccgctgaccctcggtagggagagtgtaagaaaccaaagtgttcaacaccgtgtgcccgacaaggaggttccataggccttcaccttcgggggaggaaatctgccgagcacctggggataggttccaaaacctggaagaccactgggcgggccccatgtgcactccgatgactgtccatcgtgtgcccgtccccgtgggaataggggacttgaccccaccactgcacggttaagagcgcaacttagggatcctacgggcttggaggaaagggcttagtacaaaaggtcccctcacgtacctaggaaaggggcgtcccgtccaatcaagccaattctatgttgggaacatcagggaccggggcggaaccccaggtaaggtgcaactgttgggtagtctggagctcccaaggctgagggcccggcccaggccccgggggacccaccttgctccgggggcccgtcgggggccagccaggcgagctcttgggggaccggcagtcgggtcatcaatttgcccgcaggtccttgtccagctcggcggctcagctcaggccagctctctctccagcagcacctgcaccagcacgccccgggagtgcctacgcgcttcctgatcccgcagattccgcagtcctgccagtttctgccaagttgtgtctctgttacagcaccaatggggttccgccatttcctctcccatcttctcccgccctcaaggcctggcttcacatgtgccaatccaggttcccccg

SEQ ID NO: 443470 - DNA, 815 bp, Homo Sapiens
gtcaagagaattatcaaagagcagttccagtactagccatggcataagaaagcccaaggattccactgcccacaatcgcattgctcagattaaatactgacattcccaaggaagtagtacctggatgaaattctggttcatacttcttcttccccaaattcgattcaagtaaaaagttctggttttcaggatctacatctgcataatggcttttcagagcagcttgcttggtggggttaggagtagtctgaagtcgctgttggaactgtagctgctgctgtcttcatccggggaaatactgaatcgtcccatttcggccttcttcatgctaagcactgggaggaatcgggtgcagctagtagcgctgggctccttttgtccttggcggtgggtgcagcggcccgcgagtcggcctcggtggtctctattctcacgcagacgtcttcagtgggtttctctccagtcaaatacaaatcataaaaatacatacatggaaatgttccccatatccgacaacagtgcaggaaaaataattttaataaaaaaggaaaagacaaattgccgccccaatcctccggcgtccgccgtgtcaagggaaaggcgcgagcgtgcggtaacgcgtggtcgggctgctgctagcagtactggaaaggcgttctaaggcggcggcgtcgcgcggctgtggagcagccctgcgagcggcgggttatagcggcaccaccggggacgcgtcagtgggcgggaccgcggccgcccgggcgccttctctttgtgtatcaacaccacctgggccccgcctccgacccacccccgct

SEQ ID NO: 443471 - DNA, 390 bp, Homo Sapiens
gagcaggggtcccagaccaggccccagcccacccatgtaaaagcagtcaacctacctgtctaggccagattgatagcgcctccacttccctttgaggcaccgtccttccccactgccctctccttacccaggaggaaagagccagttgttgaggctgctgctcattgagtttcttgttctcttggttaaagctactggttcctgaaggtgggttacgtgggtggggatgctgttgattttaaatatctagaatcatccttctaattcttggctgagctacagctgcctcaacctccagagttgcctatctcaccagagaattcagggcttttgggttgttggtaaggccacgacttttcttctctctctctctagtttgctcctgccttc

SEQ ID NO: 443472 - DNA, 652 bp, Homo Sapiens
ggctgacttcctcttttattacttatcttcttgaccctgccttggctgttgggctctaagagcatacaaattctaccacctccagctaccaatgcgagccaagttctgagccttgagtgggaatgtggcacaactgggcactgggtaattaagtcctgggtccaggccaaaggaggacccagccttatatggagttcataggacagaggcacatgactttcttaggaggcagccaaaggcctctggactgatcagggcatcggtggcagaggagcagggtgacaggccgcctttggctgggctttatctgggctgatgctgaagctgtagaggccctggagcacaccattcaccaccacgttgggcagcgactctggggaggggttgcaaacatagggatccacatggaagctcaggacaggccgctggtgctgctgggagctgctgtcgccaggcaggaactccctcagggtgccccagttgctagccttggggtctgtggggaagtgccgaagtctcaggaattccagtaactccttgggcacctcctggttcaggtacaggatgccctggatgtaagcctccaagccctgccggcgctgttccaaccctctggtcctccagttgggcaggcgtttcgaggggaagtcgg

SEQ ID NO: 443473 - DNA, 930 bp, Homo Sapiens
tgttggtgagctccttgcgttcagcatcggaggcaccagtacgtcagcagtggcgtactgacctggtgttcatggacctgggactaccgggtgccggtacgctctgttcagtcctgttcagccaatccagagggcggtcgttttggacctattactagacctcagaccatttgatgcttggagtcgctgtatacatccgctagttttgggttgccttcctgccatgccgccagcacctctctgtctgggccatcacccctggcacagaagtgccggtgtgggcaaccagctgtggctctcgcataccctggatgtaagcctccaagccctgccggcgctgtttccaaccctctggtcctccagttgggcaggcgtttcgacggggaagtcgggcacttttgtacagcttcttgatctactggaggttttaccgcgtgcgatcacaagcatcccgagctgagccctcaagccctcttcgccccagccagaagccctcccgcgcccccgccttcgggctctactgggacagaccctggttgagtggtggaccggccgagggcgaggaaggccccaacccacccacagagacccgggggctgaccggctgcgcagggactgaggcagtaatggggtgcaggaggctggggctcgcccgcccgcctcacagggcctgggcgggggctggacagaggctgggccggggccggtgggaggtcggcgccgcctcacccgcttgtgcagcgcgtggaactcgctgtagcgccttggcaccgtgtgtctgcgcccgctgcacagcacctccactcggaacaccatgtggcttttctccgggctctgcctgggcccctcggcctcgggccccaccgacgggatgtgaacttccagcatccgcgccccggccccagctgctccgcgcgctcggctcccgct

SEQ ID NO: 443474 - DNA, 638 bp, Homo Sapiens
  misc_feature (308)..(340): n is a, c, g, or t
atagctgctccagagggaaactaaagccaaccaccgctatagcttatctgttggcacttctttatcagttctgactattctttaaaggccttaaaacatgaatttgggataaaaacaaataaaagtgcccaagttttaagaagccatatgttaacttaggatgttatctatatattttttagaccaatcaatgttttttaagaggtgtagatactggtaacttttctctttaaataaatgtttatatatttcaccagcaacactggcctgtggcacacagcatgtttaataaaaacacattgctattnnnnnnnnnnnnnnnnnnnnnnnnnnnnnnnnnccctctagtttcaacagaaagacttacatccagagattcttttcccattatttcttaggacagccacagaactatttcaacctgtacccttaatccagcagatacatcttaataaaagaactctaattgctaagtactgaaataaaacattacttacaataatttcctagttatccacaactttcttcttgtagcaattgtgaacttaagatgacttgtttttataagctcctcagtgtcaatatatctcaacaatacatttattacttgtacaatatattacttcacacataatacc

SEQ ID NO: 443475 - DNA, 502 bp, Homo Sapiens
  misc_feature (266)..(266): n is a, c, g, or t
ttttttttaggagaacactctttaatggataaagcctgtccaagtactaaggacaattagagtaggcaggtgacctgtacaaagtattagtgataacacaacattcagcttcctaagagttaaaacgtgctgcttacatgaagggagatgatactgagctaagaagtcctggtatagagaagcagagagaccaacctacttcatattatttataaaatagaggaatattctcagctaacatgctggggaggaaaaaattcttcccnaaaagggcaggaattacaatcaatgccaaggtttacaaattccatccatgtttaaatataagggacaaaaattaaacatttctttattttaaaaaaaaccccccaatttcccccactatagcttatctgttagcacttctttatcagtctgactattctttaaaggccttaaaacatgatttgggataaaaacaaataaaagtgcccagtttcagagcagaacggggccgagcctg

SEQ ID NO: 443476 - DNA, 1547 bp, Homo Sapiens
  misc_feature (1401)..(1401): n is a, c, g, or t
  misc_feature (1494)..(1494): n is a, c, g, or t
aaaggttcacctggcccgggataaccctgggctcaggagaaataggggtagacgtcatagttcagggccagtcgggaagtcctgatgcctggggttggggggagaaaacggcccaggcccgaccgctggggacagctttacagtgacagccaggctgggccctgcgagaggcagtgaaacagctcagctccaggcaagcccacctttcgtgatcccccagggctgagagacccagttctgccactggccggggcttcgtctagtccaaggcctctgggtacaggcttcaggttcttggttcagccttcacccctcactgttttccgccagcacaagggctggggccctggggggagcgtacaggggccaggatggagccgaagaacagtgagcggaacttcttgggtgggggagttccaggcactgtactgggctcagcctcatcttcctcctcggagtggggaccggggctcttggggggctgggggccaggtgaaagggaaatggagggcagcacccgcgagccctcattgcctatagtggtttccatggcgatcatgtaagagtcaatgtcgtcattggcaaattcgtccgggtggggtgtgctgttgagcctggagctgaggcacttggctggtgacgctctggggagcccaggtcctgggagtgcgagtcggtgtctgagagtgtgggcaagacaaagtggccgtccagcaaagagtccttgatggtgaagatggcgggcctgcctggagcatcaaaatgaatgctaagattcaagtttgctgactctgcaaagctcaggagcccccggaattccttgaggcagaaagtgatggccaccccttcctgggcctgcagctgctggaaatcctcctctccaaggcacatctcagtcaccatggctttggcagtgctgtctgcctcctcctcgtggtagtgcgcaggatgaccctgcggccacggccaatgcccagcgtcacttcagccagtgcaggagagaagggcagaacagcctcccccagaacccgtgctggggcgcggagcatgtgggggcacgaggctgggtcgaagacggcctgcagggactcacagtcctggaaggacaggttgtgagtcttccgcaccccgaacttgcaatgcagctggaccaccaggcggctgctccggccattcagggagatgcagcatttttccaccgtcttctccagcatcgccagtgagcggaagacagacaggaaagacttcatcaggatcttacagcgcagcaggtcctgaccaggggtggctgcctggtattgctggaagaagagcggggcaaagagaaagcaggcataggcagagcgggaggagttcaccgtccggagggagagcccgtcctccaagggttccaggtagagnttcgtccccgatgcgggacagggagtggacggccttgccgagcactttcacgttgccgcccgtgaccaggcacttcatgctgccccagcgctnccgccagcggccaacactgcccagctctccgcgacctccgggtccggggtccc

SEQ ID NO: 443477 - DNA, 2128 bp, Homo Sapiens
  misc_feature (1114)..(1126): n is a, c, g, or t
  misc_feature (1450)..(1463): n is a, c, g, or t
tactgttgacctgtcactgtttattatttcagcactaaaactgaggagcctcaactgctggctcttcttccctttgtatttgtgtaaggagcactgcactcccataaaaggttttaaaatacaaaatgtacaagaacacacaattccaagtgctgtaaacataactgagaaccagttcctttactaaacatccattttataaaacacaaggtttcaatttgagcccatctgagccttaaagatccattctgaataccaaaaacagggcttcacagccaggcccagaagaggtctggtgataatggctggccctgggtggggatagtttacacccgggcagcagcaccacacatgaacccaaagacatgttctttttaaagctgttttcagccatgtttctctgtgcatctccagtaagcagaaggctacccattccaattcctcaacccaagagctagcacagttagagtaggagggggtgcgtactagcacgtgcccagttgctcagtgctgctagtagaaattgatttgcatagtccaatggatgtgtgctttaacaccactatgttgcacaaaaatttaagtctttatctacaaagccaaaaaatattgactcttaacaccaaagcttttacaaagctgatataaaactgcttacatagtatacaaagctctattttaaaatttaatgtttattttaaataggaaagcatttctagtgctacaggcatcaaggtatttagaaggcatcaaaatttggtgcatagcaactctggatcatagaggcttttaattcttgagggcacaaagggtattgcaaggggaactcttgcaataacctcatgtgaggcagctacaccaggggcaaaagggtaggggcaagtctggccatttctctggaatgtcaaccgagaggccaacttcttgcccctccaaaggaagctgtgggcgtccaaccacaggcccagaagcaaatctcactatccacattctgtgacacaactcacttttcaagaaaatttgaaaacacccagctccaagaggggccacagtgatctgctgaagaatagacctttttctctaactaactttaggggagaaatctaaaatatannnnnnnnnnnnnaaagaccatacttcctcatcctgagtcaacagctcctaacctactgacaacaggtggtgggcaataggccagctccctttcccagacctgaactggccttagtagagagagtcctggcatcaagggcctgcagtctcctggaataacagcatcaggccttcaaccagcacactgtctcacatataggcacatcaaaaaatctgcttcctgaatcaatggaagtatattatttcatttgaaagcatactgcaaacttcagaggctctgtaatgggcccaggaacaggtaaaaaaaatcccattagggagaggggtaagggcaggnnnnnnnnnnnnnnaaagtacccaactcgggtacctcctttggtagacagcaggctgcagtttctgctgggccctgccttggacaccagtctcaccagcagcagcaccagggtgtctttggtgtggagggtcaggttatcacttctggatgtgctcagagccttctggggaaaaggctggtttttagatcatacagacaggacagggtaggccagaatcatttcaggctataaatagaatggcagataagccttccatgccagtgtgactcttaaaaccttcccatctggagtcctgtattttctctgcccatgctgatgtactgctcatttgtgctttagctctgcacacagcctggcctctagctagagttagaactgcaaagctgcctaaaccactgagactggcttcaaaggtcacagaacagccaaaggcagatgcttctgtttggaaaaggttctacgaccagatgacacaaacaggaagcgcactccacagcctactagtttttatgatggcaagaaatgaaagtgaccaagctagaaccccaccattcagagtcacctcaaatgtagccatcttacccagggtcctgagggaaaaagcaatttcaacatggagccagtatggagagattgcaagattacctagaaagttaccaaaaggctatgctctggaa

SEQ ID NO: 443478 - DNA, 1076 bp, Homo Sapiens
  misc_feature (69)..(69): n is a, c, g, or t
  misc_feature (518)..(576): n is a, c, g, or t
tttgggtttgttagttttgacaatcaacctagtgcccagactgcatttcaggcgatgaatggctttcanattggcatgaagaggctcaaggtccagctaaagcggcccaaggatgccaaccggccttactgacctgctttcactgaccagccacagaaagaaacagaagagtgagaagaaaggagaggaaaagcacagaaacgcttgagcagcccttcccgaaggagcagctgcggacggaggtggatcggacccaaggctggtgcctggggctaaggccactctaaggattgtttttatcaagtgggttgttctgtgcctgcagcatagagcgcaggctggcagagcaaatagggctggtgaggagtgactgtccaggggaaccagcagagggcgttgggggtgccaagggcttctccgcaagggaagcccagatttacttctttcaaaatcatatcattccttagagtttagggaccaaaggactattgcttttttaagaatatatatatctatannnnnnnnnnnnnnnnnnnnnnnnnnnnnnnnnnnnnnnnnnnnnnnnnnnnnnnnnnngacagtatagagtctcataaaagctgcctttaaatatccctaggagacagggtgaaggagacccttgacagccccagcctaggcagatgggggctgtggaaagattgttctgtgtctcattccctcttaagccactcccccaccctgcccttttaaaaataattaaggatttgaggtctaggctcacatgcaggtaattagaacgttatggaagcagtgaacccacaatccacaatccccaaactcagagtgcatcccagaagaggccccaggcaggagctcaggttggccctggcttttgccatcccgggaggccccctagccagcaagagtgggattgcctttcctgtggaaccactgcttccccaggggggaaggaaagagggagtttttggccacctgagccttttccttgccaatccaggtagacagaggccttcctttggctgagctgagacacttcctgtttccttccccttgaaccagtccagtgtcccttg

SEQ ID NO: 443479 - DNA, 1140 bp, Homo Sapiens
  misc_feature (101)..(101): n is a, c, g, or t
  misc_feature (1056)..(1087): n is a, c, g, or t
caagtagacgggcccggaaatccccgcgtcagaaggccaaattccctggagtaccttcgaagcgctgcagaggcaattgcaaatctgtgcagaaaaatagngtctggtcgatttccccccaagagtgggaaacgaaactcgtttaagccccggcaaaaagaacaaatccccaaggagagcgggtcggatattccaccgggccatccccaaggaagttgcaccggggccccgggttgttccccttccggaagggggaagggttgaggccagccaggacccagcgtggtaaacaacgacgtagtagaatggccccggaccaccgagggagttgaaagcactcccagcgccttgttgaatgtacctgaactggacgatgatgctgcagccggagcccggccaggagtaccaggcacaaggcagaggggctctctgactggacgggttgttatgcaagatgtcttgggccagccagcccgatgcccttggtggaaggcacggtgaaactgcccagcaaggagcagatgctgatgtagaccatgatgttggtgggcccatgggccggcgcgatccagaagatgagcagcagcagcatgagcagcacgatgcacaggtagcccacaaacactggattggtcagcttttcctccagctcagcctgagtcgtcacactctcagactttggggagtggataatcagcacgacggagcctgcacagcttagcaggcaccccaacttgcccaagatgttgagcttttccttcaggagataggaagctaaaatggacccgaacggtactccaagggcgcccaggggggttaccaggaccgtggggaccgccgtgtaagccaggaagtttccaatctggccaacagccattgcgattgtgccagcccaccacacaatgtctgttaaataggaagtacctcgccgcttggcacgcacgatgcccttcttctgtagcacgaacgtggacccgttcaccaggctcgacacgacggccacgcccaggccgagcgacacggcggcgggggtcggactacgcgccccctccccgnnnnnnnnnnnnnnnnnnnnnnnnnnnnnnnngagcagcagtccccattccgcccgcgatcgcaggaattccggaccggtccagc

SEQ ID NO: 443480 - DNA, 1301 bp, Homo Sapiens
  misc_feature (853)..(897): n is a, c, g, or t
  misc_feature (1060)..(1060): n is a, c, g, or t
  misc_feature (1136)..(1136): n is a, c, g, or t
  misc_feature (1143)..(1143): n is a, c, g, or t
  misc_feature (1181)..(1181): n is a, c, g, or t
  misc_feature (1197)..(1197): n is a, c, g, or t
  misc_feature (1207)..(1207): n is a, c, g, or t
  misc_feature (1214)..(1222): n is a, c, g, or t
  misc_feature (1227)..(1227): n is a, c, g, or t
  misc_feature (1243)..(1243): n is a, c, g, or t
  misc_feature (1256)..(1256): n is a, c, g, or t
  misc_feature (1263)..(1263): n is a, c, g, or t
  misc_feature (1287)..(1287): n is a, c, g, or t
cggtccggaattccctgggattataagtatctacaattgtctgtttctgtgttagtaaaagacaattgtagatacttataaaagcacctagagtgctataaataaaatcagcgagttaagccatttctgctttctgcttccagtagattagtgagtttagtagattaatgttttactctgtcccacccccaaccccatcagaagaccatattttagaattataaagatgacagatattgttattgttacttgtctcttttgggccaccatggaggctctatggtaaagcactttgctgacagctggcacttttcttatacagacacactggagctgctgagctattcagtcttgttccttgacatgaaacacacaggcttgaactcatttagaattaatagcagtgtgttagcctaaaggaagtggcttggggctgtctgcactgggattcttgggcacacaatgtaggtgggttaaggcaagtatgtacggtacagcctttagggcaaacaatctgccatttcggacttcgggtacaaggtcatcatggcatgtttcgtttgtttttgcaattacattgcctaagtagccgtggtgctgtcaagatgtatggagtgcagaagacagagctctcaaactaatgtgccttggatgacttcccagctcacagaggccaacccgctgggcctgcagaggagttagcaatgggccgggaaccgttgggcatcaacacatctccttctgaactttccgaaggcctgggagaaaggggcctgctttcaggaaatccaagatgggcgtgtcctgcatatttgtctgtttcagttagaaagaggaggtcaagtggaattgnnnnnnnnnnnnnnnnnnnnnnnnnnnnnnnnnnnnnnnnnnnnnatgtagaggctttgcatttgttttgttaatacgtgtatgtatttaaactcagttgcttcttgctcttcatgaaatgcaggaggccactgcgaaaaaagttctttgaaaggtccatgggctgacatactgaagtcatctgtattattttgacatgtacataggnctgtagttgtaaatgaggatgtcttctgaggcccttgatagccataagagtcaaagccacctatggaaatcaaagnctgtccncttcttcagttatacatttcacaacataacagggcgtngatggaaacctgaccngtgcgagggncaatctnnnnnnnnnaactntggaggccactttctnatggtactggggnacttccnggcaaacaccctgaggaccctggngtaggcctggggtt

SEQ ID NO: 443481 - DNA, 789 bp, Homo Sapiens
ttgttactgcaatatatttctttttatttattattacttagaaggttacaatgtagtgttttacgtagcttttctttaatagcagatagaggacattttgcatacaaatacaggcagaaaaaaaattaacacatgactttttaaagtaagaacaaggaagacaccaaatctacaacttggagttgagagctcagggaattgttttttctttaaataggtgctttcttgggtatgacatggcctgataaaagctctagactttgcagactgcagcagcataaagcagtttccaatgcaatggatgaagatggatctgaggtagaaaggtggtcatggctttcctttttatataaaacaattttcttcttttcaaaatatctctgctgcaaatagacacccttgccccccaacccacccaacctattctaaaataatagcaatttctaactttaagcctccttctggccagatcccagctaaagagaacccaaagttaaaatgtctttatgtttttatgtctttaggtttgaatcaaaacatattattttcacctttttttggttcctctacatttgctaattaagtaacatgtttaaactgaatcaattaaatgttaaatcagaagctaaaccaaaatacataattgaatgcactcaaaaagatgtaggtggaggtaccatcacctaagcattaatttcattcttctgtagaagcagtgacatagacttttgataaacattctttccaaatatattgatcaagtgaagggtataaaaacatctgatctcc

SEQ ID NO: 443482 - DNA, 835 bp, Homo Sapiens
aggttgcgcagtttctctggttttcatttcgggtcctcgggcaggattccgctgtttcggggtcggtttcagtggttgtcctccccatcgtcatggggctttgtgggtctgcggggtgccagcacgcagctcccgctcaatctcctgctcaaactgcacgaggcgtggggccagcaggcccaggcgtgccccacgccgcgccacctccagcaggcacagcaccaccgctcttctcgttcttgcgcagcaccaggtcctcaggtctcatacatgagcacctccggcacacccagctccacgcggcaccagccgatgaaggtggccacgttgtcgcgcgccatgaaggagccaggcactacactgtgcgcctggaaggccacacctcgggccgggcgggcggcatgccaatgcacgggcagcctcggtcacggcgttggcatgttggcacagggtcgtgcccgtggccagccctgtcaggaagccatcgccaccacccgggagacccaggccgtacaaggcattgagccactcggccaggtcctccttcatggcctccacgtaggcctcactggagcgaaatggccgcacgctcttggccgccgaacccgcgatgcccgccactgggtctgccatgcccggaccggccgagtcactgtgggcaggaacacagttcaggatcgctggctcattcccagcggccccggggagcattgccccaacagggcggccaggagccggaccggtcccccgcagggaggcgcagcccgagcacgcagcttatatgcatacccgacagcgtggtcgacatatcccggaattccgggccagtaccagc

SEQ ID NO: 443483 - DNA, 1743 bp, Homo Sapiens
  misc_feature (82)..(118): n is a, c, g, or t
  misc_feature (201)..(215): n is a, c, g, or t
tataaactaaaacggcatggtggggcttcttataatccatgtggggcggggataggcgacgggctaataagggcgtatggtnnnnnnnnnnnnnnnnnnnnnnnnnnnnnnnnnnnnnaggcttggcagtagggggaacgagcggggaagtgacgatcgcgggggaaaggagggtatattggagggttcggggcgagaatnnnnnnnnnnnnnnnagcgagggaataatggtgagcgggcggccctgatgatgggggtgggtgggaacagaggctcggggttggggttggggtcaagaaccagggcggggaggcggcgggcgtagggatatggggcgggcctgggtaaaacgtcgggggggtacgcatcccgccgcccgttggcaaacattagggtgggtcctcggcgacagccaaaagatgaacgagcgtggatccccccacccggtacttccgctttgagaccttgatcatggaaaccggtcagggcaggtgcagcggcccagaatatccctcaccagctcgtcggaggttgcgcaggtctctggggtgtcatgcgggggccgcgggcaggagtccctggtgcgggggcggtttcagtggtgtcctccccagcggcaggggcgttggggcctgggggtgcagcacgcagctcccgctcaatctcctgctcaaactgcacgaggcgtggggccagcaggcccaggcgtgccccacgccgcgccacctccagcaggcacagcaccacgctcttctcgttcttgcgcagcaccaggtcctcagtctcaaacatgagcacctccggcacacccagctccacgcggcaccagccgatgaaggtggccacgttgtcgcgcgccatgaaggagccaggcactacactgtgcgcctggaaggccacacctcgggccgggcgggcggctgccaatgcacgggcagcctcggtcacggcgttggcatgttggcacagggtcgtgcccgtggccagccctgtcaggaagccatcgccaccacccgggagacccaggccgtacaaggcattgagccactcggccaggtcctccttcatggcctccacgtaggcctcactggagcgaaatggccgcacgctcttggccgccgagcccgcgatgcccgccactgggtctgccatgcccggaccggccgagtcactggctcatcccgcggccccggggagcattgccccagcgggggccggagccgggccgggccgccgcagggaggcgccgcccgagccgcagctctatgcgtcccgcgccgcggcctcctcctcgccgccgtctccgccccgcctccctggaattcggatcctgcccggagggggcgggcggggccgcgcgctcttaaaggggccgccccttccccgagccggcgggagctggggaggagctggggtctccccccgcccgcgatcgggccaggaatcccgggtcttcgagcgctctcgacgcagagagccccagggcccccagacaactgcgaccggcccaggcgcccaacccccacccagcctagtacccggggccccgtccaacctctttggtctcctggggaggaggttgggaccttttaatcgcccccctccccagacggtgggctccccgggctggcgcacagcacggcctgttcccaagatgaagtcaggaagcgatagcggctggaggctgcaaagtcacctcctcccgggtggacctcgcctggccagataaacggcaccgccgcg

SEQ ID NO: 443484 - DNA, 754 bp, Homo Sapiens
  misc_feature (470)..(470): n is a, c, g, or t
gcatgcggaatgaatattttattactaggttataaaaataaaatacaaaataattttaaaacagaacttaaaacactgtacaaagctttaatatgatacaaatgggaaaattaaataaataattacacttttatgtacaggtggcctatacaaaagcactccatgtttctgccgatactctgtccttggttgcctgagcaaaattgtataaagggagctgcttggaggggaaaggaacacaataaaacgcctctggaggtatttcaaagagtagtttctcatctctctgatttcaggaagaggagaagagagggagagaaaagtggaattattaaagtcatctaactcattggtcttgttcaacaagaaagaattctggtttgtggctgaatctgatttaacagctgccaatagctcattacttctaagatgtatatctaattcaaaactagatgctcccccctccctcnttttccctaaaagctgggaacttgtaagtaaatggcctagtgaaatagacactggctattttagaaaaagggtcagaaggtagaccaggaactatgtatcaaggagaagtaagtgaggctcaagcccaggccacctaggctgtgtttattcagtccacccaatccaatgtcaaagccccaagtgggccagtgttacctttatcttcccatctttgtatttctgaaagctttgtcacctcagtggactactttggctgatgaacagttcaaatagaagattgttt

SEQ ID NO: 443485 - DNA, 421 bp, Homo Sapiens
  misc_feature (30)..(30): n is a, c, g, or t
  misc_feature (194)..(222): n is a, c, g, or t
tggtgatgaaataccaaatgccacattccngattaggtaaccctgccagcctactaaataggaattttatcaaaagaacccataaaaaccgtgagaaagagaatgacataaaatagttgaattcccagtgaatgactttgtacagatgctgaatatttggcactctgctcatcctcacactcgatatgatttcnnnnnnnnnnnnnnnnnnnnnnnnnnnnncttctttaaaactttaaacagctagtttccctggttctaacattccttgaatttctataggaggcatttaatatagtccttaggccacacctgggtattttggtctgtagtatggaaggtcgggggatgagttgtctctctctgcagggaggacctgtcctgcccgagagcgaagtggcttaccgttcggaaggaagcg

SEQ ID NO: 443486 - DNA, 1260 bp, Homo Sapiens
  misc_feature (426)..(454): n is a, c, g, or t
acttttctcaaaaaatttaattgccaaactatttacaggaggtgaacatcagcgatacagaagtcaaatggaggcatcgtcacaggacggttatggcggaaacggtgcacagtttcttacagtcagctgagagtgaaaaaaagtcatgggaaaaaagaacacaaataaagcaatccttaactgccttaaaggaatgaccaacattctggtaagttattaagaggaagtaagaaattgtcgtggtgatgaatagcatattgcacattcagattaggtatcctgcatgctactaaatagaatttatcaaaagaaccataaaagcgtgagaaagagaatgacataaaatagttgaattccagtgaatgactttgtacagatgctgaatatttggcactctgctccatcctcacactcgatatgatttcnnnnnnnnnnnnnnnnnnnnnnnnnnnnncttctttaaaactttaaacagctagtttcctggttctaacattccttgaatttctataggaggcatttaatatagtccttaggccacacctgggtattttggtctgtagtatggaaggtcgggggatgagttgtctctctctgcagggaggacctgtcctgcccgagagcgaagtggcttaccgttcggaaggaagcgttcgaaagtagcctaggtctcactgctcgtaaggggaagccttgtcgagttcagcaaacgagttaaaaagtggagtgaggggaacattcgtgctgagccctttgaaagtgatatgattgtattatttaaatgagtggggctggggcatggtagtgttttgggggtaaatcagagaatgcgtgagtggcttccataaggtaccacgatcaagctgggagcgtcctttgtcgtactggcagacacaagccaacacactctctagggagaccatggttctacttgaaagagataaatttgaacttaaatttgtccaagaaacctggtgtcaatcttttcattcattatcacctctcctccattgagtaggtgaaagcttggatgcccaaggctttcaggttctgaataagcaccaatgaaaagagttacataaaatctaagaaagtagggaggtaaacctctgtcaacttgtgtgtgtatatacaaaatctgttaaaaagtagtttgatagtaggtaacgaacatttcttctgcaaagaagtcatctgttaagtgtttacattgaaacttgcaataatttattttaacactggataaaaacgccagggtta

SEQ ID NO: 443487 - DNA, 856 bp, Homo Sapiens
  misc_feature (134)..(161): n is a, c, g, or t
  misc_feature (472)..(472): n is a, c, g, or t
  misc_feature (481)..(481): n is a, c, g, or t
aaagaatttccatatttattttacataattttaccgtacacatctcatgccaacacacaggaggcatatacaaacaaacgcaccagcttctgttttccaaagtcatatggcaataaataaggatgggtgggtcnnnnnnnnnnnnnnnnnnnnnnnnnnnnccccaggaaacgagacttcatttctctttaactgtacaaaatttacattgtgaaggatgagggcaacgatccagagctgaggggatctggggctttgaggtctgattgcaagctcagagcaacttctggaatcccgcagccctgaacctgcttgtttggccgaacacagtcctcaagtgggaaagttggtgtgattcttgcctctcggtgggcaatagatgagagtgggggtgtccttcctctgttcacctgtgctctgcctccctaagcaaaggaatgcttggtgcacctcccaaacctgcagctgtctnccttaaccnagagctagcagcatgaaactgtgcttttagtgtggtcctaccaagcagagtgtggatgggatggctttgctgagctctctctttttggctccagtcactcactgtttagaacagttggagcaactactgcaaaaagggccaattgaccaatccaagaaagagagagccagtgatgtgcttttcatttagctttcagcatgcccagagcccttcagcagcaggcaataaaacaaaactcatttccgcttaattgaatttttcttcatctcacggtttccaatttttaaagtgcagtgtttaaaaatgagcctcctcaggccttccagaccctgctggctggggaggtatggtcattattttcatggttataaccaa

SEQ ID NO: 443488 - DNA, 901 bp, Homo Sapiens
gaagaaggagaagcaggtctacaccaaaggatcatttctttcatgagcaatgcctcacgggacacttccgtaaggggatgtcaaaactgctgccacactcaaggactcttccaattttcctcaggatgaaaggtttgaaaaagtggacctctgagaggaaatgctgcagacttccaaattggtgaaagaacttccagcgtcgcttggatactctgggtaggaggaactggaggagatgatatttttgagcctcctggagggcaattgattaaaagcagaagcagaaacgctaaaaggctgaggaatatggacacatagatggtagacgtttgacaggtggcctgaggatgggtccactgacgtggacagggatgtgggaaacaagctcaagaaaagttccattctccacacttcccgaaaatcctgaggaagtgtcaggttcagacatctttatggagggtgaaggagtgatctggtagattaaagtcaaactttcacacagggcttacacaggacagattggcattttttcacgatcgtgtttgcagaattcacaggctgttaaatcagcacaacaaaacttgtttctcaaaggcagcaggtatcagatgtgcattgagactgcaggtcaggacacgcgacttccccggcaggtctcctgcgctagcggtggggcggtgctccggtctggacgatacgcgcccgcgaagccgtcctcgggaatgttgggcgcagcggcgcggcgcgcagtctgggcgcacggcggacagcaggcgcagcgggagtggatccgggctgcacggcccacgcacagcccgcgcgtcgtccctccgcccctcctggccgcacaaccaatggccgcgagcgggtcccactcctcgccgccccctagtctcccgct

SEQ ID NO: 443489 - DNA, 305 bp, Homo Sapiens
catgaagttgatgccaattacgaagcagttgaactttctgttctgctgtgtcttggacattgtcattcttgatctcatctattttggcttcattgacaccattctttcgaacaaagcctttaacttgacttagtgtcatgactccagcaatagtggtgatatatttactcaagtcaacatcagataaatttattgccactgtttcaggatttaaggttggagattcatgagaaccttggttttcctttctgtgctttctgcatgttttctgtacttcctttctcttcacttcctctttgcacttg

SEQ ID NO: 443490 - DNA, 353 bp, Homo Sapiens
gcagagtaaaacaatcattttattgattcttatgtcagttctgtagcataatgaatacattaatcataatcatattaaatgtttaactgatagtattttaaaagaatcttcaatcaagtgctaatcctcatcactaaataaacagcattctgaatagtcaagattgggaaatgtgataggtaattctacccactttttgtattgtttctttgttgaattatttttgaaaaccactacaaattccttattttgagacaaggcaatctaagcctttgtgcaccatcattgttccccagcctggccacatttgcagatgatttcaccatttatttgatagtcggcacacttctttt

SEQ ID NO: 443491 - DNA, 406 bp, Homo Sapiens
caaagggtagaaatagtcattttaatattgatacaagttattttaagggacagcatatcaaatagggtcatttccaccaggatagggtatatgagacacaagggtcaggaacgattatggggagctcctttcttcctaatgcggtaagtgctccaggttcaggtcccaggcaaagctcccattaagcccacccttccctttactgcactagatcagggcctgacttagaggacacataggttcagggtaggactaaggattgcattatagacttcttaaggtgtttcatgattaaagaggaacatctctctccaacagttatagttcaacccaagtctttcaggcagtggaagaaaagacatgtagggttgtacaggctagcaaagcccaagaagaatgaatcagg

SEQ ID NO: 443492 - DNA, 762 bp, Homo Sapiens
ttttgaaggggcagatggctgtttattgatccttcagtcttgtttcaattagatcatacttttgccagcgagagagggaaacagaggaaaggatctagagaacgcctgagacagggcacgagggtcaggctgctggaggcatgggggaggctcatctccactgggacccccacagctgcttctaacacaggattttgtggctgcttcaggctgtcgcttttttttggtatctcctaatcgcaaaagagcatccagcaacaaccaggattccaagcgccgtggccacaccgacttcaaccttggccttttccacctgtttacagcgggacttgccatatctcagctgggtgacaaagtgctcacagttcctgctcacaatactgtacttcatcttctgaccaaccatctccttcgcagaactgatgatcacctccacgggccgtggttggtactcatggtccaagctgttgttgacccgatagcaacagcctcccaccacatcttccaggcgctcccgtttcacctctgcactgttgctcaggactgagaagacactggaggagccagccccggggtactcacttggaggagccagatggatcacgtagccatctcctatatacagggcccagtgctcatagccaaggcggaaaatctcaatcaggtctccaggtttgggctcttggtgtggcgaagccatctcgaagccaagaggaggtctggtgctcctcttgtttgtggatcagcttttatgctgaagcc

SEQ ID NO: 443493 - DNA, 278 bp, Homo Sapiens
ctcaacgcaaggtggagacagcgtaagaaaagttccaattaaggttttcgtttagaaagggggaaataaaatggagacgagcaaaagtctccgggctttccaacaggtgccgggagaaatgtgataaaaaggcatgcgcggagcagcctctgtatcttgaggatagtggtgacatctcagctttttctctgttcgcatcaggggtaaaggagaaaggaaaaaaatccgttatgtgaagaaaaatgtcttgttacggaggaacggagcatgtcgttgag

SEQ ID NO: 443494 - DNA, 357 bp, Homo Sapiens
  misc_feature (342)..(342): n is a, c, g, or t
aaaaggaaagagaacagacttttaatgatatttttaaaaacagttcaggttggtgaagcagaaaagggatgtgattacaatttaaatgaatcagtcacttgcacaattaatcctcttggcatcatacaaactgggttttaatggcaaatgatgacatcatagcatgaccaacactcatggaaggcagtctagagtccatcacgctcacacctgagggggaaggcactgcacccactgacgagacgcagagaccttggactacagatgacaccacatgcccacttctccttcctcaccttcctatggctactcctagtcacctgggacccaggccttggctgnaggaacagacttttt

SEQ ID NO: 443495 - DNA, 947 bp, Homo Sapiens
  misc_feature (669)..(669): n is a, c, g, or t
  misc_feature (756)..(756): n is a, c, g, or t
  misc_feature (795)..(796): n is a, c, g, or t
  misc_feature (848)..(848): n is a, c, g, or t
ttgctctataaggtttattattttaaagcacattaaaggcaaaaaactatttttaaaatcctgctagattttataatggatttgtgaataaaaaatacccagggttctcagaatggaataaatatcccttttaatagttatatatacagatatacaactgttagctttaattggcagctctcttcttttttcttcttttcactggctttttacttggtgctttttcttgttttgcaactggggggcggagttcttattttctttggattcttgtctggttccaaaatgatcatttcttcttcttcactatctgagagtattatgggagcatcttggcttccaatatcagagacttctactccagtgtccatttttataccatcaagaatgatagcttgatcaccaccgccttcatcatcttccttctcagagtcttcaagatcaccccaggagttttctactccctctccaatttgggcagttccaggagtccatagcacaggtgtagaaacaacttctgagggaggttctgcttcagcaatgatttcttctgctttttcttctacatccgaggtatcaattggggccttttccattttagatgctgtgatcctttgatttgctatagactctgcaaaaccaaactttccaccttctttccttactttntggtcattctccaaagctttcaatattagctctgtaatttctgctactttcacaccagcgattttactgcatctcagaaactgatcntttagtagcattatcccaccactggactggatagtacannatctctcgatgttggtcatgggcatcaccagcaagccatccaacacacgttnctctcgtccaattgatccaccaataaatatgttcttgctgaaaaagcaaactgaccaaaaggggcctgtgtgatccctatggggcagatcacgctcttc

SEQ ID NO: 443496 - DNA, 1147 bp, Homo Sapiens
tttaaattagatttttcatagtctattgttttgaactatggattctgttttatggtggatacctaaggtttatataatagttgctggaaaacttaaagtagctggtgagcttcctgttatgtcactattaaagaatgatggctgatgtaactctgcccctgaaatctacaagggtcatgcccaaattaatacaggttaacctttgtagaggtatatatgttggcattatttattgacatttatgcttcaagcatgtcttattttatgtaattttaagaaatactctatttaacttgtgaaatatacctaaaagcatactagttagctcttagactctcacttagggagggtaaagaaacatcactgatgccaatatgaagatctataaacaaatcctttgtttagaacttttttctcttcgtgcacctcacaacacacttaccatggtacatatttcttaatgccactaagaaaggcaagatagtgaacgcagaattatttatgtggtatagtgtttgttttcctgttttagtgcttttgtagctaaacttactgggaactgcatcacaactacatttgcagtctcagtggggaggtgggactagcctgtgggttaattttaggagcttaaaagtttataaggcattaaaaacacatacatgtattaggattcttgtctaacccctcacaaagggtgatggtgatcagcatgccctctttttgaagattaatttctaaaattgaggaatctgggaggttgctttaatttccttccccaacaggcattcatttccaattggtctgcctttgaaactttttgggaaaaattgcctgtaccaattgcattggttgccttgctctgattttaatggccaaaaaaccctaaatatttgcggaattgctgctaacagaggccctttgatatttcccttcaaaatgaatgccaaaattccccttgatggatttttgaacggatgtcttcccaactttgaaacaaacatatttgctgtgccgggggaaagcccctttccagaaacgcacaaccctttttctttaaaaatatttagggtataaaaccctttttaattttatttttccccgacgggttggaaaattactaaattatggttttcccacatattgattc

SEQ ID NO: 443497 - DNA, 1768 bp, Homo Sapiens
  misc_feature (1487)..(1530): n is a, c, g, or t
tgttttatccaaatttattctcagggaaaaagaaagtagtggctctacgcaactttttcattcaccaaccacctttccatgcatcagaacctatgctgtgattgttagctgaacttcaatagtttccacctacttaagagagatgcctcaaacaaattaactttattttcagacaacaggtccaagaagacttcacagctcaatcatgacgaacatgtggctgtttcctcacagccaggaaccctcggtattagaagaaaactccaaccccccacaccatcatctagcctcttttctcactgtgaagaactgatgagacagaattcctgagaagggaacatttaggtaatctgggatagaagggcatggaaggactggacaaactaagcctccccatgaaggaagggaaaagaatattacaaaacagactaacagaaaacaagacccatcagtatcttcaggataaacaagaggccactctagatgctctgattaaaggttgtccatgcctacagaggcggaggataaatctaagaaacagaaatgtataaccagcccaatgcttccatactctgcattaggtcagtgtgaacatggctttgctcccaatggtcagacctgacatgggtccttctgaagatggtgggtcaggtatatcccagccaccctcaccagagaatacatctatgacaaacccaaattcctaatcctgaagtactttgagccactctacattgtggccactcaataatagaataaatttgtgaaaaagctgcatgttttaatttaggaaatgagtagaagttcacaagcaacccagaataggtgccagcagtttgctccagtgggccacaccacagcagcagctcaggctctgcagaatcactgtgtccagtgcttcctgagatgttctttcagctgaggaatggaaggcagcagctgctggcactcatgacaacgaaggggcagcttcaagagctcaggcatcccatctcggacagttactctaccagcctcttgtaccatctcgatcacagcttgtgattctaggaagtattctgtattgaaagaattccaatgttttttgtttttaaggcaaggagaatcaaaatcctggctgatcacatgaagatgtacatggctcatactcggaatggcgtggtagcccaatcggaagcggagtttgctggacccagcaaaatctacaatcaccttttcccccacagtgtgcatatgcttaaggagttcaaggtgttccctggccacagccttcagactggaaatggaggtccacggtaagaccagccaatggtaacgggcctttgggtatttatcctttatcaccaccacctgctcatctttgtaaacctgcattttggggtcctgcatagaaatcttcaagccttgactccagtggcccagggattcctttttgataggtgcatcttttcccttctttaggggcacagagcattggccagagttgnnnnnnnnnnnnnnnnnnnnnnnnnnnnnnnnnnnnnnnnnnnnatccctttctatagaatcactgttgcctgatctctttctcttcctgtgtgtttccaggccagggttctttgcctcttcctcaaactcttgctgtcgagaacatttcttatcagtgatcttggtctctgggccacgcccaatcacaactgcttccaaatgtggaagtctgattcgctggtgccggctgtacctgtctcaccaaccagcacacccgcatcatcactctccagaaatcccg

SEQ ID NO: 443498 - DNA, 901 bp, Homo Sapiens
  misc_feature (462)..(505): n is a, c, g, or t
tggaccggtccggaattcccgggatcggtgaggcacagatgagtaacgtgaatttgtccgtctccgacttctggagagtgatgatgcgggtgtgctggttggtgagacaggacagccggcaccagcgaatcagacttccacatttggaagcagttgtgattgggcgtggcccagagaccaagatcactgataagaaatgttctcgacagcaagtacagttgaaagcagagtgtaacaagggatatgtcaaggtaaagcaggtaggagtcaatcccaccagcattgactcagtcgtaattgggaaggaccaagaggtgaagctgcagcctggccaggttctccacatggtgaatgaactttatccatatattgtagagtttgaggaagaggcaaagaaccctggcctggaaacacacaggaagagaaagagatcaggcaacagtgattctatagaaagggatnnnnnnnnnnnnnnnnnnnnnnnnnnnnnnnnnnnnnnnnnnnncaactctggccaatgctctgtgcccctaaagaagggaaaagatgcacctatcaaaaaggaatccctgggccactggagtcaaggcttgaagatttctatgcaggaccccaaaatgcaggtttacaaagatgagcaggtggtggtgataaaggataaatacccaaaggcccgttaccattggctggtcttaccgtggacctccatttccagtctgaaggctgtggccagggaacaccttgaactccttaagcatatgcacactgtggggggaaaaggtgattgtagattttgctgggtccagcaaactccgcttccgattgggctaccacgccattccgagtatgagccatgtacatcttcatgtgatccagccaggatatgattctccctggcttt

SEQ ID NO: 443499 - DNA, 650 bp, Homo Sapiens
  misc_feature (111)..(126): n is a, c, g, or t
  misc_feature (570)..(570): n is a, c, g, or t
  misc_feature (579)..(579): n is a, c, g, or t
  misc_feature (599)..(599): n is a, c, g, or t
  misc_feature (635)..(635): n is a, c, g, or t
ggggggagataaaaagatacactttatttatttttctaaccaggaaagaatcatgatatttgctgggtttactgattaaaaactaccaccaccaaaacagaacaaagaccnnnnnnnnnnnnnnnntgaaggagggatgggtatcatcaaaagaaattctgtctcaattacagggaaaaatatttagtttgttcaccagtcaaattcaagtcacagacaggcagcttatacacatttaaagacaaacaaaggtttagggcaggacgagcaacaagcagagtgtaaaaagaggcggggagggagctggagagggcagctggggaataacgtgggtgaggacaggtggagtccatagcccacacgtgaaatgctgcaaagggcgcaggcaggcgattataccccttacagatttcccgtttttgtaaaaatattccctatgcacttgatacgtttcttcgtctttgagaagcttaatcttctatccatgtttggtcaaaataagcagaagcgggtaatgaagggtttcttcatatatgtccgggttttcctttttcaacttggagtggaagnttgaaatgnggtcatcataattttcatgnctttggatacagaaaccactttttcagctagattgnaaaactgggttaaag

SEQ ID NO: 443500 - DNA, 831 bp, Homo Sapiens
  misc_feature (633)..(633): n is a, c, g, or t
attttatttcaaatttattttatgccagatccaagctgtaactggaacctattcccagtctatgggtttctgaatttcattttcctatttattgtatttttatgagaaacttgttgtaatgagtctgtaccactttatttgacatttactaaagctgtataaaagccatgcacagtttatttacagtattgtacattaaatgataatgtttgaagatcacacaaagatttcacaaaactataactaatacagaaagatgtgtgaaaacattaggggctttcaaaattttaggtatggaattttgcaaagattattttggcttataagtgttaggcaatcactaacctgaaataagtgacaaaaacatgcagatgattaccatttcaacaaatgaaaagctataaatgtctagctaaaagctaaaatattgtgtagctgaaatactaccatataacaatgggaatttataaaacaggaaaaaaggttattctttaaaagtcttccatgagtaatagactttcagtaattttctataaaaacattcagaaattaagtttctcaaattatgtttatcaccaaaattatgttttcagtagtgactggagctatgacttttaaataattatttattgnactataggggaagtatcagcttttccctgtaggggataggctggagaaggaaatcaaccagtaaatttagattcaagtaaaaggatcctagtacaaatatatcattaacacagagtggagagttacaagaactgcaggtccacatacttttaactgtactcttagaagtgtaaactttaggtttgttaaatttaaggt

SEQ ID NO: 443501 - DNA, 1330 bp, Homo Sapiens
agcagaaggcacagtctaaagagtgggtatcagaagaattttaccatttacgctcataggaatactaaaccaaacccaatcagaccaaactcccaaagcccattgtgtttacagagtctgcctcttttgtgtgatagcaagtcagtcctttaaagcagaaaccccatttactaaccctacatcccaagtaagcaggcctgtatcagaaccaaacagctgtcctcttacatcagaaaatctaagtgatctgaaagacaattcatcacaagtgtttccaattttcttctgagaacatcaccaatcccactaatgcaaactcagaacattacttcagtcaaatttcgctaaatgctatagctttcttcaaataaaaattagccagaataatatcttagaaaagatttttcttttcattgtggattccaggagacttttaagacatggaattctcggtgattatattcaaatggcagagccacatttgctaacagtattttctaattttatctttcttataagaaaaaaagggtaaaaatcggatctgaaatactgacagggttccccaaagttagatattaacacagcttttcatttctcttatgagaactttactgtaaatatacctttatcatagaaatgagatatccaatacacattacaaaatgtcatatttaaagatgacaaatctattcttaacccagattcttcatccacagaagtttaatgactaaaataacacaacagaatgaacaaatgttttattggcatgttcattgttgtaaacagcatctggcatgaaaaagttttaccaaaaccttttttattgatttttataaattagatggtatgtcaaaatttatgtagaattgtgttcattgagtacttttatttagcaaagcaaaaacttgctgatactaataaactctgcaatgaaatcatgttgactgcatcagtctgtaccatgacctgacctcattagcaagtttattcagaacaatgttaagacgtttcccaaaagttaaactacatgtaactacaaattgactctaaaaattaaaactggacttacaagcattctagaagattcaaacttgaagtaaatcttcaaaactagatgtacaaagagaaaaaaattgaagccgctgaacagagaaacctcattaacaagggcaacgacaatcctatgggacctagcactgaggaacctcactgaggattacatttacatagattgctatacttctcaatgtacacaaatgtacagaatgaatgatacgtgaaaagaataatcatggcagatagttgaactgcaattatggtaactcaacag

SEQ ID NO: 443502 - DNA, 444 bp, Homo Sapiens
  misc_feature (273)..(273): n is a, c, g, or t
  misc_feature (312)..(312): n is a, c, g, or t
  misc_feature (336)..(336): n is a, c, g, or t
  misc_feature (346)..(346): n is a, c, g, or t
  misc_feature (353)..(353): n is a, c, g, or t
  misc_feature (368)..(368): n is a, c, g, or t
  misc_feature (396)..(396): n is a, c, g, or t
  misc_feature (405)..(405): n is a, c, g, or t
ttttttttgatttcattgcagagtttattagtatcagcaagtttttgctttgctaaataaaagtactcaatgaacacaattctacataaattttgacataccatctaatttataaaaatcaataaaaaaggttttggtaaaactttttcatgccagatgctgtttacaacaatgaacatgccaataaaacatttgttcattctgttgtgttattttaggtcattaaacttctgtgggatggaaggaatctggggttaaggattaggatttgtncatctttaaatatggacattttgttaatgtgtattgggntatctcatttctatggataagggnattatttacngtaaggntctcatagggggaantggaaaggctgtggtttaatatctaacnttggggggnaccccgtccggtttttcggtcccctttttaccccttttt

SEQ ID NO: 443503 - DNA, 700 bp, Homo Sapiens
ttttataaggaacatttatttggtaaactatctcatagaaatagactctaaaatcaaacagtttcttaaacaacagaaagcataatcccaatctctccccatgaaaagcctacttcataactgaagtacctaaagcccatgaactgcattactagaagaaaggagggaaaaagacatttactaaacttccacaggaagactgtataaatctggaagtggttaagtacacatcagcctgtatccaagaatactactcagtctcaaaaattaactgaaaatctaaacttaatatggatacttctttgttcttggtaaggctcagaaaattaccatctatttaagtacgcatggtactagttacatgtcaactgatataataaaaaaggtgaagtggacaatcagtatttcaaacccaatacagggaaatcactagatgtaaataagaacttttaaaagctattcttgagctccactttaaaacaaacattcaggactggaatcttcagaattttctaatatcttgaatatccccatcttctctttaattggtcctgaagcattcatttgatcaataagatcacttcgatctaacaacaactctagatctttatcactaatgaccttctctcttgatcctttaatttcccttcataatctctagattttaataattccattaattccttaggatctaagaaat

SEQ ID NO: 443504 - DNA, 1069 bp, Homo Sapiens
cattttcattcttaatttgagtgcatgaaccactgcagatgagctgataagcagaaattctcaagtgggtttcactaataaatgtttttttatatgatttgaaatcaagtaaagggacaatgtttatgtacgtgtataacaacattcagcacatttgaggaatcacacactataataaagcttaaacctgtcatagaaccttgatctatattactttgtcttcagtaaaaagtgaaggatgagattttgtctttcatgttattgtagctggcatgcttcaaaattttgagcttactgggactgacagcctctcacttcaatctgagggattgacagaatttaaacaggctcattgattctgtacactctacccttcctgtggcaagtgataatgggatttcattaatgaatcaatttgttttacaaatgccatccactgtggcattggaagacagttgggtctgactcaagtttaccatttcttaccaaacattcttaagtatgaaattggtcctttaatccaaatgctcttggtcatggctgtcctttgcggattacatagcattcaggaaagtacaaaaactaaacactaaatccccaactggccccaaagaccttttatgatgtgagagacaagagttcaccccagattaatttcttttatcattggctttatactctaacatatagatactctctatagcaaaaaagggatgaatggctttcaatattcatttctgtttatttttgtgagggaaaataatatatcaagaaaattttcttccacttagaaagctttaaagctgaagtagaggtgcagtcaagcttggatctgcagggaagaaccactagggccactggagtcatacttgagcttttcttactactggccccaatttctaaattgtgcataaatacaatcactctcaatttttgaagggctaattatctactttgtgggtgtgttttgttttttcttttcagcgtgtagggcttgggctctgtttccttttattagcatgtcacctgagggtggaacaaacaattggaaataaaatttgattatttt

SEQ ID NO: 443505 - DNA, 800 bp, Homo Sapiens
  misc_feature (25)..(25): n is a, c, g, or t
  misc_feature (32)..(32): n is a, c, g, or t
  misc_feature (45)..(45): n is a, c, g, or t
  misc_feature (63)..(63): n is a, c, g, or t
  misc_feature (110)..(110): n is a, c, g, or t
  misc_feature (435)..(472): n is a, c, g, or t
  misc_feature (606)..(625): n is a, c, g, or t
aatccatggtataaaaggaggcatncccccangatcatcctccangaagaaaatctccttcangcactttccccctagatcctgtctccctgaccaaccccggcccccanaccctgccttcctcttttgagaattccataaccccggtatgtttaggatacccagttcaaaagacccactcctatgggttgatgaggaaaaggctgccctgaggacaatttaagacccataatgagtttcccaatttttaaagaaaatttggctagctggcttttaattcttaattaaaatcattaaatttaattaaaattattccaatcaaaatatatcactttccaagattccacattcatattacttacttatactatggagactttctctacctgagcatgtattcaggggctataggtacatttaactctgactaactgnnnnnnnnnnnnnnnnnnnnnnnnnnnnnnnnnnnnnncctcctaaatcatttgggggtatccccatcattggtgcgtgtgtctgcgtgtgtcaaactttaatgattatttattcagaccctggaaaaccacactataaaatagggcactggatcacaagttcgtttggttnnnnnnnnnnnnnnnnnnnngtgggggcggggggcagagaagaagtttaacttggatgatttccatgcccattccagctgtaacattctatgactgtgacccagcctttgttctcttttctcactctcctactagacatttcaatgaaaagttaggcaggaaaaaggaaaggaatcccaagttgctgccagctct

SEQ ID NO: 443506 - DNA, 337 bp, Homo Sapiens
  misc_feature (137)..(173): n is a, c, g, or t
aaccaaacgaacttgtgatccagtgccctattttatagtgtggttttccagggtctgaataaataatcattaaagtttgacacacgcagacacacgcaccaatgatggggatacccccaaatgatttaggaggttannnnnnnnnnnnnnnnnnnnnnnnnnnnnnnnnnnnngttagttagagttaaatgtacctatagcccctgaatacatgctcaggtagagaaagtctccatagtataagtaagtaatatgaatgtggaatcttggaaagtgatatattttgattggaataattttaattaaatttaatgattttaattaagaattaaaagcc

SEQ ID NO: 443507 - DNA, 779 bp, Homo Sapiens
  misc_feature (597)..(597): n is a, c, g, or t
  misc_feature (696)..(696): n is a, c, g, or t
  misc_feature (736)..(736): n is a, c, g, or t
  misc_feature (763)..(763): n is a, c, g, or t
ggaggaataagcattttttaatttcttatataaaatgctaacttcttgtcaggacatactacagactatgcattgaattttttgacaaacttcctgtaatctttttattaatttacactgagggaatatagcacctttcatccgaagaactgaaggtgctttacaaacattagcatttaaaaaacaattacatttaaaaatctggattcttgatgttaaatctcttcgactccagatacacaatttcctggaagctgatggaaagtgattctatttctgacaatgaaagaggctcagaaagagtcctaatttgctttcacagtacaggcattttccaaaacctggttctgggcttacaaagcacacacacacaaatcttaatgcaatgaacaatatttcaaaccttatttcccaaagcaaaacctagggcttaagacgtcaaaatcttccaacagttctagacatccagacagaataggagctgatgcagattgcatatgagatgtactgttgatccaggtgttttaggatcacactcaaatgaatataaagtagtgaaactttttggggaaacacattaacttataaaaagctagnccaagagcatatcgggccaaggaggaaagggagtaaatggcaattcaaagtagacaggtctcactagaacctaaggcactttattagaaaccaagtttntataggcaataaaatagtttacccccatggtccacataanggattttacttcaacctaaatttagcnggaacaaatcctctgg

SEQ ID NO: 443508 - DNA, 422 bp, Homo Sapiens
gtctagaactgttggaagattttgacgtcttaagccctaggttttgctttgggaaataaggtttgaaatattgttcattgcattaagatttgtgtgtgtgtgctttgtaagcccagaaccaggttttggaaaatgcctgtactgtgaaagcaaattaggactctttctgagcctctttcattgtcagaaatagaatcactttccatcagcttccaggaaattgtgtatctggagtcgaagagatttaacatcaagaatccagatttttaaatgtaattgttttttaaatgctatattccctcagtgtaaattaataaaaagattacaggaagtttgtcaaaaaattcaatgcatagtctgtagtatgtcctgacaagaagttagcattttatataagaaattaaaaaatgcttattcctcca

SEQ ID NO: 443509 - DNA, 1246 bp, Homo Sapiens
cacccgtgtttctttgcacccgggccacttttcctccccagccccgactgggtttggaccatctcgatttttctacccctcccttataagcctggacctatagctttcacttcttaatatctcatattggttccttcctttccaacttatcctacagacacttcacttcaggctcgccattctgtcctgaatcacatcagatgatgtcgagtctatgcctcctgaccttgtccctccccaacccaatataccctacaacacagccactgggggtatttcaatgcgccatggctgtgtcaccatcagcttcaccgctctctcttggatggctccttgttgtccaaatgaggcaaaaactactatggctggtttctgccaacctctagtctcacctgtccccagttccccactcctgcctctgctccagccaagctgaatacttgctagtccccaacacgtgatggacctacaggtgttttgcccctgtgaagctgcatatgctggtgggtctgcaccactccctctacagggcctcctgcttgaccagagtaagacaacttccttagggagtcttccagggtctcctcttccacttcttcaacccccaagtgttcatcagttgccctctttctgtgctcctatagcatccggggcacacttctattacagcacctgtcatccagactatctccccactttgggaggtctttgaaggcaagcactatattcttcttgtttctgcagcactatacatagtgctggacaacacggagggtgagtgaatgcatggatggatgggcttcgtgccgacctggtgaggagacagtggggagaggtgccactgacccttgctgagtggtcacggcctttgaagatttcccagacaaccactggcctggctctggtgtgtagctggactgagttcccgctaggaagaggtactaatgcttccactgggctggagcaagggcctgcatgggacaaatacattttcacagccaagcaaaatggggaagttctagaagtaggctgaatgtttttttaggaacctgtttggtttgaaatcattagataaatgtcatgggtatctaaatttggctacagagaaccagactgtatatgtgcctgataaagataaaatgtttagactacttgggtagccaagggtagctgaatccctgagtgagctgggtggccagagactggggaggctgaattagagtctatcttgttggatgtccaacct

SEQ ID NO: 443510 - DNA, 598 bp, Homo Sapiens
  misc_feature (477)..(477): n is a, c, g, or t
  misc_feature (501)..(501): n is a, c, g, or t
  misc_feature (506)..(506): n is a, c, g, or t
  misc_feature (540)..(540): n is a, c, g, or t
  misc_feature (568)..(568): n is a, c, g, or t
  misc_feature (577)..(577): n is a, c, g, or t
gaaataggaggattttattcaggtggccactggcccagcggattaatatccagaggctgagcaacgaacaaagatcaggcttgacttttattcaggcgactgaaggggagtggctagccagtggtgcaaaacttgcggggtggggaaagcgagcttacagaagcagaacaaaggcagttaatcaaactgtgacaggttttgcaattcaggcatgtcttgtgacctttgccatcctgcatagatgggaaaacatgaacttataaaatccttgcaaacttgcagaaatagttacaaaaatagttataagagcagaacaaagaatgatggcatggggaaagaattccagggggagactaagaacttgcttttctcgtccctgctcttggatcccatttctttggggcccctgcctggccttgcagataatgttatcatagctccaactggacttgttttccctttacttggttttctaanatttcctgctttaggacagtgcanccaanaaaggcaaaaccaacctgtgactgggctgccaanaccaggctggggagcccttttttcctgntttggcttntttggacaccctttggttggt

SEQ ID NO: 443511 - DNA, 649 bp, Homo Sapiens
  misc_feature (40)..(40): n is a, c, g, or t
  misc_feature (45)..(45): n is a, c, g, or t
  misc_feature (55)..(55): n is a, c, g, or t
  misc_feature (84)..(84): n is a, c, g, or t
  misc_feature (142)..(142): n is a, c, g, or t
  misc_feature (148)..(148): n is a, c, g, or t
  misc_feature (150)..(150): n is a, c, g, or t
cccaaaacctacttcagagcagcccatagagatgtatttnagaantttttaaaantattaaagggcttttttctcttgcatttncatgaataatggaagaagagccagacactggtatcatccagccaaaaatgaaagagtncaagtncnttcctttcccaggcatcccatggcagagctgcaagttggaagtacagggcattcagttagagcacttgagcagtcacacaggaaaagagaggcagagtcagacccatatcttaatctccactctgggccaaagctgaattgtatgtcagagaagatgaagaaactgctaaaggcagtggggcctgtttgggttaagaaagtctcctaggcagcaacatgtatccaagcagtatgatgaagtgtggctaagcagagggaatgcctgagctgacctttccccatcaccatgggacctctgtggaatgtatgcaacatataattttcctgatgcttgagataaccagagaaggcaaagcactcgaaacagctgagaacctggctacctcatactggctctacaggaaagggctgcctgggaaaaaccaagtaagaaggacacagcatccacgagattgaaaggaaaactgcagccaacccagggtgtacaggattcacacag

SEQ ID NO: 443512 - DNA, 880 bp, Homo Sapiens
tttttaaactgtattctatattttatttttcaaacagccagtgtccacatttaaaatgcagaatttgcaaatattagtctaataattcaatttaaagtaaagcaaaacaacttcctttagtatcacaatacataaaatggttttataaactccaaatggcaaagataactatatgacaatagtgttgaaagccgtgaaactcattaaacctcttatcaataggtcagtttaaagaacatctctatgttccatgactatgcatgaaacaagctgtcactgtattataaaggctcagcaattcattcatggcataatatagggtcaagcaagattttgtttttacaatgacaattaaaacatatttaaagaacaaaaaacctcccaattgtttaaaaacaattctatttggagagcaaaatattttaaaatatatcgacttaccaaatttcaattgtcaggctgctgactactgatgtaaaagtttatatttaaaaatatcacaaatctctttttatttaacactgaaaatttcaatgggataagtttcattgcaaagcaactgtcacctgagtagattttaaaatttagtgctcctattttttgggggagagggggaaggaaagacccattttgtatctgatcccgagtttgcagttgagtccttcccaatgatttcttagggagttgaagaaacaacctgctgcaaccttcccaagacacacgatgcccccctttccctcggaaatttgctctagcattttaggaactctcagtattcatcaaatatttccatttcactacccactcaagcatagcaacccaattcatttagttctatacaacagtgtctatattatgtacatatttaattatcaatagg

SEQ ID NO: 443513 - DNA, 579 bp, Homo Sapiens
gtaatttaacctttatttcatatctattgttaaattacccaaaatcagtgaatggtttgtaaagttacaccaatggccagatgtttacagttgaaatcatgggatttacataatggcaaaaatgtatatgtatatttataacatcctctatatacaataatcagtatagacagagaaaatgcacttaatctttgcaaatcatgcacaccacagcaataacacaaaatgttttttctgtaacaagcttttccactggctcaggcttcatcctgctttccaacaatacctatcagttttaaaagcaaacattttcaattaaaactaaagaaaattgaaataccatagtgatctactaactattttaaaaacacaattgtacacaaaatagttttactctaaaacactgtgacttcaaggtgtggaaaaattcctttcagttttttagctctcaggattttcaagactgcaatactgtcagacaaaacaaaagctagaaatactgatacaagctcagagtcaagaaaatctattttaaacccaaatacccagcctcttgtccagtttgtggctatattacta

SEQ ID NO: 443514 - DNA, 730 bp, Homo Sapiens
gaacagaaatctatttggaattatacctaattactttttactaagaaacttcaaataattttacttcctgaagttccagattacagttgttatcacacatgcatgcatgtgtgtacaaacccaatttgagacaccaaaggccaactttagatctgttaattctttccatctctccctcaccctgatcagagagttggccttgtaggtgcatccacaccgcacctccgtgaacagacacattttattcctgtttcacagcagctactctcattagcaccaatgggactacatatggattcaaacgggtcactcattaagtgctggggcacatttttacaggcaaggctataaacgttccattccaaaccagaaaaccaagaacatcacacatctccccacaaatgcaaagaacatcactgttgaattgttagttgtatattctggtaaaattataaatgcatactaactagttttaaaggtgaatattctacaaatcttcaaatattactgttaaaatgcacaatatttgttacctccattgcttactttgagtgataaaaacatgttttatgttactccttccttctcccacataaagaaaacgattcagtatcaagttctcagattaacaaagaatatattaaaacattttacattctttccacaactgcataaaaaagcaggcatcctgcatactaccagtaggcgaacagtgcaaaggaattcaaat

SEQ ID NO: 443515 - DNA, 667 bp, Homo Sapiens
  misc_feature (594)..(594): n is a, c, g, or t
  misc_feature (636)..(636): n is a, c, g, or t
gtagttagaactcaactttattgttacaacgaatttttatttacagaatataaatctcttcaaaaagatacattccttcatttaatcaatggtaaaaagccttattaacagaaataaagcctaaacatcacttatatttgaactgaaagacaaacagcttcattaaaagtttatgaacacatagtgaaaatgtatttttacttaaccagttacatgaatgaggctgtttttaattttcttcactgccaacctcattttatccacagaacaaattttatttaaattaacagtagtaaaaatgtaaaacttaaattttgaacatgaaaatatgaaacaagaaaacaggaagtatcttcattatcaaacagattaacaaattctcagacagatattttctgaggcatagcaaaacacctacatcaaaagttggcattcatttaagaggtatcaatacattttcagtgctgagactatttgtagcacttacattatatacaaagcagcattatactactatgggtcacatttgataaacacgaatttaagctttatgccacaatttccaattcaacataaagcttacgcaatgacagntacccaatttcattctttttcttctgaactggattaaggaantatcatttaagcccatggaataatgggcatg

SEQ ID NO: 443516 - DNA, 282 bp, Homo Sapiens
  misc_feature (232)..(232): n is a, c, g, or t
  misc_feature (262)..(262): n is a, c, g, or t
  misc_feature (267)..(267): n is a, c, g, or t
tgaggagtgccagacaatctttttattgttcactgaaaaatgcaggtctgcaaagagtcaattgcattgtatattgaatgcaaggtctgatattgcaagtatatatgacatggtgtaacatataaaatattacatattttacacagtgacagtaccccgcctcttctaaacactaaaatttaatagaatgaagtaaaaagcctattaaataagggacaaacacttgcaatcnctaaacaaaatgcactaaagcaaaaatacnttaanaattgttggtgtggt

SEQ ID NO: 443517 - DNA, 933 bp, Homo Sapiens
ttttttgccccaaacttacaaaaaaagtttaaggaggaattcttcaaccagggggaaaatttaggaaaaaaacttctaaatttaattacataattttaccacctgcctagggactacctttttccaccttagggctaaattaaaaagcagtttctcccatgaaaattatagatgaaagggcatttcctgcccaaagaaatctcccagaagcatttttttgtacagttccttaccaaactatcttaaattttaaaaacatgtaaaggtacagaacacatagtacgtaggattaacaggttataacagctttgcattatcacatgttgctaagccaagggtgttcctcaaacttctctttcctgcacttctggtaatcttcttcccctcatccccccaggcctgaggtttgatattctcaaataatgtggtaggctcattcctggctagctttttgctggcaagaataatctctccctcaaagtgttcaggttaactcttctaaaacatctcatattagtctacaccagatatagtcttccttctagatatattagagttgaccaagtctttccctaaaaggataattatataaaagagtaggaacaaaggtagtcatttctctcccattctgagaattacatcttttaacacatgggcaaaatttaagacaaagacattcattcattcttgataaacaagctactcggaggtgaagtgaggaggtggaaaagggcaatgctgagtagaagaacatacgttttcttctacacacacattaacagatttcatctcatctagactagaagagggttaatgggacaagtgaaagaatcctctccaccccattgtgaaaagcaaagtagctcctctagcaaatatgcttcagaattagtctgatgctcagccagtaggccaacaggccgaggaatcaaa

SEQ ID NO: 443518 - DNA, 902 bp, Homo Sapiens
gagggccccaggaaaattgtccttctcttttggttggcatgggcactgtgggatctggtgcattccggtcgacactcttgtttatttggactgtaagtctgacctctatgaataattacttcagcccctgagtgctcccgggccaagctccttggccaaactttcaccttagcttctgataagtcttgggccaagctaagcagcatctatcaatcatcccttcagctcctgattgatcccgggccaaaggcctgggccaagctgagccacacgtttttcaagacagcctgtgaactaggcacatatccttcccttcccagtccataaaaaccctggacccagcctcgtagagggcaccactttcagacacctatctctgctggcaaagagctttcttctcttgcttcttaaactttcactccaagctcacctttgtgttcacgctccttaatctccttggaggtagaacaaagaactctggatgttatctcagactacgagagactgttacatcttggtgcactgctgagactatgacacttggtttctttgagtttgactaaatattttacatgagtgtaattatacagctttccttttttgactggcctattttaccttaccagaatgttttgaaagatttggtccttattggagtactttttcaagatttcccttatttttaagggctgaaatgctatcccaggggtttgtaccctgcccctggtttgctgaatccaactcctccttaaggggacatttggcttccaaggaaaaatggtttggggagtaaaaattacaagggggaatatatccaatcccagggtcctggttttggccggttggggaaattttttcccatacccgaattcccgaaccacgggggaattccccctggcttt

SEQ ID NO: 443519 - DNA, 334 bp, Homo Sapiens
  misc_feature (299)..(299): n is a, c, g, or t
caaattttatactgatagggctttactgtttgtggctcattttaaaactggtgtcttctcttcatgagacacattaattggtaaaactcaaattgagttttcaaagatgtgatagtattaaagtgcaccaatatttgactcaaatttgcttgctttattttgttaggagtaaacagaaagtagcctgtgtttagtcccaaagatagcagtgattttgaataaaggagttttgtgttgcctggatatatgaatttctgtaaataacttctgttgggttaaacatgttaaaacaacaacancaacaacaaaaaacttctgtctctatattcaggac

SEQ ID NO: 443520 - DNA, 815 bp, Homo Sapiens
  misc_feature (60)..(60): n is a, c, g, or t
  misc_feature (336)..(347): n is a, c, g, or t
  misc_feature (593)..(607): n is a, c, g, or t
  misc_feature (727)..(763): n is a, c, g, or t
ggtttgtttggggaaagtctccgacaggtttatttcttggtggatttcgttccgttcggnttaaagtacgccactgttaagagaaaccaaaaaatgtaagttatctaaaggccaaagaatggaaagcaacctttgtgttccgttataataactgacttcataacttctctccagctgcgttatgggatgtgtataaaaagcttctgttctgagaacaaaggagcacgtgcagaaatgagacggaaaaatcccctgacagtattccattacaccaattacttaaaagattttagtcaagcccctcaacagattcaattttaaaatggcttttagttnnnnnnnnnnnnttgaaagtgcttacccagtaaaagaaccgaagtagtcctgaactgttacgtaagactttttacagttggatctttgtcaaaaggggatgggggtgatgggagaaagcagcaacgacaatcaaaaaagttcgagctgctgtggctagaggacaacttctgtgtttccagataggattcttgctgtagaaatggaacttccagccagcacagcatcctgtcccagtagagaaatgagtttgtcagttnnnnnnnnnnnnnnnttagatactggaacccaggctagacgaggtattgaaccgcgccagatttccttgtagccctgtctgctcagctcgcattccgctctcgacgaattcgagctcggccgatttggcctgatnnnnnnnnnnnnnnnnnnnnnnnnnnnnnnnnnnnnncgccgccaccgcgtgagctccaagttcgcctatagtgagtcgttatacatcc

SEQ ID NO: 443521 - DNA, 867 bp, Homo Sapiens
ggatgtgtctagtttacttatttatgtcatttaacatccataaatgtacatctctcagttgtatatcatgattgtaaatcagaaattttgatggcaaaaatattctaaaacaacattcttcaggggaaagaaaaacatggataccttatctagcattgctcataaaagtactcatgttcatcctttttggaaactattaatcatgttagccttagatcattttaagctcctttggctcaaacccaatcattgatgtgcagtatgaccagcagctagtaagtctgtggtgctaccagtatagcttggaagatggttctgaattaatacctcagaatgatatcaaaagtaaaagagtggttctattgctaaatatattgactagctttcttataacaattttactttgaaattcaaagttccaaagctaaatgtctaaaagaagtaactgcagcttgttctgctgattttggaaaatagtattaaccatgtaagatctttggggttggagtgaaggtcttatctgcattaattttgttaatgcacattgtagatgtggagaacatcttgacctgcataaggattgcgtctcattttattgtgtagtgctttttcgaaatatttacatttctttggttcccatgttcatgtattctggagaagtaaaatttcttgattactgggcagaccctaaaactactaagagaaacataacatgtagttagctgtctgctcatggtttgttcaaatctaagctaaccttaatggtgctgtgtccgctgtccacagaaaacgcccttaagtagccctaccttactccttagagcttattttgcttttgtatttaataaaagctgtcttaaatgttaa

SEQ ID NO: 443522 - DNA, 953 bp, Homo Sapiens
ctggtaaccaagtccagatatgtaggttgacccaatcatcgaatttcagatcttgttggaatttagggttccgagttatggggggttcaaattagttgggagcccgagtcaatgatggaccatgaaaccagccacttatagacaaacgtgacttttcttcagacagcacttcagacacctggtgaaaggacacaggagatacttcaaagaaaaccagtttgttccacgaagggataagagacttgacaatctgcttcggctgaaagtgttcatcaatgctgtacaggtccagggtaccacccatgctcctgtcccagggaggaaccaggtacaggatgaaggcaatccggcgcccttccagctcatcatcatggcacagcagggcatcagtgaattcatatttagcacaggacatgtcaatggttgattccaggtcaattttagaaatatcagaaagccaggaccggaaatcttcaaacagaattttccttaaagtggagatgtgaggctctcttctcttcttcaaatcatcagactgctggaacttatataaatcattatacttctcatggaagtccaagttcatcagttccttctgaagcccttctaagaagtcttggctttggatgaagtttgggatcacacagtgaagaaaagggtccatgtccatgacaatgacttcgtgactgaacggcgtcctgcggctccaggcctcagccacctgctttttcaaggtttcttccgtaacagcgtccgaaaactccgccatcacctccttctttcccttttttcccacccgggctgggccgggctccgctggccgcttcccattcatctcttcccaaggcacagaaccacgccacgcagatcaagacgctaccttcctgagggtactgcaactcccggcatgtcccctttatcgtgtttcccggccctacccaatgggaagcccc

SEQ ID NO: 443523 - DNA, 1193 bp, Homo Sapiens
  misc_feature (450)..(532): n is a, c, g, or t
  misc_feature (1130)..(1130): n is a, c, g, or t
  misc_feature (1174)..(1174): n is a, c, g, or t
tttttttcccagaaattattctttatttagaaacaaaacaagacagaagcaattgattttaatccaaaatgtatttttccttataaaagaggtccacatactcactgtgtctactctacagaatttgtccattttattacaccacgtgtcaattcaagtttatctggtcactgcaaaaactcgtggctaatatgtgtaatacaacacaggaggaggtattgctcagttcaactactcttatttacttaaaaaaaatacagaaatgtttttgtccacttgaactgtagtccagacataaaagttacatgaaagttttagaaaatggagttattttatttggttgccacagtaccccttgaagccagttacttaaaatgctgaagttgtacatatttccattggtcaggagcagcattggtgaagcttaaacttctctctcgaaagtaatcnnnnnnnnnnnnnnnnnnnnnnnnnnnnnnnnnnnnnnnnnnnnnnnnnnnnnnnnnnnnnnnnnnnnnnnnnnnnnnnnnnnttggagtaggtttccttggtggtttttaggacatatttgttggtaaacctataacagttgcttttactttcagtgatgtacttttttcttttcctgcttcccagagatttatcagaggaggataaagctcacctaatgcaaaggttggtttctgtaagtaattcctcacatagctgtgtccaccatcacagttcatttctggagagaggcagctgataagacatatcacaccaataatccccagaaggcctccaagacaggccataagtgttgtggtattattcttttcatactctttttgatcagggtgcaaacctttggtggtgacatttacacatttttttctgtttttctgatagatggtgggaatatcaatacaaattttatactcagttgatggattcagatgagtaagattatataccttgacatcagatggtattcgagcactttgcgcagcatgagaattttcagtcttgacaaaggctgccatttaacactagatttgagaattttagaacttgcttttcaggacaccaaaactgaattggcctgaatatctcttattttaatattcaaagagccattggtatcttgnggaaaagatccatccctttgaatataacagacttcaagcagcgncaactagggtaggtgctat

SEQ ID NO: 443524 - DNA, 1111 bp, Homo Sapiens
ccgggaagcaactacggctaggtacgaggcctgggtgttaattcggcacgagggtaactccaggacgagaccggagcgacccgcgcagcgagcataggcggcgaagctgcgcccggcgcccgagaccggcagctgcgtggggcgggggctgcgcccgagcccgatctgccggctccgagcagtggtctcggaaagagggtcgtggtcccgcacggatgcgcttgttgggagaaaccttggagattcacggcaaggcgtaaagcctggggcttccaacgatactctgggcagggatggaagcctagatgcctcaccgcaaggagcggccgagcgggtcctcgcttcacacacacggcagcaccggcaccgcggagggaggaaacatgtcccggctgtctctcacccggtcgcctgtgtctcccctggctgcccagggcatccccctgccagcccagctcaccaagtccaatgcacctgtgcacatcgatgtgggcggccacatgtacaccagcagcctggccacgctcaccaagtaccctgactccaggataagccgcctcttcaatggcactgaacccatcgtcctggacagtttgaagcaacattatttcattgaccgggatggggagattttccgctacgtcctgagcttcctgcggacgtccaagctgctgcttccggatgactttaaggacttcagtctgctgtacgaggaggcgcgctactatcagctccagcccatggtgcgcgagctggagcgctggcagcaggagcaggagcagcggcgccgcagccgggcctgtgactgcctggtggtgcgcgtcacgccccgacttgggcgagcggatcgcactcagcggcgagaaggccctcatcgaggaggtcttccccgagaccggagacgtcatgtgcaactccgtcaacgccggctggaaccaggaccccacgcacgtcatccgcttcccgctcaatggctactgccggctcaactcggtacaggtcctggagcggctgttccagaggggtttcagcgtggctgcgtcctgtgggggcggtgtggactcctcccagttcagcgagtatgtgctttgccgggaggagcggcggccgc

SEQ ID NO: 443525 - DNA, 880 bp, Homo Sapiens
gtactccaaagccccctgtttggaccggaggtctaccaggagaaaattttctcttagtaatagctggtttacccatgccaatttttggagtgactgagatgtaagttgttggcatgatgtttccagcagaggaactaagagctgaagggtaattatgcagcatgtcatgcgaaggcaagtctgaagaaggtgttggggaggaagacacatctgccttgcttatgtctgctgatgatgaaaatgatgactctgtctcagatgataactttatagatttgcctccttggtatgaaacatctttcacacaaccctcaattgtaggagtcatttcagagtccatcaatccagtagaaagttcagaattttctttctgttccttttctccttgtagcctttctataaccaactgttcctcaggacataatgaaatactttcctcatgtggggacactaaggtttctagtggaagagtgacagattccatgactaattttggaggccttgattcttctctggataccactgtttcaggttcctctaacaactgcagttgttcttgctgcacagtgatctggtgtgtaacgacttcaatgttttctgtcacttccattttatcttcaatttgatcttcgccacaaatatgcttcacttcagaagacattttcaggtcttcactatcaacttcattagaaatctgtttttccaattcagtattcactgtatgttgggatgatacagcaataagaagactatctgtgtcaagactttctgagggatgactcttctgttgctcttcagtgtggacttgaaccgcatctggaacaattccaggagtggactcctgaccgatcccgaaatccggaccgtccactgctttgca

SEQ ID NO: 443526 - DNA, 504 bp, Homo Sapiens
ctaaatagggcatatttggcatcacgtcagtggcattctgcataggtacaaaactgaatcaatcatgttttcagtgaataaatgcgggggaaaaaagaaagccgaatccttaagcatcaagagcatgtaaacctcggtaaatggcaacgccacaatttgtgtcattttaagaaatagtttaagcatttgaaaatgctgaaatgatcaactttgtcaaaggttaagacacatttctgcccaaaataatttaattgcaatccattttaattgaaagttagcctaaaatattcaggacaggggagagcaaacacattactgccaagatatttcagaccagaatttttgtttatggttttccttatttttgaggagtagcgtatacaatgaattctcaagaagtcaagaatgaaataccaatttacgaattatccaaattattgtttatcttgtgtcctttcttctgctttttaacattttttatgaatactggctcactcggagttt

SEQ ID NO: 443527 - DNA, 817 bp, Homo Sapiens
  misc_feature (301)..(331): n is a, c, g, or t
  misc_feature (726)..(726): n is a, c, g, or t
  misc_feature (774)..(774): n is a, c, g, or t
  misc_feature (779)..(779): n is a, c, g, or t
agtggagaatactctactgaggaaaagatgtgagagcaaaagattcttcaagaaggaaactcttacttgtcctcctactggtcagctaagtgtttgactcctgcgtgttacaccttccttgcccacacggttcagatttgtataatacttccacagcatcactagcaacttcatatgttgtgggcctctgttgccattcccaagtgactgcaattgatatcgcacagctatcttttgaggggcatttggaatataggtggctggttagaaaatgctttttacatctgggacgtgcatgcannnnnnnnnnnnnnnnnnnnnnnnnnnnnnntttataataggtttttgaaaaatcatttgagatatattcatgatttctgcaggaaaattagattatctttaattattaaaaggtacgtacatgcctatctttttcatgttcattcattcaatttggaaaggaattttaggagttgaacacttcttccttcttggaaagatagggcttgaatttatttaactgagaattcacattttgaaatataattaagcaggccctaaatcagcagaaaaagggaactggtatagtgattgtccagaggatcagaaaatacgtaagtaaataaagtaaaaagtcatttgaacagggtaattgcagtctattagacttctgctcttcaaatttatttaatgtacttcaagtattaagtagtgtgcatcgcttanggcaacaggagacaaataatcaaacttgagtgttccattaaatggaantttanagaaaatcatgatccattgctatgtgtggttcaagtct

SEQ ID NO: 443528 - DNA, 746 bp, Homo Sapiens
ctttctgtgtagttttttgtgtgtgtttttaaatgcataaagtcctttattgaaaatattgggatagcactgcattacatatagtcaatatccataaatgaagggtcacacatttctgaatggacaatactgttttacatagagaacacagcatctggatatgctctcacaattatagtatcatggactaaactaggtcagagtgaagtatatgcaaaatgaccattttgtttttttccattttattaatagcatatggttgcagatggtgtaaatggtaaacgtgatatcatgagacattcctgatatctcacaccaacacattatttaacgagcaggttaaggtgaaactgccagtatgctgttagtcaagagtcctcagtaggagaacttgagtgaaacgtacacccaggctacagatttaaaattttatagcattcatttaaatttgcatggaattaaggagtataataattgttgatctgacaggaggccactggacaatttgttctctttcacaaaatgtctaaaataggagaataatgtaaaggaagtattctaagaattgcttttttaaatgcagatatgtaaatagtacttgttatacatttttcctttcaaaaattaccggggaaataatttatgacagaccatttttcagctttggttattatttgaaattttttcctactagcaagcagtctttggctttcataaaagtctggtaatcaataatattggttaag

SEQ ID NO: 443529 - DNA, 3001 bp, Homo Sapiens
tataggtattcttaaaaaatttatttatagaaacagacatattcaaatgcaacactggacaaaaacaaagagaaaaagttggaatgccgatgacaacagagaatctcactttcactttccatttctctgaattagcaccattagttcagaaatcacagatgtaattataattgcttctaatatataaaacaccttataaagatctgtaaactatctaatagcaaagttcttccaaaaacgcatttaaaaatcaatcagaatttaccatttgaaactgatgaaaatggtttaaaaatgaatccagttctacagcttgtcaaagggaatgagccataattagttttattggaagaaagtgcctgaattcatcttctagcctccttctaaccaccaagcaggtacagcaaattgaatattactacaggaataagagtcatctaaaactggtcttagaaaatattttcctaaactataaaaatactaaatggcatacaaaaatttcagcatatacagcaaatagactacagcagacaaatatttagaacatacttaaaactatcttgtaccacaatcatcataaacatcaagtattcttctaatcagttttctatgattcattctaattcaatgtttatttaccctcaagttttgttctagtgtcagatacagaccaaattctgtgtttctagcagaagttactggaggaaccattgaataattcttggtattcaactcgttctcaaagtgctggaagtgcaattgtagtatagcctattttttagatgaggggtcagcaaactacagcccgggggccaaatctggtcaccatctgttttgtccggcctgggaacccagctacacatattcctttatgtactgtctgtggtggctttccctgcttcagaaacagagttgagtagttatgacagagactgtatgtggcctttttggtccacacagtctgaaatatgttacaatctggccctttacagaaaaagtttgccaacctgttattttagataaatcacttcaagaaattcttaacaaggacaaggtaaaaatgtctaagattaaaaaaattttggttgaggtgtgctggttccatcacatagtaacatggggcaggccagaagagtgcaaacttggattggcaacttcaggtcttgaactatattattctggcattctaagcgaagtctggctatgataaagtaccttctattcctctgtgaactgccattttgtaccaagcaattcacgtaccacattgcagcaatgtgcttactgttcaaccccaaccatctgtggttcccacagacgatatttagcctttaaaaagcaataatcttctacccttagtaacagactaaactagaagtggaccttttccctatgctctgtattggcatggattctatactgctgtactgcataccttttagaatccttccctgtgacatgcatcataataatttgtaccactgccacccagggctacaaacatgtcccttttcacaaagcggaccaagttttcaagcgggcacatgggcttgggagaacgcttgtggtggtcttggcagaaagaggtgtggaatgtgacatcgacgccattgtaaagaatccggacggaatgttcactgggcttttctctgtcttgccaaagctcaaagatcaacctggctgcaaaccttgggaacctggcttctgaaaggcccaaggcactgagaactggtgacagagtgacatcatgagcagagtagagggcaaagagctcttctttcctgccctcggtggcacgctgcatccggccgatggtttggttcaggatggggtgggcacccaggagagaatacccgaagtacaatttcttctcccgtctttccctttcatcctcgatctgatgggtcttaattaccttgaagtgctccatgtcaacacagccatttctggtacagggaaagctgacattgtggcagaagtggcagagcatggagtctatggggttggcagctctaagctgcttggtggggacatccacgatcttggccatctccccgtaggtcttctccagctggctgtttttcaaacgtaggaggtactgacgagcgctgctcctgtttccagatactggtttcttaccgggcaatagcagcttccagagcagaacagcgcacttggctggtgcctgaaataaatcttcttccagtcaaaatctgggagaaagccataaagcaaggccagcccactttgtagggtccggctttgtcgcagtggtctctaaatagagctggtctgcagaccaatcattgggcaggagtttgtgtttctttagatagatatccctcagcagctgaccgttctgcaaatgctgcactactcctgtctgtgtgagctctcccatctcacacaatgggtgatttgggtaaagaggcaaggagttcaaggggctttcgaaagaggctccggatccttttgacatgtgactaatgaaagcttccagttttgggtgatacggtttcctgttagccaccagagtgcagtcaatttctggtcgctttgttttgggaatgacatacagtgggtacctgtctccgtggcgaatgaacacatgcactgagaccagcttaaaatgatgcggggcatgaccttccatgctgcgctcggccacgctggggatgttgcagtacaaaagagcttcataaacggggtctgtcacagggggctccgtcacagggtcgggcatgattctctttcgactcttgctactcattccattcttaggagtcgacaccgggatcaggtggaagaactgcaggctgaggctcacaaaggccagcagcgcagccagggccagcagcagcaagaagctgttgcggaaaagcattattaagtattctattttctcttcatggtttcacctcaaatcgggaacatgtccgcccatggtcccaggccggccccagctccgtcgctgcgcgcccggctcggcgctcaccccgct

SEQ ID NO: 443530 - DNA, 2662 bp, Homo Sapiens
  misc_feature (2438)..(2438): n is a, c, g, or t
  misc_feature (2570)..(2570): n is a, c, g, or t
  misc_feature (2619)..(2619): n is a, c, g, or t
ggctcggtccgtatctctaacattatacagaacatctcccacctgaataaacaggccaggatacaaatctttacaccaaaattaacaaggatttaattcctcagttaaatttaccatggctatatccaacagtatatctacccaattctaatcttctgaaaattatttagaccttgatgcttggggtattcatgaacatactttcaggaagagcctccaggtttaaagccctcagttaacaacttactctaggcaagggggtctattttcccaagagaagtacatggcatttataatgggagcccttttattgggagagagggaagagaacacaggtgagggtgaaggtgaaatatgaagaagctcagagcacacctttgttcctctgccgtgttaatccatgccgtgccatgctccagccctcacaaagagggggaccccatccccacaccaggcagggagcatttaaagcaatctccacaacagatttttaaagcataattagagctcctgccatgtaagtccataatgaaaagtctgctggatagctagagctgtagctatagctcaactttccaaaacaaacttattcttgtagacacatggttaaacataaaggagtgaagcataagctcagtaagactaactgggcttctaaatagtaccattatgaaaaagatacaatgcacttaatttctgtatctaactatttagaagtgaaaatgctccatacattacctatttcccctccccgaaaatcccctaaaaactgactaagaaatcttcagtattcacttgcgctagttgatatttagaacaaagttgacaacttaaagctttataatagtctgttttaatagaaacaagtgttggaatcaatcaatgtccatttcaggaagcttcttgtctgaatccgaaggcacagctgtgtctgtaccctgctcagcagcctgggggcctgggttgtctccttgtccatccactggtccattctgctctgcatttttttgttcctcttttggaggttccactttgggtttgggctttgaaattatagggctacaagtacttgtcagctccttaattttagcttcaatctcttttgacttgacaactggatccatggtcaaactctgcttgttctgcagatttagcttgttattcatccactccattgcttcatttgtgcttttttctacctttgtcatgtcagcagcatccaaatgatcatactggtcctccttgtttttgaaagagctgattattttcatatactgttggatctgtttccctagttcttcaaataattttggtcgttcttcagattcctggaaacgtatcttaataggttgacctagattttttaattcagccaacttatcaacataaacttgctttggctggtcttctccatcctcatacaaccaattttcagtatcttccagtttcaaagtaaaaactgttacgatcatcttcactcacaaactttctcatattcaccactaagcttgtctctcatttcatacacatattcctccactgcgttcttagcatcattccgctccttctccagtttatcctgcatgatcatcttaccctcattttcaatgtacaagttgagcatctctctgtctatctgccataatagctgattctcgattggcaggtccacagtactggtcttcacttttgccttcttggcttggggtggttggtccatctttttatccttggatccagcttgagaggtctccatttcttcagactctgccttattttctgctggtgtctgctgctgttgctcttcaacatgtggttcctcctggtccacttgcatcttctcttcctcctttgcattctgatctgtttccattggctcctcattttcctcagacttgtgaacctccactaaagatgcactggacacactgaaaatgccatggacatttactcgaactttgactttcacttttgaactggagccatcagactgaggagtgactttctgaactgaaaactgagctatagcaggatctggatagggcaaatcctgaggagagctgtagtaggcctcaagagtgaaaggttcctttctataaaatgtaagaactttagagaaaggagcagcatgatttttggaaaagacttcacagtcactgaatggaggaaaaagacaaaaacacaaattcaggatattcctaacacttttacccatgtgttctaggtttgtaattattgtacagtgttagtttctctctcttttcaattggtattatttccagattataagagttcccaagaatctttatatataaagtcagtaaaaaaggaatatacgtcaatctgcacataaaaggcaccgatgatttcagcagaatcaagtgtgagaaactaattaaggacacaaatttattctgactaaaataaatgaccacttncttcatgcactatgataaaatgttacagatttatgtaaactgaaatgaaaagcaacatattactcagacctaatagtcaattaactttagatatgtaaatgattaataaacatgataccttgcccttcttanctggagaattccatctcagagatattggatatgggctacatcagtgatngaaaattctctgactttgaaagcaggcgataagatggcacact

SEQ ID NO: 443531 - DNA, 966 bp, Homo Sapiens
  misc_feature (882)..(882): n is a, c, g, or t
tcaccgcaaagggcagcaaaagggttttccccagcggagaagccccaaaattgttgaccgccaaattttctttttgggccgaggccaaagaaggaagagaatggtctgggagttctttccccaacccttggtttttgtcaagggagagggccaaaacccggccaaagccgaggcaaggggcagcaatttctagccccagggtcaccccagggaggcttttgggtgggtggagtggagtaaatttctggtggcctggagccaacaggcagagaaaggagtgggagcttcagacctctccccaaaggcaagccagagcgaaggccacgttggggttctgtctcagagacggtaccctcaaaacatgtcactcttcctctgttctaagcaccaagggttgatgcagccgtactcccgcaccctcctgtcacggccagggtgcgtgcgcaccacagagctccgctggccagttccctcggaggtgtcccccaggcacttcataatgctggtggctgaaagaccaaaagcagcaccaaaggaagggatcttatttaggcaccagccttttgctctagcagaatctgagaagaccacgggtagggccctgataccatccacgcttccatttgggcttcacaacaggagacaagatccctgcaccaagaagagagcacggtcttttctgaggagagagaagggtggggagctccgcctctgtccttcaaggagactggcccaccagtctagagacacacacacggcaaaatgtcatcgtgatcagcagggtctgtgctaaaaaattataactacacggcattttctccagttctgacacctttttaatagaaatcactgtttttaggaaacaaatagcacttttgtaanttttttttacaatgtttcttaccttgatcttaatttaagtaacactaggaagacctcaatatcttttattttcctttttaattt

SEQ ID NO: 443532 - DNA, 776 bp, Homo Sapiens
  misc_feature (13)..(13): n is a, c, g, or t
  misc_feature (169)..(169): n is a, c, g, or t
  misc_feature (239)..(239): n is a, c, g, or t
  misc_feature (405)..(405): n is a, c, g, or t
  misc_feature (419)..(419): n is a, c, g, or t
  misc_feature (505)..(505): n is a, c, g, or t
  misc_feature (557)..(557): n is a, c, g, or t
cgtcttgccaganaaagttgccaaaaaaacacattcgaaccctttctctggcttttccctcactgttccagtgagggctggctcccaggcatgacagagatgaccagcagattgttcccgcccttgtttttctgggagccatttgaatcatctttgctgttggcttaantcactcaagagctgagagggaggatgaagaggggttatttgattcgttggggttcttcctgtcttccccntgtgtgcttggtgccaatgtgagtctttatctctgcttcctccatggtgacgaagtcgcaggcagtgcagcagatcgaaaccatccattgctccttgtccacgtggagtgacatgtggctgccaaactggacattgagctcggtctcaaatccacacacgtgacanctgtaataataagnatgtttcttcccatcactgccttcaaaaggtgacggccgcttgacaatgtcctcggtgtctgtacttcaccagcttcacggaatgnacggtcaagtgctggtcaagatttgcacgggcacttagcagcataaggggcncaagtggcatttgattttctttcctctgtgtgcagcgagaggtgtcgggacaatgtctgctgtcggccaaacactttcccacacacgtcacagggaaaaagctggtcattgaatttccaggatggtaatccatttcctgcctctaggactatcttttctgtttctggagctgatattcttccgtgcagcacggagtcactgggcagcagttcttttgaa

SEQ ID NO: 443533 - DNA, 1500 bp, Homo Sapiens
  misc_feature (93)..(93): n is a, c, g, or t
  misc_feature (107)..(205): n is a, c, g, or t
  misc_feature (545)..(595): n is a, c, g, or t
  misc_feature (1211)..(1246): n is a, c, g, or t
gcctttttgccctcccctgggttttcaaagcggatttctcccccccctcaagccttccccgagataggctgggaactaacaggttgacagagnatggggtttcggannnnnnnnnnnnnnnnnnnnnnnnnnnnnnnnnnnnnnnnnnnnnnnnnnnnnnnnnnnnnnnnnnnnnnnnnnnnnnnnnnnnnnnnnnnnnnnnnnncggcctcctcacgttaactttcttttgccatgcaagattgggcagaggacccctggtctcttgaggttatgaatggagctggcaggacccagcacagcaacccacagtgagagaagcccttgctgccaagggtaattccccgagtgcagacatcctgagaaaagtttactctcttcacacacattttcagtcaccagaattctctcccaaagcattcagcagtctttggttaatgtgtctttctggatgccctgaaataactgaggcaagccacctgctgtaagacttttctagacgatggtcctgagccattggcaaaatcagagaggatgggcttttnnnnnnnnnnnnnnnnnnnnnnnnnnnnnnnnnnnnnnnnnnnnnnnnnnnagtagtgtctactaatggacagggtattcataaaagttctgtactgttttaaacgtttcactcaaactttaaacagttgatatattacaaaaatctttctgtatttactcacgaaagcctggatcctagaatgaagaaaatacatggagcacagagccacagccatctcccagctcacagatcacgtgagtgagaaataaacttctgtggctgtaaaccactgaaggtttggagttacctgttactatatgaataaactcaggaaagccaacaaatacagcagccatgtttttcatcatcctgcaaacttagaaaaaccccaaaagcctattccattaagagttccttaataaagtacaaacaccagtgacagaaattgagaacttaatgaaacaaaagccagctgcaagaaccattgagacataaaagaggggttagtctgtaagattacgaaccactgagatttaaaagaggggttagtctgtaaggttatgggaggtgatgctcgaatgggatctagtctcgtagacgtcaaacgttaatattctcatatatccaaagtaatgcagagagtggtttatgtagagctttacattttacatagcagctttacatnnnnnnnnnnnnnnnnnnnnnnnnnnnnnnnnnnnnagatggcacagtggcctcgacgcccaggttttccactttcaaagaccctccctcacatctcattacctgataatgcaacacagtctttaatcggggcgaatttcggggtggaaaggactagataatgctgataagcgtcatcatcccatatacacagcaccccaaggacagcaccctatcgcccacgcgtccaccagcccccgaaaatactggagacaaaagctgacgtcggcagagcgctcctagtccccccc

SEQ ID NO: 443534 - DNA, 681 bp, Homo Sapiens
tggggtagtgagacaagcaccgttgtgggtattactcattcccgctctactaaggaggctgttggcaagcggaacttctagcctctctttcaatccagtctgaagttcaatctcatttgaagtcacttcccatcccggttcgcttggggggaaaccaggcgtccttgaagggaagggaagggagtccgggctgcgcgggtcaggtagcctctctccgttcgccgcgtgtcctcgccgtccccaaacctgcccttcccctcatcaatggaactccccggggagtccagaccgcgatccctttccttggccccggggtgcggggggcggacacgcgaggcgtgggactgatggtagccctgcctccaggaagcaggcaggcggggacctctgggcgctcggaggggcagctccgagggcacagggtacagggagaatcagccagatccctccctgccccgggcagccgcggcgggtgtggccagcgcggaggcaggacgccgccgagcctccaactttacctttccaactccgacagcccgtcgcctttctgaccgcgtccctacggtttcccggcatccgcctccctctccccaccacacctgaggaaaacttttccctcgcccctcaattcaaattcagcagtgcccacgggttgccgcaaaccgcccggtccctagcaac

SEQ ID NO: 443535 - DNA, 2248 bp, Homo Sapiens
  misc_feature (261)..(352): n is a, c, g, or t
ggaagccatagaatttattcgaatttgcagaagcatgagataatgtaccacaaaagagtttgattttacaacataaagtatggtaggaagtggtcaatgtacacagtgttgtcagcaaaaaggggaggcagggcagtttcacattttttgaaaggtggtggacgacaactacacttgtccttaaagtaaaataaaagcaggagagacccagcagagaccaacctgatttgcagttagcatcagaatctaaatctagtatcnnnnnnnnnnnnnnnnnnnnnnnnnnnnnnnnnnnnnnnnnnnnnnnnnnnnnnnnnnnnnnnnnnnnnnnnnnnnnnnnnnnnnnnnnnnnctcttaataatggctccatgttcagtagaagaaaatatttactggagaaaccacagctattcaggtttgataataaaccaaccctcattggtatcattacccttagtgctccttaaactcattgaagctgaaaggcacaacttaagcaggaaacttatcatcttaaatatatattataacttctcaaatgggaaaataagtcccaaacttaatagtctgtcatcaagaaacacaaaatcatttgccttgttaataaattaacagtctgaatgcatctttccatcctgcttcctgaccctgctggacacactaataaataccctgagaaaatcttctctttaagcttggcccaaggtaactcccatctccctgtggggttttccagctggcactccagcacatttgtaagaatgaacccaggagggcttccatggcaactgtgccccggagactcccaggcccagccgggtcccgatggcgagagcgttgtggctcagtgaagcactggcacagaaaggctggactcgaggaatcgaggggtgaagatggagtcggctgacattttttgccttaaaaatacattaggagtcataagcgtgatgacacatggagtgtagcttcttgcaccactggatcaacagtcatcaatttcatgactcggataaggtccccaggagcctggcagaatgtacatctccctctcccttcagagccttacatataatcttctcatgacgatggcaaacagatatattttaaattacacgtaacaattatacatagtgtatatccagatccgtctgcaggcgaactctgcatcagttccacatataagcctcacgcccccaccaccctgcaatttccccgtcctcggaactgtctcacgagaccaccagcgcacagacacgaacatgcctctcacacaccccagaacgcagctgtgctggagttgggcacaaaggcccctcactccctgtcttcatggtgtgggttcttggctgccaacagaactgtcagcctttattaagaaggaagggtctgtgtaaaaatgggatgtgtaaatcagaagaggggccctggcacagagccaggcaggcttgctttagcattgagtcctgcgtcgcgcaatgcccaggaccttgcctgttaagtctgggtggggcccctatggggcatgtccacgtgcccccgaccagactcattgccctgtctccagtctccactgtgggttgggctggaggccatgccacgtgggactgcaaacaccagccagttcacaatgcctgctccgtggcaggggcacggcagggaggagctggtatcatcagcgtttccacccatctgaacaaaggtgagcgggccatgcacccttccagctgtgcacagggatgtgctgaaggtgcaggaggcagtgcgtcagggccttggtggctggggtaggtggagaagcccgctgcccccaccatcctgcggtcacccctggactcgtattggatcctggccactgtgctagagtcagcacaagggaccaggtggctggctgcctgagagagaaaataagtcacagtggaaagagtttttactgctgcaaaaactaaaagtggggggagatctcagcaattctgacaacagtatacatttagcgacctttctgagacagcctggggaaaatgcatctatcactgtcctcttgatttggaaaaataatccgatgcataagccttggaccagggtgtgtgacgcagggatgataagtagagtggggggtgtgtagagacctggtctcctccggacggtgcccctccctactgcagagctgccctcctgtaagacccgacgcgtggtcgacgatatcccgagaattccggaccggtacagccctggcattttataaaa

SEQ ID NO: 443536 - DNA, 461 bp, Homo Sapiens
  misc_feature (294)..(355): n is a, c, g, or t
tttggaagccatagaatttattcgaatttgcagaagcatgagataatgtaccacaaaagagtttgattttacaacataaagtatggtaggaagtggtcaatgtacacagtgttgtcagcaaaaaggggaggcagggcagtttcacattttttgaaaggtggtggacgacaactacacttgtccttaaagtaaaataaaagcaggagagacccagcagagaccaacctgatttgcagttagcatcagaatctaaatctagtatcacaactttaagaaactaaaagaaaactattnnnnnnnnnnnnnnnnnnnnnnnnnnnnnnnnnnnnnnnnnnnnnnnnnnnnnnnnnnnnnnctcttaataatggctccatgttcagtagaagaaaatatttactggagaaaccacagctattcaggtttgataataaaccaaccctcattggtatcattacccttag

SEQ ID NO: 443537 - DNA, 556 bp, Homo Sapiens
ttttttttcatggaagccatagaatttatttgaatttgtagaagcatgagataatgtaccacaaaagagtttgattttacaacataaagtatggtaggaagtggtcaatgtacacagtgttgtcagcaaaaaggggaggcagggcagtttcacattttttgaaaggtggtggacgacaactacacttgtccttaaagtaaaataaaagcaggagagacccagcagagaccaacctgatttgcagttaggcatcagaatctaaatctagtatcacaactttaaggaaactaacaagaaaacttttagcaaaaataggaacattcaaacaagcaaaaaatttttacaaatgtacatatttaaaaaacacacaactcttaataatggctccatgttcagtagaagaaaatatttactggagaaaccacagctattcaggtttgataataaaccaaccctcattggtatcattacccttagtgctccttaaactcattgaagctgaaaggcacaacttaagcaggaaacttatcatcttaaatatatattataacttctc

SEQ ID NO: 443538 - DNA, 728 bp, Homo Sapiens
  misc_feature (550)..(550): n is a, c, g, or t
ctccctgtaccacagcaatggtcttccctcaaggtgcaagcctggtttatcaccctctaaatacgttcagatttttaagtgaacctagggaaaaagaggttgaggagatgatcaaggtcaaactggtactcctacaagtactttcaactctcatttattgatctcatgtaccttcccttgctccaacccttggcaggtatttatttattgaacagtgcatacatgcaagaaatgcactctgttttcacaaagtttttgttcaaatcttgtgcagctttagaatccatgaaatgtcagagttgaaaaatgtacatgcatttgaaaaccctcaagctccatttttgtttctccagcccaatagggttataaaaagctctgcttgtttcctgttcctaacagtgaccttctctctgggcctagtccatatttgcaacttgtaacctgtgtggagattgagtaactgcccctgagggaacactgcagattctcaagctcacttctgaaaagttctgcttgctatttttgtaattaattaatttttctatttggntttttagttaaggcttaccctactgtgaactattctatccttcttcgaaatgggaagcttatattgttttcaatttcggttacctaactgaaacattcattttgcttatgttagactagcaaaatacataaagtatagagattaacgtgtcaaacaccaatgtatcatccacccacct

SEQ ID NO: 443539 - DNA, 369 bp, Homo Sapiens
gacatacactaatcattggccggggtcttggtgacaacttttaaaatcccaaatagttttatttggattatgtaaaagtaagtgtgaaacatgggaacaacggacttccactgagcgatgtgaaaacgttacaggttcagtacttccaaaggaagaaacctccaaacccaaaaaagaataaatatgaatttgtatttttgaagaatgtgaaataatggtgtttgcttaattgctcattttgtataaacttaatattgtactttaaaatatctgctaaaaagtgaaaatttaactttttggaattgaaaaagcaatattaaatagtaatgaaatcctaattaaatgcttatttaaatcaggtaaaaagga

SEQ ID NO: 443540 - DNA, 1384 bp, Homo Sapiens
  misc_feature (199)..(199): n is a, c, g, or t
  misc_feature (1026)..(1038): n is a, c, g, or t
  misc_feature (1105)..(1105): n is a, c, g, or t
  misc_feature (1109)..(1109): n is a, c, g, or t
  misc_feature (1209)..(1209): n is a, c, g, or t
  misc_feature (1211)..(1211): n is a, c, g, or t
  misc_feature (1224)..(1224): n is a, c, g, or t
  misc_feature (1234)..(1234): n is a, c, g, or t
  misc_feature (1258)..(1258): n is a, c, g, or t
  misc_feature (1266)..(1266): n is a, c, g, or t
  misc_feature (1270)..(1270): n is a, c, g, or t
  misc_feature (1275)..(1275): n is a, c, g, or t
  misc_feature (1314)..(1314): n is a, c, g, or t
  misc_feature (1316)..(1316): n is a, c, g, or t
  misc_feature (1337)..(1337): n is a, c, g, or t
  misc_feature (1361)..(1361): n is a, c, g, or t
  misc_feature (1367)..(1367): n is a, c, g, or t
actctcctcctattgtgtctacaaaagaaaactttctctcaaagaagagcctttgggggggcgggcgacacagcgcctcccactaaaggggggcggcgtggcaggtgtttttagttgggcacaaacggccacgcgtgctaaactttatattgttcaatggacgattatcccggggggaatttctgtccatgtgttgtgncattagagatcacactttatttttgtgcataataaaatacgatacagaaaaatgttgaaaatatatgactcaactatctaattaaagctgagtaaactaacctagtcagattttagtttttcaacgagaaatgacaagagtagctgaatataaagaaaaacaaaaagaactttactttcctatgttaatacaggtcaagagaccctttcttctcaaaagggttggtaacaccagttcttagcaataaacataaggcacttgtttagattacaacatcactccattttttccacttgtttttctaaccctgtttttcccccacagtatcatttgaaattaataggatgaatgaggcaaatatgagacgatccagttgatactactcagagcaagatagtacagtacagtgtttcaggggtgatgtctggacataaaatgaacccagtcaaggtcctctgacaccaatgtatccactatcaagtaaacctgaaagaaaataaaagatttattcaatagttccagtaaaattgggttggaatacaatacacattaggaatttagctcctcacgggtggcatctgcatcttaagagttctgagtacttatgaatattcattctaagacaatctacatcatttgaacattgtcaagacaaataaatgaatttcatttcaatatacagtagagtttaaacaaaattcacacatacaccccctattatatggctggtacctcctccaaacacctcattagtggcagaggtaggactagtgttctttcccaacaataagaacttcagttgccactcataggagttgaaaaaaagnnnnnnnnnnnnngccatctgttaagatgttcctgagacagggccagttaataaaacataacaaagcactggagttcggnttgnacttctctttacatcactactaaactgttagattgagatgtggaatgcaggtcatgtctatgaaaaggtgattgtagcacaactggtcaatcagtaaaangncttcggcaaattncctttaaagnatactttctataaactacatggtncacaaaanggcnttatntatacaatggattgggttacttaaacctaatttggtcanancttgcaaatgcaatgagaatnttaagcctgaggctagttctcaanggatanggttaaccaaattaagg

SEQ ID NO: 443541 - DNA, 751 bp, Homo Sapiens
  misc_feature (49)..(49): n is a, c, g, or t
  misc_feature (335)..(335): n is a, c, g, or t
tctcaagtaaattatattccaggaagaacaacctctcaacccacctccnacccgtttctccttttaaactaatccatcccataactgtttaatgtgagttcatgtcttttaaatttttcaaaatatctctgtaatgaaaataaaaagcccctattgttaagtgccgtagatacagccaaaaacatggcatggagggaggtcagggccccctggcacaggggtgggtgagcttgtgcagctcagctaatgttctaggctgtggctaatgggattcagaggctggaggaagaggtctgtgaagctgggggcagacccattcccacagcctcccaagncttctgtcggtgacgctccttatcaggggcttctattacttgccctctttgctgatatcctggagaaccgcagtgctaattcagggaaaggcctgagacatcagcagctcagctgttttcaaacctcagcagggcccttctgtaataccaattttaatcaactgccctcattcacatttaatttacaagtcatgtaaagcctccatataaagcgctcccatcatctccttgccgagacggactggcaatattctttctaaagcccccaaagtcattctccaggagcatcagcagagatcttcaggcaatgagaaaatggaatatgtaccttttttcactgtctgtagtgtgttcagtttccaacagaaaaagaaaaagcatctgccagtaggccagcaggctcaaaggattcaaat

SEQ ID NO: 443542 - DNA, 1419 bp, Homo Sapiens
  misc_feature (609)..(656): n is a, c, g, or t
  misc_feature (796)..(855): n is a, c, g, or t
  misc_feature (1260)..(1260): n is a, c, g, or t
ggcgtggaggagaaatttagacttgaaagtcagggctgatcactcaaaaagtaagataggagatattgagggaaaatgtgactcatagttggagaggaaacaggagagtgggtacaagtgacagcaccaggaacaaccccctcccccagatgccaaagcattgctctgtatctaaagatgcatccaagtttgcaaaaaattatgggtaaatctggccatgtgaccaaagaggcagtcaaatcaattgcttccaaagtcagagctgtttgaaggtgatcagctcttaattgaactagtcatgatgaatcagtccaactgactgcatccagtctgacctcggtggtttccataaagggttgttgatgtcctgagctggacagggtgggcaggaggttgaagaaaaccagttggtgagtatagaaaagaaattgcatgtagaagttgtttgttctcaaagaaatctgtaggtgttagagctgggtttgttatgttattgtcagggacattataatattggtaaggaggagagaatgatttggtaggggtattcgagaaatttgagtaccaaatataaattatcagagatgagtaggctatggacagctgatnnnnnnnnnnnnnnnnnnnnnnnnnnnnnnnnnnnnnnnnnnnnnnnncacataccccaaagccatatacatatctataatacagaagtaagaataaagtcataagtaccagcatattttaaatccttagaagcactggttgggatgttacatgttttttcactgttgttgtttaccgttagctctcnnnnnnnnnnnnnnnnnnnnnnnnnnnnnnnnnnnnnnnnnnnnnnnnnnnnnnnnnnnngacccagcttatcactccttcatagagactcagtagtatgagtataccccaaattgaatgagccacagagaaatgcatccagccacactccctcttagctgaggagaagcctctgtgaatccacagattccatgcaatattcagccagccgcagacacaaggtctggctcccttgtcgtgagagtgaaggcatgctgcacacagtgggtttgcatgcacctagactgcatctgctgaacacccaacagctgtttctacaagctaaagttgtagcttctctctaccactgtctaaagctgtagcttgtctctactattgtctctacaccgttgcccaaacacttggtataatgctattgaatttttcacctccaggcatgatttttgtaaccaatgtaaagggttnggggttcagccagtctaaaaagtctaataatttctttctctcaagtccttccctttctcccttgtcttggacctgcccccgcccatttaaaaagtggttggacgctgttttattcccaaccttcttcaacctcaagtgtgttgtggggaaaagggcctg

SEQ ID NO: 443543 - DNA, 823 bp, Homo Sapiens
  misc_feature (626)..(685): n is a, c, g, or t
tccctctctcctgcctgtgctcaaacacccacagagaactctggaaggagaagaaaaacatacctctctccttccccggcctttccccacacacactgaggttgagaagctgggaataaacagcgtcccaacacttttaaaatggcggtggcagctccagacaagggagaagggaaggactgagagaagaaattattagactttttagactggctgaacccagaacctttacattggttacaaaatcatgcctggaggtgaaaaattcaatagcattataccaagtgtttgggcaacggtgtagagacaatagtagagacaagctacagctttagacagtggtagagagaagctacaactttagcttgtagaaacagctgttgggtgttcagcagatgcagtctaggtgcatgcaaacccactgtgtgcagcatgccttcactctcacgacaagggagccagaccttgtgtctgcggctggctgaatattgcatggaatctgtggattcacagaggcttcttctcagctaagagggagtgtggctggatgcatttctctgtggctcattcaatttggggtatactcatactactgagtctctatgaaggagtgataagctgggtcnnnnnnnnnnnnnnnnnnnnnnnnnnnnnnnnnnnnnnnnnnnnnnnnnnnnnnnnnnnngagagctaacggtaaacaacacagtgaaaaaacatgtaacatcccaaccagtgcttctaaggatttaaaatatgctggtacttatgactttattcttacttctgtattatagatatgtatatggctttggggtatgtg

SEQ ID NO: 443544 - DNA, 1018 bp, Homo Sapiens
  misc_feature (97)..(130): n is a, c, g, or t
agctctgtcttcatcttcaaaagatttagaaacaatagttactcttaagaagactatcagaatctcaccacacagggagagtgaccattctagtctnnnnnnnnnnnnnnnnnnnnnnnnnnnnnnnnnntcagtttcagaaatgaatgaaaagttgacaactctgtgttataggaagtataatgatgtctctgatctttgcaaattagaaaataaacaatattgtaggtggtccaagaaccaagatgacagttttacaatttgcaggaaacttacatatcctttagaaactctttgcaatagtccaaatagaagtacaaatacattgaaagaaatgccttggggacatatcaataacaacgtaacacagagctattctattggttatgaaggtagctatgatgcctctgctgatctctttgatgatattgctaaagaaatggacattgcaactgagattaccaaaaaatcacaggatattttgttaaaatggggaacatctttggcagaaagtcacccttcagagtctgatttttcactgagatcactttctgaagacttcatccagccttcacaaaaattatccttgcaaagcctatctgactctaggcattcaagaacatgctctccaacacctcattttcaatcagattcagaatataattttgaaaatagtcaagactttgttccatgttcacagtcaactccaatttcagggttccaccaaacaagaattcatgggataaacagagctttcaaaaaacgtgtattttattcagatcttgatgggtaactatgaaaaaaataaggatttttccctggaaatgacaaaacggcaagcccgccccaagctgtcccaaaaaattttaaaaaccccctagccccgaaaaattccaaaaacccctaattggaatccggggaatttttcccaacccccgaaagggttttttaaattaaccttaaccccctttttttcccggaggagggcgcccctggaaaaacccgggtataaaagggg

SEQ ID NO: 443545 - DNA, 769 bp, Homo Sapiens
  misc_feature (268)..(268): n is a, c, g, or t
  misc_feature (597)..(605): n is a, c, g, or t
acaaaaccacttcaaaggtatatgcaatccaatcttttagttgaaacacgaattttctttctttacaacttcttaccctcaatacctaagaagaattctaattgtcgtcttctaacgttgattttttatgacaacttacccaaggatattattcccagagaaaagagactgatgctatgagttcctatggatgattaccgaaatctaagtatctttttttctaatttttgttgttgttgtggtttaggcctctgtccatccttgaagncagcatagaaaaggcactaacataattcctggggagcacaaggtgcaaatcctaaagtatgttacagagacagacttgagcttcacaaaatgaaaccaacgaagatcacatatcactgactcagaagaaacaacagtctgcttaaacagagaaaaaacactgtttatggaatacatgaatatgagaaattgtaccatgcagagatgtatgtatttaggcatttcctgcctgataacctctgtcaccctttgttttcacctatggaacagagaagaatactgcaaggtaacaagctcaaaacataacctactgtcatagagatttgtgannnnnnnnncagatgtgcatgtaacttttacaagtgatcatggaagttatttatcaacttcccagagtttggaatttaaggagcaaactgagttattgtaggcaatacggtactaaagtgtcctataaaacaaacacatagctcttttttagtgcaaagaaatatagcaagta

SEQ ID NO: 443546 - DNA, 675 bp, Homo Sapiens
agtcgccgccgggtacgttactcatttccacatagcagacttgatgtactgagaagattaaaacttagcaaaaggggcagctcagtggcagagctgaggaaatactaccaagttctccttcccaggcttctcttccagagatttcaagttgcttgggaccaagaaccctgggctttgagttgatctcaaggttacacactgagacatgtagctttttgaagctgctctgggaacagagttctcagaatccttggccagaggaagatttctcccctcattaccacagggagctcaactttggcagtgctgtttccatcgtgaccaggaagcatccataatgttgggttactggaggctctgtgacaagcacctgtccttttattctagggcagcaatgtcttaactgcagggggagggagtaaggaaggtgggggtgagtgaacacagacttcaggtgggttcatcagggagtttccaggggctttggaagaacttccagctgtagcatgggatgacctggccttctccacccttgctttcctttttcatttcttgcagtcacccccttccagcttttaagctacaggttcctccaagaaagctgcaaaagcagagctcaaacagcttttgtagaagaaaggtttaatgtaaattctgatattttgttggcaaagg

SEQ ID NO: 443547 - DNA, 899 bp, Homo Sapiens
  misc_feature (403)..(417): n is a, c, g, or t
  misc_feature (618)..(633): n is a, c, g, or t
ggccgcccgggcaggtactccatgagaaagccctagtcctgaaaagggagccaccagacatactgcaacactctttaacagtaattttcagccctaattcgatagacgaatttttagttgattgcaaacgtcgttcactgtttgcttaaatacaaattgaacacttttcttatcagagttctgcaaaagaacacaaatggcaaccaatcacatctatttatcataattgaaaggtaaattatctcttgataattttcattgtctaaatatttcctaatatgatttcaaatcaataacccctgtcaagccaaatatccttacagtgcttttggtatttgtaagggcacatgttgtaattgtttttctttccaatataaactacttgaaatcactaaagggaagnnnnnnnnnnnnnnngcagcttaaagcagcaagcatgcaaagcctttaagaagctgttctactaagttgccaaaagagtgtttgctcagtctcccacagtaccattccatgaaaatgtggatatacagtaatatattaatatattccaccgaagagtctacttcattcacagaatgtttacactaagcataaatattatcctaaatactggatttnnnnnnnnnnnnnnnngaaggggttgactctaatgtgcaactttccctaaacccattgtcagtgactaagactgcaggtgtccccgcttgtttgctttttatgtatttatttattttttacctcttcaacctcttctgcggcattgttctgtatatgtttgggtccaaaagcaaggcagtatctttgggtagctttgataaatgaactactttagtttttaactgatgtcgttcactttcattcacccacacatcaggcagaatgtcttcaggcatccaatg

SEQ ID NO: 443548 - DNA, 665 bp, Homo Sapiens
  misc_feature (12)..(12): n is a, c, g, or t
  misc_feature (108)..(108): n is a, c, g, or t
  misc_feature (110)..(110): n is a, c, g, or t
ttggaatcctanaatgtacctgctttttgatagataatagtgaaataattcagctttgccattgctgaagttgtcaaaattccccagtaattaaaatttgaatttttncngaatatgaaatttccaaattaaaaacgtatatgtgtactcttttaaaaaggaatttgatagttcttgtcaaatgagaaaatttaaaggtaagagttatggtttgtcttatgctgcatagactattcacctcctaacttgaaggtctaatcataagacaattgtttttttgtgcatagttttcatctaaaattaagtttaccaaaggcaaataactgcttactaggaacttcctttagcaaaaattactataaagttcaggacagtttgaaataaaacccaggaaacaagattaatgtgagcagttctccaagatcctaactggtgggacataaactatgatgcaatggataggaaaaggtagtgcaaaaagaatttcttaaggtttaaaaaatacacttttcattataggaaaaagaagattcagagaaacaaaggaatgtaaccttattgattacatttttggtgatcaccgagaattttttgtactatattttaaaaaatgtattctactgtaacaagttaataaagagattttttaaaaaactataaactag

SEQ ID NO: 443549 - DNA, 2063 bp, Homo Sapiens
aactttacaaaatttgttttatatctgttagaaaatgtacagacataagtattttcagttgacaaagcatcaaacccagttctgcctagtgataagtttcaccctagagtatgtatgtaacgttttagcttatccatcctttcttggagcgcctccatttccattgaaagccaggctggagcaggacccttttggagtagtgactcagttgcttccaaagcccctgctattgtatgcagcgctgacctgtacttttcttcccaggggaactcctgacgagctctttttgcataaggctgtaaagatgacctctttgcttcttctacagtcacattagcaaagggttcccagaaaatacctttttcctgtttcacacgttccactttggcagcttcagtttcatctacaaacccagtcttttccagaaaggatacaactttgttcttagtttcttcagaactgagacactgtggaactatctcttcatgatttgttccctcagcgaactgagtaaacgcctccaaggtatgttgttttagcagccaactcctgtcagctagcagtaaggcaaacatacaggacaggttgggcagaattctgtcctggatagcttcaggtataaaaagtttttcctaaagaagatacaaaatccaacattgccaaacgaacatagtcaggaagctctaatttaagtagcgaggtctgcaaagttactgcctgaagtatcagtttaggatctagagtttgaatgaaaaatcccaacagtggaagtaaaaggctgaatgtctgttgaacataaggttgatctgctacctgtttaatgtttaaaaaagcccaaagctgactcacaacttcgataattgcagtttgttttcctgtatccaaagcttcaccagcagaattacatactgcaagcaaagcagacagtactgtgttcagagattctagttctcccaaagtacgactcctgctcagccatttcctgcattctgcagtgcctactgtggtgacctcatggacagtttgttccctaagctcaggaggtaacgcctggaaggaaatatgttgccacagaggcagattttctgcttcttttggggaaaatttctggataaactccagctgatggggtggtgccatgaagaaaaagagacgcttcaacagtattgataggttgatgagttgataacattctccagggcatgactttatcagatgagacactatggtgacatggtgtgcacacagttcagcagtcccatatcgagcaaggaagcaccatgcatccatagctaacaaagaggtgatcatattagcactaagtacagcattcagcagagcagcatccagttcagcaaacagtgagggatgaaaggaagtaataaatgtaccacagatgaacacaaacatgcttgatacaaggtgacagccacctcagctttccccttactctttaatccctgtaaatgaacaggtagagagagttcaccagaacactgctcagaactgtagaaaacggctttgagtagagatatcctggttgtcgtttctgagacctggctgtctgtgcaccacagggtttgcacttccttaggctgagatggcagcttatccatgacaacaaccagaagaagacattgtggaaactgcagttcacatggcaggtctaatttactgtccaaaaccacctgcatgaaaggctgaaatgtgagcagctgactgataagtggatccagtgtcactaggaaagcacctgctatttcctcttggtgtgctttagaaatcctggtagcataaaggcttggaggaaacttgctgtgtatctgaagatacagttggtgcaaagtacagcaagaatcagagaggaaaggaagaaattccttagcgtagtgcaaaagggagttggcaaaaaaacgacacaatttgagtgttttctgaaataatctgtagtcagcattatcctgtgcatctgactgtgtcatctgctcagctaactgtaaacaagaatggaaggagaaaagaatgtcttcacacaagctagtaacccagtaggccaacaggca

SEQ ID NO: 443550 - DNA, 860 bp, Homo Sapiens
atagaaaatgtacagacataagtattttcagttgacaaagcatcaaacccagttctgcctagtgataagtttcaccctagagtatgtatgtaacgttttagcttatccatcctttcttggagcgcctccatttccattgaaagccaggctggagcaggacccttttggagtagtgactcagttgcttccaaagcccctgctattgtatgcagcgctgacctgtactcttcttcccaggggaactcctgacgagctctttttgcataaggctggaaaaaaaacataagtaatatcacaatatccattctaaatataaagaaccttccttttggactggagtaaagcttacatgcaaattttattctagtcattggatcacaagggtaggaggatgcaccccaaaacccctacacagtcatctagaaaaatatgtaaaggcattttggtttatcatagcaattcagagtgctactaccagtgtcttagtttgtatgtggtatacaacaagtatcctgtcccaaagggctcccaatgagaagtgctgcatagtccaagcttacatgtcttataaacaagttcataaatgtattttctttttatgagagtttgactaaaacttatcagaatgttgttcttcatgaattactactatactaattactatactaatagtgctcaaaacaatattttgaatatccttattggtgtcaaattctgccttttaataagtagatgtgatcttcagttactgccaaaaattattaggagactcatttgattaataaggcaaggaatcaaactaaacatttaggaagtaaagtttcttttcatttttctttctgtgggttcaggtaaaggac

SEQ ID NO: 443551 - DNA, 1183 bp, Homo Sapiens
  misc_feature (144)..(145): n is a, c, g, or t
  misc_feature (147)..(148): n is a, c, g, or t
  misc_feature (151)..(151): n is a, c, g, or t
  misc_feature (164)..(164): n is a, c, g, or t
  misc_feature (965)..(1008): n is a, c, g, or t
tcgcgggaataaaccgacggcccactgcctagcctttattataccgctcccctatagggggccccccttttaacaagaaaaacgggggtacgtgaaaaactgggcccccctcgaggggatctttttagaggcgggccgcccccnntnnccntggggttttctcnatttatgtttttccgggtccgttggggtttataagattgtttggggtttggggtttttttcctccgttttcgttttttgagccaagcgtgctggtaacctgtggacccgcccggccggctgaccttcactttgtccttggagcggtccaggctctcgagcacccggttgagacggatgttgagcagtctgacctgtttctccaggtgctccagcttctcctccacgctggggttgctggggttgctggggccgctgggactgcttcgccagtagaagcccatgggcccggtcatgaagtagacggccaccacgaagcacagcggcagcaccgcgttctccggctcgccctcgtacttgtgcaggatgtacacgcaggacatggaaaacaggacgacccgcacgatccagaagaagcggccgaacaccacgtgcaggacgctgaaagtgaagcccagggtcagggacaagaaccagtaggccaggaggacgacgccgaccagcaggagcgcgcgggccgggctgctggacaccgaggctgggctgaaatactgggacaggttggagacgtcaagtccaagaacatccaagagctcggtccagactttccacagtgtctccacgaacatatccactcccagcacaaatctctcagtcagcctggccaagaacttctgagcggcgcgcacgttgtcctcgccgaacaggctgctgacgctctgggagaaggtgttgaccgtgcggcggtagctgttcttctccgcgccagccgcggccccgcgccccctgcgcgccacggggcnnnnnnnnnnnnnnnnnnnnnnnnnnnnnnnnnnnnnnnnnnnngagcccggcccgggccaggggcccgccatgaggcgcagcgcgcaccatgctcggccggcggggcgcggggtcgcgatgcggggtgagggccgtgcgctgggccgcagcagggctccggctagggcaaggttggcgcgctcggggccagcgcgccgcgccttacccacagccgccg

SEQ ID NO: 443552 - DNA, 978 bp, Homo Sapiens
  misc_feature (35)..(35): n is a, c, g, or t
  misc_feature (45)..(81): n is a, c, g, or t
  misc_feature (101)..(101): n is a, c, g, or t
  misc_feature (485)..(485): n is a, c, g, or t
tttccaacaacatttttacaaagtagaatgcgttntagtacctgnnnnnnnnnnnnnnnnnnnnnnnnnnnnnnnnnnnnngcattccctcttcattctcntgatctgttttgtgctgccttgcccttgtaccttctctgtcccttctcaagctgtttcagattaaatgataatctggttctaggacattctgtaagacattctgcctgaaattcaaccaaacgctagaaaaggagaataaatgagataccatgtctgaaaagaattcaacattttaaagttgaaacacattggagggttgcctttctcactcccaaagcagctcccagggtctgtagaactgcaaaggtaagtagctattttgttagtcactttgcatgtttctctgaactcagaagttctcaggaccctaatgctggaagcactctggaattctcctatccccccacccttttacatcttcgctccccactctagcccccatngctactagtgcctctgcaatgcatccccacacagggcagcatcccttaggaagcttggagaggcaaccctccttcactgctactggaaagttcttgcatacagcacattactaaagaatccaggaagtggctagcattattataaaggaatatagtaagcaagtctggctcactgacaagcagaccatatgaatagaatacatacttaaaaaaattacacatactttaaaaatgaagattataaacatgtagcagtttagaaaaggcaatgtgctacagtctactataaccacaattgcacaacaatttacagattcagtaaaaggcagggtgaaatcaacagggccatcgctcaaacatggcaacccaagcgaggcaggagacgtgtgacaataccaaatggaactctcattatgctaggagctgtgatcaccaccaatatcacccccagaggagcctcgtgccgaattcgccacccaggcctcgcttccta

SEQ ID NO: 443553 - DNA, 623 bp, Homo Sapiens
  misc_feature (55)..(55): n is a, c, g, or t
  misc_feature (502)..(502): n is a, c, g, or t
  misc_feature (531)..(531): n is a, c, g, or t
  misc_feature (572)..(572): n is a, c, g, or t
ggactgaaaatggatcttaatgtttttaagttgtggaagggtatatttctaaaangaggggggatgattaactaggttagtattaccagcattagtaagtttaaggaattttagtatgtaatagcaaagtgtttgattaaaagtctaatcctatattactagtcaaaattagttacattctgatctaggaaagataatagtcattggatattgatatgctgtgctgtcagaaaaccagactaagatagaaacctttatctgactcccacatgttgcttgttgtgatgggatgtatactttacagcagctttattgctgctttgaaaaaaaatgtataaactatacatttggagtgtttgcatataattctttataacctccacttaaagctgtcagacattggtattttatcagtccacattgttgaataaaactaatgttcttaggaatccagcttgtacacactgtttaaaaaccctcagggacagtttacacactcttntcactcaattcaggtactttgatgctatncttaaacctaacagtgacttgtatttttctgttttgctttnatttcaacgtgctggtagcacatctgatgaatgtcaacttaaaaaactcag

SEQ ID NO: 443554 - DNA, 838 bp, Homo Sapiens
gaacgtgatgtcctcctggggaatgttgggaaggcacttgcaaagctattttaagaggcgtttggaactgtgagaggacagggaagtataggagaacatgccagaagccttgtttgtaaatactgtattctctttaggggctactcagtggcaaaatcaaacagatattttgccagacaataaagcagctcatctttacttcctaagagaattccacactcagtgaagatcaaaacttacaatgaaaacattttaatgaatcacagaaaatcagtttttctttttgtttggttgttggttttgtgtctttcctggtgtgagctccccaagcttacagatgagctgatgctactagttggtaccagtaatccatcagaagacagatgaaactttgtaagagaaactgtatttgataaagctgaaagctaacttgcttcaatctttttagaaaatgttttattcatcttcatagagacccaaaggaaaaataatttggacagggatggcaattctgtgacagtttatcatccctccttagcaatggaccaaagagagaaacaaataggaagtcaaaaatttcctcgtttcctggtctgtgacaaccccaaagattccaaagagagttggagaatagcttgcttgcaaaagtgagcaggtctcacatactcccttcaactccatctcctaaaaagtaatttaaatttcaggggtatcatctgtatagccacataaagaggacattgtccatatttaaaactgagaaatatccatcattcatatcagtaacattttcatcttattattctgcttttttaaacttacatttctgtccccctgc

SEQ ID NO: 443555 - DNA, 776 bp, Homo Sapiens
aggctctgacgcaggaagacctccatgcagggactttgtcacaggcctcagcctcagcctgctggactaacccgcgacatcagtattggctggaaaccaggcatgggacatatctattttctctccaacctccatgtcagcacacactggggactgctgcttgctaattcacaaggttaccctgatcaaactggaaccaggggtggcgttttgataagaccggcttcaggtaggaacccagagtttctaagggctggcaccatgaaccagaagcgaatctaaagcatgaggtatacgaataacccaaggatgtcactggcatttagatcagcgtttctcagtctctttttcattatcaacatgcccctgagcattctgagaaattaatagcccaactccacccaccatgagattttaatgctgtggccccttagagaccacaaaccattataacgtctaagattttgtcaccacccaagaatgaattttcatcccaatgggggttatattatttcctgtgttgagaacacaggatttagctctaccctcttccccaagtccttttgaaaactagccagggggctcactattcccagaggtttcactgatgtaaacatctctggggtcatcaggatggcatctgcacagtgagcagctctagttctccaagttttcctctagggcaacttgtgagttcatttcagggagataaatattcttgaattcgggagaatggattaagtgtggcggaggcaccattctaatagacctgaaag

SEQ ID NO: 443556 - DNA, 828 bp, Homo Sapiens
ggctggtaccggtccggagtaccgggatatcgtcgacccacgcgtccgagaactgtgtgcagtttttgtctgatcatgttcaaggaggtgaagactagccaagagtccttgctgagaagcagattgagccagttgtgtgttgtcatggagactggggtgagccctgcaacagcggaggggcctgagaacttggaggatgctcctctcctgcccggcaattcttgtcctaacgagaggccactcatgcagactgagcttcatcagcttgttcctgaggctgagccggaggaaatggcccgccagctgctggcagtgtttggcggctactacatccggcttctagtgacctcccagctccctcaggcaatggggacacgacacacgaactctccgagaattccatgcccctgccagctcatagaagcctacatcctaggcacagggtgctgcccgttcctggcgaggtgacctagggatgaaggtactcatcttccttcaagactgagcagtcaggaaggcttcgggagcccaagatggccaatggggagccccaggtgaggagagaagcatctgggggcactccaaaaggggcctgtgatgtcagccactggggtgtgtgctcacttcagggcccagcacaaaaatccttgtttgacatctcatgcttgaccccctgggctttgcagaagctgatggttacagagctagtcccaccaaagctactctctcgtgcgtgcttagaacgtgtggacacgtatggaacagacgtggaccccattgctttcatggttcagagaaccccaggagacatgaagaatgaccagactg

SEQ ID NO: 443557 - DNA, 661 bp, Homo Sapiens
tccctcatctcccaccatattgaacacgcattaggtgctcaatgaatacttgtccattttagtgaagattaagaggaatgagacggaaacttgacactttgagaggttggcacacgccagaattgcaccacacttttgcactcatagctcatttactcatcagcttgtggtcaggtaggcattaccgtccccattagagaagtcaacggaggctcagcaaggacggccagggtcccccagaaagtagaggaggacttcaggtttaaccataagcctgtactctttacacatgtaccccatggcttctccaccgaagctcctggcaccgtgctttgcagacagacgacgctcaacacattttgagcagaagcgtggttcagcaccaggaaggacaccaacttttgcagagacgactcttgggatggagaaagacttcccaaatcttcagggtgcggtcaagacagggtaggctagcgccaggggagctagtggctaggccccagggcagctggggccgaggccgagcaaacggccaggggagaggctcccaggagcccgatctgccgctgggcgacgcgaagcctggcggctagagtcccgggcagcccgagcacggcgggaaggcggcagcaacaggatcggcagggatggcggggacggg

SEQ ID NO: 443558 - DNA, 862 bp, Homo Sapiens
  misc_feature (377)..(377): n is a, c, g, or t
ggcctggagtaaatctcttttattgcatcaacaagggctggctctgttcttggtccagtacaaggcaagtcaggcacacataactagtgtccaaatggtccttccaagttgagagacatctgtctcattatccccatcgtaataagcagcttgatatcttctgggtcttaacacaccagccttctgagttccttgtgatgatgtcttgcacattgtctgatggccttttcattcccatcagttaacagaactttttttgacaatctgcagaaatagcacccatgagccccagccaagcatgtcaatgccaccccttagttcacacacagcaagggccctgaatatattattgtgcttgaggcagtagtaagccaaancctcttcagattggcccagatgcaaacatttcctgtattgtcaaagctggtaaggacatcgttcaacattcaaggatccactattatgccttaaggagatactgtattcaggacagaagatgcttggtatatttggacccatgcaccaaccctcctctttcagtttcccttttctttgccttctgttactgaaaccagattaaatgattgcaaatcttctgtacagatacatgtcgcaggcaatcatccaggtgtttttgcttcagaacctgccgcaggagcttccaccgggcggctcccaggggcgccgagactacgggcccccgagtggtgcagccaactgccggactcccgcccgctgctcgcgcggtctcgccggtcccagcgtccgcgactcgcgactccatctcactggagccttccacacccggaggtgccaccgccgcagctcgtcccctgccaggccagtaggccaacggccaagg

SEQ ID NO: 443559 - DNA, 649 bp, Homo Sapiens
  misc_feature (29)..(29): n is a, c, g, or t
  misc_feature (99)..(99): n is a, c, g, or t
  misc_feature (103)..(103): n is a, c, g, or t
  misc_feature (192)..(192): n is a, c, g, or t
  misc_feature (196)..(196): n is a, c, g, or t
  misc_feature (290)..(290): n is a, c, g, or t
ggacatccaaccttaataaggtcagctcntcaactgtagtgtacactttttgcccatctgaaaggtactatagttcagtgtggtttagtaaacttagcntagnaggcaagatgtctccctaaaacttagtctctgtcctatttactttgtttataagactgtgacctaacttcccatggccaattcaatcgnactnaggttatctttactctaatggacccaggccttttcccagtcaatccatgtccaacccttcatctccagcgtgatcactcaactcttcaacatgncctgcttgctgcaggtttaaaccacaccaccatcctgtgcttccccctaaatcgcccatgatgcccgcaggtaaaaataaaactaaaccccacttgaggtgctatttcagccaaactttaaaccctctccgaactccagaatccacctaactggagctggacgaacttcactgggatgctggcatgggccctaatgtggttcccttcatttagtttttaaaacaggatacaagataccacaaaggaaagaagttaatacaacagaagacaccactagtagaaacctgcttgtttctccctcaagatagtcagacatttggagccaaagggctcccaacagcactgaagccttatccctt

SEQ ID NO: 443560 - DNA, 1193 bp, Homo Sapiens
aattcgccacccccccggggtgtctttcccgtttaaactgtgaaaggcccgccatttttccattcaggcccggagtggtcccgttttcttcgagaaggtttggttattaaatttttaaggctcgagctttttccaaattcacgtttttccaaccattgttgggcccaattcccagtttgggtaacggtgcctcattctgttgcagttcagtaaacatgtttagtgattcatcaaagggctttcatgagttttccagttccaaatgtgaaaatttttaacttttttatcaggaccattagtagctattttcttcccatctggtgaaaaacatacgctggttggataagccttacacttggcaaattcatataaatcagtgtcagttttattttcccagttcacatttttggggaatttatattcatgaggaggcccagtccagtattcaatcatcccagatttgtcagaagacactactgctttgtaaactgggtttacgccgtatctgagtaagaggtgatgtatggagttttgtcacaaaatatgaagtggctggttatctcctcggccatcataaatgaaaatttttcctgtactcttttcggaagcagcaactgaagaaattgcatcccctgggcaatagatccactcacactgtccaggaaaatagccaagtttcagcatgttgatcatgtcaaagttcactacatcaaacaccttcattgctttatcatcacccacagaacagaacaatgctccctcagagctaactgcaatactctcaataactcccaggtgactacgaaaatgtttaacaaattcaattccctcttctatttttttccagaacttgacatgtccatcatgactggcagtaataataaaatctgttttggtgcataccacatgggtgataacatctctatgcatgtaactgcgctcatacatggatgcactggggagattatcaagatagactctttcaaactctaagactcagagttatgatcaagtgcttcagaaatccagtccagactggagaagtcacaggcttcccagagaagatgatagctaagtgctaaaggttgaccaaagtcagttcagtggaagagcttgagggaaattattcccggtagaaacaccatatctgggtaggaatccagaggaaaaaaagtacaagaccgattctcgag

SEQ ID NO: 443561 - DNA, 855 bp, Homo Sapiens
tgggggaattaaattccaatggaggaagcccagtcccagtatttcaatccaatcccagatttgtcaagaagacacttactgctttggtaaactggggtttaacccgtatctgagtaaagaggtgaatgtatggaagtttgtcaaaaaatatgaagtggggtggttatcttcctcgggccatcataaatgaaaatttttcctgtactcttttcggaagcagcaactgaagaaattgcatcccctgggcaatagatccactcacactgtccaggaaaatagccaagtttcagcatgttgatcatgtcaaagttcactacatcaaacaccttcattgctttatcatcacccacagaacagaacaatgctccctcagagctaactgcaatactctcaataactcccaggtgactacgaaaatgtttaacaaattcaattccctcttctatttttttccagaacttgacatgtccatcatgactggcagtaataataaaatctgttttggtgcataccacatgggtgataacatctctatgcatgtaactgcgctcatacatggatgcactggggagattatcaagatagactctttcaaactctaagactttcctcttcttggccagtgttgcctccacaggtaaaggtccaacccagcgctcttcgttctcctcatcgttctcctgggacaccgccactgctactgccagctctctttcgctgagttctgttttttccggttcctccgggtcccggcgccttctacgtctctgctgaaaatcgctaccactttccgccgccatgttgttcgcatcgtcccgctctcgacgaattcgagctcggccgatttggcctgat

SEQ ID NO: 443562 - DNA, 699 bp, Homo Sapiens
  misc_feature (18)..(18): n is a, c, g, or t
  misc_feature (27)..(27): n is a, c, g, or t
  misc_feature (42)..(42): n is a, c, g, or t
  misc_feature (57)..(57): n is a, c, g, or t
  misc_feature (82)..(82): n is a, c, g, or t
  misc_feature (90)..(90): n is a, c, g, or t
  misc_feature (102)..(102): n is a, c, g, or t
  misc_feature (127)..(127): n is a, c, g, or t
  misc_feature (176)..(176): n is a, c, g, or t
tactattttgaaccattncagctatanttgacctgttggacncagtactgtctttcngctttcatcaagggtacaggacagnaatgcctncatttcatatgnagatccaaagaagatcgtgaagttncgaagttgttttgtgacctcaccaaccatttaaatctcaaagcaattcntgagctacatctgcttcccaccttacgtttccaattgacaatttctttcccttaaaatgagctaatttcatagactcctttgtgaaaccataaatcgattattaggaaatttcacaaatatgcatacatgtaggttgtaatgttaaaatgtttaatttcacagaagccccactacagatgcttccttgttaaatgttatattaatattggagtccagaatgttctgagcattttccaactctgttccaaccttcctaatcctctcccttgtgagctgatgtgtataagcagatttaaatccttccctttctgtactaaagggagaaagaaaaggaagagatcaccctcagtgcttctttgctgctccttttctttagacatttaaccccttttagttcagaaaatgtaaactagcactagcatggtcttttaaggattttgttcatatcagtcatatatctgttattattttgtatttaaagattgtgtttattcccacgatttgaagaagcctagccaaagg

SEQ ID NO: 443563 - DNA, 959 bp, Homo Sapiens
  misc_feature (62)..(62): n is a, c, g, or t
  misc_feature (161)..(161): n is a, c, g, or t
ttttggccccaaagggggccccttggaaaaggggaaattttttacccgggaggttcctccantttaagggaaccttttccaggccctttccatttggctggaggaaagttgaagtttttcccggatttagggatttttacagaaaaagttatcccagggancggggatcctgtctcttatttaatcagtccctttggacagctgctgatgagaaataagttttacaaaattcttaagcaatatgctgctacggccagtaattagagctgggtactgttccagcagaatgtccaaaacttttaaagagtcctccttgaattccttcagtaatgtgagtcatggcactagagagatgggcactttaccaaaggaaaaaatggagaaatttgttcagctcgtattttgggggccaggaattgaagaagttgaactgctgctaatcgtacattagcatctttatctgtaaacacagcagtcacttcacttaatatgtttgaaaggtgtgcatcaattataaatgggtattgagacaaaaggtctttaagtccaagaagagcactttgtttaaccccagcattgtagtgatgcatctgtgacagcaaatcctttatgttaagttttctattgtttgttggaagtgttccatcctctttgagttgctcaggcagatgtatagtctttgttttaaagtttgtaggagtagcattttgtaacttgggcttctttttaccaactttcaattttactttttgaaaatcatgttggcgttttctttttttagtcattctcgactactgaggacccggccgcggccggggcgagaagcccgagaagacaagcgagggagcagaagcccacggggcaacagcgtgcgccgccgacctcaggctctagctcccggagcgtgttttcaaatagcctcgtcctcacgcggccgcctcgtgccgaattcgccaccc

SEQ ID NO: 443564 - DNA, 888 bp, Homo Sapiens
  misc_feature (23)..(23): n is a, c, g, or t
  misc_feature (47)..(47): n is a, c, g, or t
  misc_feature (52)..(52): n is a, c, g, or t
  misc_feature (59)..(59): n is a, c, g, or t
  misc_feature (98)..(98): n is a, c, g, or t
  misc_feature (129)..(184): n is a, c, g, or t
tgtgcataacagtgtttgatatntattggtgggctgggccctacganactanggacttnaactgtcaaacactgggaagtcacattcaaaggggaaanacagagttcccaatgttttcttttggtggcnnnnnnnnnnnnnnnnnnnnnnnnnnnnnnnnnnnnnnnnnnnnnnnnnnnnnnnnaaattgcaacatctgggcaagctgtgatccaccagaaagaaacgaagtccccaacctggattaaagggaaagagaaatcacatggaatttaatccaatctcatctagaaaagcttcccatttaggtcacttgtacgtaactccaattccttctccaagagcccttccaggagaggcccaaggcgccccccacagagtggaatgagtggaacttgcgtcagtagcccttggcctgggcagtcctggcgtggtgcagaactctgagctgggcacagaaggcctccacctggttctcactctacagagcccactgcctgatgctgtccctcaggcaggagcctccttcaacacaacggcccctcccagaaggctctgtggtagtaactgctgtggccagcaagcactagacacattgaatgcctctgcaaaacaaaagaaaactctgttcttgggaatctgcctctggcacattccttcttaaaaactcccaagattgagacctgccacaatcgttttggccatggttttctccaaccaccagtgaaatatgggtttggttcattttagtttcagatagatggcttcaccaaagaactcttgaaagaatactgattagggaggggcagggaagtaggagcttatggtatattataaggctgggaaaaatctatgatgcaaaccctttccacatagtactagataaag

SEQ ID NO: 443565 - DNA, 930 bp, Homo Sapiens
  misc_feature (83)..(83): n is a, c, g, or t
  misc_feature (713)..(722): n is a, c, g, or t
gtatccccagtttaaaactgaatgtccccaaaagcgccagatctttaaagtcattcttgaaaaacaggacttccttctcattntaggtgaaatcagtaagaagctcttttgacatatcacttacacatttctctatgggtatgcatgaaatatccatctagattccatatgaattgagaatgactagcacatataaaattctagaaaccagtataccacattgtagaaggcactaaagcttcagcttgtgctcccatagcccatttgaaaagccagtttccttttttataagggcacctttgccacctacagctgacaagacacactgcaatattattcataataagcttggaaatgtcaagaaaatttaaaaagaaatgctcactttgtgggtagtcccaatgattctaaacactgaatactaattcatcattattagtattcaacacggttgctcttccttttgaaagagaacagtagcatgcattgtcagttttttaatccacttatttaagcaattttaatctgcaaaactattttaaagaaaaattgtcctaaacagtgagcaaaagaaaacacaatagtgagaatttaacacaatcacaagtcctgtgaagtaaatgttaaaacttcttacatactttgcacttacaagggtgtgtatatatttgcaccaatttcaagcacatcatcaaactgtatatattgaaatnnnnnnnnnngtaaaacaatacaaaattcagtaactagcattttttaaaagagcctccaatgcttatctccagtctttagggatagtacaaacttggatctttgatgttcaatttatttgcaatggttcttggcaaacactaacagaccacatgacaagtgtgtcagccaccatggaaatgcacagattttagaagattatgtatgggtaacatctgt

SEQ ID NO: 443566 - DNA, 1469 bp, Homo Sapiens
  misc_feature (1008)..(1016): n is a, c, g, or t
atgtatctttatgctctttcactgctcttctgtgcgttggagtttagcaattcagtgagactggggagtgtctcaagaatggaacctttgccttcaaggttgggtcatcaaaaatccctctaaaggatctaactgtaatgaactgtttttatttttgccattagtgcaagtatcaactggcagcctcaaacagctttagactatgtctcaggtctctcatagttatacttagaactgctctttcttgaagctaaaagaggtttttggagtaaagatctgcttcatgtctgctagcatggtatctgctgttcaacctagtatagagcatgtgaaatgcaactgtcctttaatggaattcagccaaactccaaaaatactgagttgcttctagttatctaaagtagtacagaatcactatcccgatgaagaagtggggtttttcagaagattgtaaactcatttccatggcacagatacaaatcatcgtcaggacttgttagccagtccatgtctcattgataggatgtagcctgccatctgcatagatggtttaacatggtgctgtttttgaaaacttgctgtggaaataaatttgacagaagagtagttatttgtaaagctgtcctagaaagaggttaattcttttggtatattgagtatttctcctccaatccttttaattaggtggttcagcttatcttgtattttctgagtcataactatactctagggccaagacctactataaaatctggggtcctaaccagagagttgtttagatcaatatgatatgctttggcaacatgatctaagaaggtattcattctttctgggtttgagaagagttgacgaaagtgtaagattatactctcatgctaaaataaggtataggctaagtgaaatactgtaaatgggttggttagaattaaagtttagaactctaaatcttatgcttatttttaaagtaaaaagttgcctcactgtcatgaaatcctgttactttcattnnnnnnnnntcctgtaaaatggtcaaattggataatgtaagagataatgatggctttgaggcatttcatactttaccagtttacatttggctagcagactggtaaggttcagggttctctccactaatggaaaattaaatgctaaacgtcctaagaattatgtcgtctccaaggctttgactcagatttgtactttgatgtatgaacacgtgaatatcaaacttgtctatacgaaaagactatctagacacaataagtctgtgtcgtgtatagtgatacatgttcctgtatacccaatgcctgtacctaatcttgtgctcggctctgaattatactatgtggttaccctacttgacgccatacagaactcaaccagaaacagccaaccctagagaacataaaccgtaccgcgacagggaaatcgccagcccatctctccccacctcgatccaggccggcaac

SEQ ID NO: 443567 - DNA, 504 bp, Homo Sapiens
  misc_feature (20)..(20): n is a, c, g, or t
  misc_feature (61)..(61): n is a, c, g, or t
  misc_feature (87)..(87): n is a, c, g, or t
  misc_feature (324)..(324): n is a, c, g, or t
gcctgaaatccccattaaanggacagttgccatttccacatgcctcctataactaggttgnaacagccagaatacccatgcctagcnagaacatgaaagcgagatcctttactcccaaaaacctcttttagccttccaagaaagagcagttcctaagtataactatgagagacctgagacatagtctaaagctgtttgaggctgcccagttgatacttgcactaatggcaaaaataaaaacagttcattacagttagatcctttagagggatttttgatgacccaaccttgaaggcaaaggttccattcttgagacactccccnagtctcacttgaattgctaaactcccaacgcacagaagagcagtgaaagagcataaagatacatcataatgaattatggaaaccatgcagagactcaaaacagtccatggtgggctaattgtaaagacattcctgtatttgtctgcctatttgccgtctgtacttactttgaatataacc

SEQ ID NO: 443568 - DNA, 1604 bp, Homo Sapiens
  misc_feature (1247)..(1247): n is a, c, g, or t
aacacatgcaaggggtgaaaaaggcggggcgcagttgccctttttagggggaaaggcgtcgctttccacataggccgaaacccatttttttcaagggcactcgtggcgggttaccgggaggggcatgtgcctcttggccgacgggaggattgttccccgcaaactggggggaaaggaaccaccggggataacggtgtttgggaatttagtttgtccatggtgcagtcctcaaagttatttttcttttagggggagccactccttcagtttcaactggcggagcaggcaagccaactgcttttggtttccatggaagctggattcctgtggctgcgtgtaggcattctcgttccaccaatcttttgttgtgttgtggtatccagtgatttcggtggaaaagtacaaggtattcttccatgatggatatgatatggtaataacaggctgggatctaatgggccccagggaactgagagactggaaggtacaccaggaaggccgcaatgtgttttatacaaattgtatgctgtcctagtaacttttccatcagaggccttataaatcaggagtgaagaatcttttgctgcatgagataacaagtaggaaccctcctgcaagctacttagtttctttagaatgtgttggaggatgttaaataaattggaaatcttgagtgctgaaagcttttcttttaattcttctgaggtaatttcttccagtagaaaaagttttgaagtaaatgcatcgatatgcccaacataaaatgagctgttggaatgcaataaactttcagtccataagcgacaaagttcactttcagtcagagcttcaactccataacaagcttgatactctacttttggtagtacataaactggaaattgtcttctgattttcttccgtttttttagaacgtggtcttgtctctatcctctggacactgcagcgtacgagtaccaccaggtcttgcaggctaaataccttataaccaaaatttccttcctgaggagttaggtattccgatgtatcttcaacatagtcctgaagttcatatggcaatcgtccttttggcttctgaaatgcagaaggccatccagatttcggccaactagaggagtctgaaggaccagacaattgctcagaaacagaaggctgtttagaattttctaaattcattaaggcaattctggtacttttctggaaattggctttaagagctcatcctgcatttttaaaatctctccaantggatcaaattttttatatactcgtttgataggtttttttaaaacacatgactcttcaggactacaagcagtattagtctggtttcctacagaagcctgtcctgaggaagaatttggactagctggtctggaacttaagttagaacccacaacagctgtctttccatcactattatttttacattctgtatcaatgattaaacactcctcatctgtatcactgctgcagagaactgtatcttcagtttttgctgcttctgatccaacagtcttttcctttgagttgtctaggttttctagaacattaggtctttcaccatcagcatgtaatataccagtaggccaacaggcagagga

SEQ ID NO: 443569 - DNA, 572 bp, Homo Sapiens
  misc_feature (407)..(460): n is a, c, g, or t
  misc_feature (473)..(473): n is a, c, g, or t
tttttgcagggagtgcaacatttatttcataacagaaccccttttccacagagcagctgacagggggctgcatgaaacatactttggaaattaaagtgaactctccacttgggcataatgttatgtgggcacatggattggcttaaaagggaaacaagaatacttcaacatttgatcaacagtaggcagttgctggacattttagaaaaaggagaaatccattttttgaccatggctaaacatggggaaacagcatcacattttcctgaaccaccctaatcccagcccctcaagatccaccaggtatgcaaccccaaaccccagtcacatacattaaatctacacttttatttttttgttgtaaaatgtgctttttcctcaatgaactttaatcagtccaggacctnnnnnnnnnnnnnnnnnnnnnnnnnnnnnnnnnnnnnnnnnnnnnnnnnnnnnncacccccaccctncaaccaggtgaaaaatccccggcgattagtctataacaaatattgacacgaggggggacaaaagcatgtttgaaatgtattagaatcaagaacctgtac

SEQ ID NO: 443570 - DNA, 731 bp, Homo Sapiens
  misc_feature (11)..(11): n is a, c, g, or t
ccatagtgatntaatttttgaagtagtttcagttgtttcgcagtcatattatccaaaatacacgtgatcatgctgaatccatcttaaaccagatgtggcaaaactactcaggttatttaggtcacactgtggtaaaacggcttcaattcgggatgtccccacttcgtccaagtgaggagaagggagcagggaaatagcacggaccagaacagacacctcagttggtatgaaactatttttcaaataactaagcagtaattctctaagtttcgcaaaaaactccttcctttggaaatgcagaaaagtcaattcttgagttatcttcaacaactctaatggtttatagccatccaaatgtttatgcagaactgaggtaactcttttaatcagacatgagtttctgctttccatatctcccattgctcccaacactgccagggcttgctcgccagttaggtcctctgacatcaataacatagttgatttaagttgtttcttttcttcaggtcctgccatgggtcccaatgctacaaacaattttacaaagctagcaggatgattacacagaggaatcatttcagttagcttctttttagccattataataaattcaaaactattaaattgtagaaatttgtatacactaagtattttactgatggaatcccaatcaaggtggtccacattacttaaaaatacgttattacatcttttgggcacacattatggag

SEQ ID NO: 443571 - DNA, 646 bp, Homo Sapiens
aagccaaggacacttggaaaccagtctaggtttctacacttggctaaaatatgaagagtgagttggggttaagactaatgaaataattcatctgaatttcttaaaaggggctcttgaaacataagggactcttgaattctgtattcaacataaaagcgttgaagagtaaagcaaaattggttgtgattatttaaaaatatttaacctgggcttattccagccagtggatgtaaaaataaaagggttggtttgttgggtctttttcaaaccatgtctctgtgaagagaacaattaagaacaaaacttgagttggatcagagttcatgtaagaatagcttatttctaatattttgaaatggataaaagcagtagttttatcttttcctctgagtggagattgtaaaggggccaatattaatttatctttaagaatgaatctataaacataaaagttccatcattgacccttttctctaatttctttttgacttatgaacagataactatactccatacaaaaatgaactctgaagacatagcatgatggcatatttaccaaaataccatgttgtagtcatatcaaacttagaataaacttctatctatcattaatatgattaattactaggtaatactattctgtgta

SEQ ID NO: 443572 - DNA, 866 bp, Homo Sapiens
  misc_feature (115)..(115): n is a, c, g, or t
  misc_feature (126)..(126): n is a, c, g, or t
atgttatccaagaagaacccttttcctggaaatctggtgccacccttgtgagatgcctgttaggtaaggggactccttggtagaatttccttacatttgtgtaaaaagttctggntcctgagtaantcccaaagaagatgctatgaggaggttcactgtgcctttggatttggatcccaatggggtcagaatatggtttcctcatttcagtagggctacctacaggatttgaagtagaaaaaccagggtccagtgaccttcacgggatcctagatgttcatgaatttcaatcatttgagattgtggggtgtggtccaatgctgctctcaaaaagatgttgcctttcttcagagagcattaataactaaaaaatcccctggtccaaatttattgtgtgtctctgaaggctttaactgaagaaatgaaatgcacactcatggaacaaactaggcctttgttgtgataaaacagctttagctatttggcttgaggactctgacttcactacaaagggctgtgctgaatctgggtagaacaagacaggagtggaggtaaaggccacatcatgatggctgaatgcctcctgggtcacagtggtccactggaatgggtgtcttcgtcagtagtaaggtggtaggaatcatctcgggcaaaaatccaggtaccaggtctgtaggctgatggaatagcacagggaaggtagtcagaaggtccaggtgaacactcagcaatcaggaggcacaggactagaaggggcagggacaaaacaggtaaaataacaaatgcatggaattacaaacacaggactctaagtgggtctgctgtcagcacatcggcagcctgatggctgttaattcttgatgagc

SEQ ID NO: 443573 - DNA, 1016 bp, Homo Sapiens
gggccagtggatggttttagttctttcagatgaactgccatttgtgtttcagctcacagttctttgctgggtaaaagaaatactttctgacagtcacctgagccttaaatgtaagtattacatgacatgcattctgtttcttccagagttctgtctgccacacgaaagagaatatttgcttacttgatagaactttggcattttcatcattcttttacttaaccaggcttatggcatgatctctggaacaaatttgtaggaaaaaaattactccaattgaatgactgatgtatgtaatcaacttcattgggctgcagtaaactagtggaaattagagagttgttttattggtgttttctactgtgagttaattaaaaattgtttttatttggggtcattatgtcacagtcttgagttaacaagatcttacgtgattggccttttctttgttttctcttaggagttgtgtctcgtgaatgacagtactaaagctattaacaactaagagtttgacagagaactataagcctgttgtatctcctaaaagttgtcaactccccacccttggactttaaatgaaaattttattcagtccagctattcttacagtcccctagggattttcatatatctatgtataggagataaaatttgctagttacgatttttaaaaactgggctagtgaaaggaaagtacctctgaaagaaaccattttagcaaattatggttatatgttttaatttaatctacagaatgttttatagtaaaattctagcaccactagaataatcacatagcatgtacaatatatttatgctggctgaaaagacagaatctgggaataataaaattgcaaccagtttggtaatgcaaacagcagaatagaatgaaatctcagtaatgaattaaagcaacaaaaagatattgattggcaaaaagcaagatataagagattcatttgcttaacatttctacataatatttatggtctgggcagtattggtctgggtcagta

SEQ ID NO: 443574 - DNA, 1438 bp, Homo Sapiens
  misc_feature (94)..(102): n is a, c, g, or t
  misc_feature (112)..(175): n is a, c, g, or t
  misc_feature (216)..(232): n is a, c, g, or t
  misc_feature (243)..(393): n is a, c, g, or t
aaaggcgcccgggggccccctggttgaaagcccaaaaaaccccccaaacaccccctcgggtttttttcaaaacccttgtggtcccccgggcggnnnnnnnnnggggagaaannnnnnnnnnnnnnnnnnnnnnnnnnnnnnnnnnnnnnnnnnnnnnnnnnnnnnnnnnnnnnnnggggcccccccccccaaaaaaaagttttaaaaaattttttnnnnnnnnnnnnnnnnncgcccaaaagnnnnnnnnnnnnnnnnnnnnnnnnnnnnnnnnnnnnnnnnnnnnnnnnnnnnnnnnnnnnnnnnnnnnnnnnnnnnnnnnnnnnnnnnnnnnnnnnnnnnnnnnnnnnnnnnnnnnnnnnnnnnnnnnnnnnnnnnnnnnnnnnnnnnnnnaaagtagtttaataaactccacaaaataatagcagatgcattgaaatatttacataattcgattttcaaatctctcattcaaataaaagggataaaaataaaatttctgcctttacggcagcagaacctctttcctgaaatggattggtaaaataagatacttcactggagaggaactaatttatgtttaagaggtattcatattcagctaagaaaatacaaccctttttcagctatatagattagggaatataaaatgatattttctacattttttgacctgtattcaaagttctaaattcaactttgacttgaagagagaaggtgattttggtacccatacagagtagatcatcacaattacaatggaaagataattaacgttttatatgctgtttatttgcttttgaaagtttgggtcagaaaggctgtgataataattctggcccaaacaggtatgcttatacctgacacaaatttcactaaaacctaacacttttggcttggagttcttgggatttcgactttctgagtcccttccatttccaaagcatgtttcattgagagcaggcaatgtttggggatcaggtgtatgattcaagactaattaagatgccaaagttttccaagctcacatgggaagaaggtgaaacacagacctgctgctgccactggcctcccagagacttgaaaagggaaacaactcagaaacctgtcactgtgacctaagaaaatatgcaaaaacccaaagcattacatatgcaagtgactcacactcttagatttcatatcaaattcactatttgatattctatcatcaactttcattttacttgatataaaagattcttattgagtccataaggaaatcagggatcgtcagaaaatgaaaaagtatggtcataattaatgaagcataaaccttcacagtttgaattttgtagaacttctctaagcacccacaatgaaaatgcaagttgagttttttttaattcaatcattctgtgaaaaatacctcagtaaatatcccggaaattccggaccg

SEQ ID NO: 443575 - DNA, 1398 bp, Homo Sapiens
  misc_feature (50)..(50): n is a, c, g, or t
  misc_feature (78)..(78): n is a, c, g, or t
  misc_feature (194)..(194): n is a, c, g, or t
  misc_feature (203)..(203): n is a, c, g, or t
  misc_feature (1359)..(1359): n is a, c, g, or t
gcaaagggctccaacggattccgggggaacactcaggggccccattttcntgtcaagcccccttgccaaagactctcntcgggtttcctatgtaactgtgctttgggcaataggacttgaacttgacttcatcattctctgctaagatggtcttcatctccaggcccggtcaaaagcacaggtcacatggaagnctgtgccgncagttcttcacagagcactgtataggccccaaacttctcattgcagaggctgcacactagcgcccaccgggctgctgggaatgtgtgacaccttggtgatgggctccatcttctctgggctgccaatgctcacctcagggatccccagagcaccagttaacgtggacccacttggttccgctaacgggtgggtttcatagctcccccctttttcggacacagcagacattttggctgaacccccagggcacatgtccggcacagccagctgccctctggtaccttgaggattccataacaggcctggtgcacacagatgttgcatttgtcacagaacaccatctcattgccgtcctcaccatcaggagactggcagacatcacagacaacatcttcatcatattcgatccccaggccttcctcagtctctatggcatgattcatattgtcgtagcatcgctgctcaaattcctctaggaccctctccatggtgtattcatctagttcaggcattcccatctccttaaattcttcattggtcagttccagccatgcagcatccatgtcattgaggtcatagcgacacacgctgtcagccagcgtccggatgtccacatagcccaactcgggaggctcagagcctgatgacacgatgtacttcttgggcctgatgaacatgagggatttctcttcagacacaaccctggccacaggctgagggatggtccccgggctcacaggcacctggacccctttctcccattcctgtctccagggatctgccaacacatagtactcatccggattcagctggtaggagtcatgcaacttcatggcagtgatcaggtctgtcctaaacacctctgaaggctttcgatcttcatgtctggagcaggagcttctcctatgctgggatcgggaattctgggaccaagtagttgacaggctgccattgtcgtcagaatcctcactgctgctgggaaggcgacctcgtttcatgatctccccgggaaacagcaggcagccggtgggaggggagagaggctgctatttaaacgcccgcggaagttgaggcacccccactggcgggtgccgtgcacctgcctcccgccgccgcctcgtgcggaattcgccacccaggcctcgctacttgtgnggtgtaaggggccgttggccgcgcgcaaaagaggagggc

SEQ ID NO: 443576 - DNA, 783 bp, Homo Sapiens
tgcaggacgagccgagaggctcagccatatttgatggttttgttgctttgctcgggagttctcgggagtaatttaatgccgaaggtcgctgcctagtggaaataatataatacgtcattaatatggcgccaaaagattgggttctcgatctgtagcgaggagggagggaggcagccgctgagcgcagcgttactatcccaccagtaacttgggcattgccggggcgggggccggaggaggaggagaggatgatttttggatcctgagaattgatctatgttggatcagctgcctgctgtttcccggggagatcatgaaacgaggtcgccttcccagcagcagtgaggattctgacgacaatggcagcctgtcaactacttggtcccagaattcccgatcccagcataggagaagctcctgctccagacatgaagatcgaaagccttcagaggtgtttaggacagacctgatcactgccatgaagttgcatgactcctaccagctgaatccggatgagtactatgtgttggcagatccctggagacaggaatgggagaaaggggtccaggtgcctgtgagcccggggaccatccctcagcctgtggccagggttgtgtctgaagagaaatccctcatgttcatcaggcccaagaagtacatcgtgtcatcaggctctgagcctcccgagttgggctatgtggacatccggacgctggctgacagcgtgtgtcgctatgacctcaatgacatggatgctgcatggctggaactgaccaatgaaga

SEQ ID NO: 443577 - DNA, 701 bp, Homo Sapiens
  misc_feature (534)..(534): n is a, c, g, or t
  misc_feature (587)..(587): n is a, c, g, or t
  misc_feature (611)..(611): n is a, c, g, or t
  misc_feature (613)..(613): n is a, c, g, or t
  misc_feature (619)..(619): n is a, c, g, or t
  misc_feature (631)..(631): n is a, c, g, or t
  misc_feature (635)..(635): n is a, c, g, or t
  misc_feature (640)..(640): n is a, c, g, or t
  misc_feature (646)..(647): n is a, c, g, or t
  misc_feature (660)..(660): n is a, c, g, or t
  misc_feature (679)..(679): n is a, c, g, or t
gagcctgttggcctactggtaaattttccccagttttctttggggaaactctttggtgctcttggtatgtaattgagtttgcagattcttagtctaacccagagttgatctttcttgattatagtggccccatctttcatatccctaggttgaggatctcaataagaacctttctgcattttcttagctacttatatgattacttgggttggctgttttgaaagttctttacactgagaaaatgtgagtatgtcctaaactatgaataattcaaaaatctgactaaaagatccagtaataccctactgtcctgaacatttcctttatattatatatgaaaactgttttctgaacagtgtaggaatggagaggtttgtgttttgttacaggcttattcatttacttttacctatgtagtacctccatttttatttcataagttgtcttggggaatgcttctctttgtcctactcccccaaccccacaaagatctagcagaagaggaaagtccagtcattggtactctggatgcanaaggccttccgcctcacagaagtctgacaatgcatggatgcctgaatgtgggnccacgaacttccaccttatgcagntnttaccnttcaggcagccntatntttgnccacanngcacgacagtgcnggactttcctggagcttancccccccttggaagggcccaat

SEQ ID NO: 443578 - DNA, 670 bp, Homo Sapiens
  misc_feature (518)..(518): n is a, c, g, or t
  misc_feature (526)..(526): n is a, c, g, or t
  misc_feature (559)..(559): n is a, c, g, or t
  misc_feature (572)..(572): n is a, c, g, or t
  misc_feature (575)..(575): n is a, c, g, or t
  misc_feature (582)..(582): n is a, c, g, or t
  misc_feature (590)..(591): n is a, c, g, or t
  misc_feature (602)..(603): n is a, c, g, or t
  misc_feature (627)..(627): n is a, c, g, or t
  misc_feature (633)..(633): n is a, c, g, or t
  misc_feature (636)..(636): n is a, c, g, or t
tgagtaaaagtgatcgtcatttgagagttatttggctgctttgggcttcaaggctggagaagcaggtaatggcacagtatctcactcactgttcttcctgccctggggttggcagcaccaccagaatgcccagaccactgagttggaattgtcttcccagatttccaactcaggtaaaagaacaaaagccaacaggaaccaatggctaaggaggagcaacatgtaaaacagtggtgtaaaagaagaaatgcaacgtaagagggcaggagagaagtcaagataatggagccgagtggtggccagaaatgtgagtagctctgtgctgactagcctcagtgtaaaacaaatttaaggaaagcagcattatgaggtctcaagataatgggagccacctgaaaacggagataaaagacttgtctaaagcttgagggctccacatgaagatatgagatggaaagactataattcaggcaggaacttctgcacgggccaccaaaagccaggacaatgcacttacnaacatggngcattttccagtgccagacacccttgcatgcanctttctggtcttntgnctggcanaaagctgnnctaaaggcagnnacccgttcacaagcccttttcctnaagatnttnctcaggttaagttatgggttcacattagggagtt

SEQ ID NO: 443579 - DNA, 1505 bp, Homo Sapiens
  misc_feature (282)..(325): n is a, c, g, or t
  misc_feature (1067)..(1099): n is a, c, g, or t
tttaaaattaaaattgcatttaatcactcttctttcttctaccaggctcaggaggccaggccatctctgcattttaagtatttcaccatttaaagtctaagcaccttggggggtgaggaaggagggcaatggaggagaacttttgaaatctttccacaaaaatcaaagaacaaaccaactagagggaaaaatagctgctatatttaaactacattatcccatcagggagctatggttttgagaaccattccacagtactttgtttggcactgctatatgggnnnnnnnnnnnnnnnnnnnnnnnnnnnnnnnnnnnnnnnnnnnncttcagagcagtaattgcaaaggaagcaaaggtcttcactaattaatttggtagatattcactgagcatctgctatgtgcctggcactacactggtcgctgggggcacaaaatagataaggaaggactcaaggtcctcattgcaaataattatcatgcatttattcaagaagttttgattgcatgccttctaagtgcatatgattctattacaggaaagggtcccaatccagaccccaaaagagtaatagaattcaggtcgagtccacagagtaaagtgaaagcaagtttattaggaaagtaaaggaataaaagaatggctactccatagacagagcagccccgagggctgctggttgcccatttttatggttatttcttgatgatatgctaaacaaggggtggattattcatgcctcccctttttagaccatatagggtaacttcctgacgttgccatggcatttgtaaactgtcatggcgctggtgggagtgtagcagtgaggacgaccagaggtcactctcatcgccatcttggttttggtgggttttggccagcttctttactgcaacctgttttatcagcaaggtctttatgacctgtatcttgtgccgacctcctatctcatcctgtgacttagaatgccttaaccttctgggaatgcagcccagtaggtctcagcctcattttacccagctcctattcaagatggagttgctctggttccaacgcctctggcatnnnnnnnnnnnnnnnnnnnnnnnnnnnnnnnnnagcattgcttttggaagtggagagtgtgcccatttttgttactcgtttatttgaataggatggctgttccggccaggaggtgctgggccacggctcctgggaggaccatgtgctgccctgctggatacctcagcaccactcgctcctgttggcagctgagctggcccaccttgaggtcctgtgcctgggttacagctggtggtgtgtgggtgcacagtgatggcaggcctctgagagctggggcgggccagtgtggcctgactctgcctgtaggaagctctagaacaggtcacgctgatctgcaatgaaaagttgcctctggagggggtgcagtggggacagatgagcacatatcttggaggtggtcaggttcttatcttggtggagtctgcctttgtcaaccgct

SEQ ID NO: 443580 - DNA, 674 bp, Homo Sapiens
  misc_feature (40)..(40): n is a, c, g, or t
atgcaagacacaccatggggtgccacaagttttcagagcntcaaagcggacagccatctgtctcagtggctcagagaacccgagacagagacgcaaaataccctccctgtgatcagacttagcaaatgctgggtggggagtaggttcccaggggagacactgttttaggtcctgcttgtcttagtaagccccactgtctagctggtaactgtgagtgtggcaggcctccagcaggcgggggtttctgcagtctccatggagacctgggggccagtaagacggagccaggccccagtctgtaggttagagccagggacagcgcaagggtccagccttcatcttgagtctccggtgggctcagcaggagtgtgtacgactccatcacaggcttttgacccccttccaaggtcatcacagtctccattgggaaatatggctgttagtggcagctcctcctcaggttcctggaagtcttcctgagctgagcttctgcaggcagcaacatcctggttcttcctccggctccagggaccccaggaaaagcaggctagcagtccggggaggcctggcctctcccaggctccttccactggttgcccggctccggcggcttgcagggccctgcaggcggccgcctggacgggccaggcaggaggccgggaggccggggcagt

SEQ ID NO: 443581 - DNA, 761 bp, Homo Sapiens; identical to SEQ ID NO: 147287

SEQ ID NO: 443582 - DNA, 742 bp, Homo Sapiens
gtcagtatgcctctgaaggagttaagacatgctggtctaggaccctcgtgaattgtgtcacaagagggtcgtgtatggtgtgaaagttagatcaggctgagcttggaccgataggggtgtgtggagtgtcgtctgactcttggggctcagtactctgtttccacctgccgtgaacggtttgcactgggattctgtcgcgtgtacccgcggagaaactgattgtattcgtgttgtgtacgttcaaggttgtcagagccgtttcctgagtaagatgaacgtgcgtgtaagtgcgtggccgcgagtcgtctgtttaatgttatgtttcttccgttcatagtcttctccaagtggtaaacttaatccataatcgattcctaaggaacccctggtctgttgactatttggtggtatgttttccttagccatagagatcagtatcttactgttttcagaaagcttcgctgacaactttcccgttcatttccatgtaaggtggatcactttccaactctgctttgtcttcggccaatctggctttttgctcttcaataaattcatccaaattatcagccattttgcagattctcgccactcacgctccccatccgcggctggctgactcttactcaggggagcgggctcgcgtccggggagacacacagtgctctagaggatcgtcgcggaccgaagaggttacagcggccacctggagcgggaacagcatgacagacctccggccggc

SEQ ID NO: 443583 - DNA, 1122 bp, Homo Sapiens
  misc_feature (467)..(500): n is a, c, g, or t
  misc_feature (569)..(579): n is a, c, g, or t
actcttcacttttctttttattattaaaaagtcaaaatgtttttaaatcatccatcctcaattttgatttaatgtaccgtcatttccccaagaaaagaaatttcagaatctctttggaatactaatttcatgtttctagatttaacaaaactgttgaagttttaaattccattctatttccctgaattctcaagacagttgctgatgtaaattttaatataaaatatttagtcacaaaatagtattgcttttgtatgcacataggttgtaaggattactttgcttttgtcaataaaaactataccatctttcataaaactctaaacaaattaagaactgtgatgtagaacaaaaattacacatggtaaaacaggtaccagcacaacgttaggttatattacatcaaaaaaagttttaatggtcccaaatatatatactcaacaactaagcatacactcaggggaggnnnnnnnnnnnnnnnnnnnnnnnnnnnnnnnnnnttatgacacaaatgaccacatctagaattccactcaatctttaatcaagtagggagaagtccccacttnnnnnnnnnnntatctgcagtttgaagggcaaagggaacagttaaaaaagaggaaaactttatactcgcccctcccccacagaggttttccaaacctgttgtagcttgactaaaatgttcagaatgtatgattttaaaggcaggtctctttatacaaagaaactgctggcattcttgactagtgaagaattatggcagaaaggcccattcttctgagtctcaaacatggtccaagaaagcatattctgattgtagcaactgaccagtcaatccagagttccacttacaaaacccctgccctgttggctttttgtttccatttccttccctgagaaaagggcaatgtgtggtccaagctggagagctcaaaggcttaagtctttcccctaaatatatgatatcccctcctcctgctccattgaattggcacttgatgagcagaagtcaagtgtaagaggctgatctgtgtcagtcattcacaagagaccactgggctttgttgtggattttgtatgggggaggggtggagaaccagtttttttcaacaggtactc

SEQ ID NO: 443584 - DNA, 1007 bp, Homo Sapiens
  misc_feature (87)..(87): n is a, c, g, or t
  misc_feature (515)..(515): n is a, c, g, or t
taattgaaaagttttattataaacaatataagcaaaaaattcaatgcagtgggggcagaagtgtgtggatgacctgccaaacaatangtattcaaagtgttgagtgagggaggtgaggttgcaactatctttctctagaaaagaagagaactgggtattcatcaaattggttaaattgaggttcgtcaaagagtttctacagatacagctgaatatactaaacattgctctattatctgttgaattgctgtatttcactttttcagcatttggggatcattatttaattgaatttgtagagatcgattttccagacaggtctctgttcttcaatgaacaaatgataagaaacaatttgactccttatatgacaatggaattaaataaattgacactcatctaggaataattctacaatcatctccatctctaagattacctactgcaaacaaagaattgatctttctttctcaaaaaccacatgggtaagatgatcattgggactctgaatgcangaataagtgagtggaagctacaaggggagattatctgccaacatagaaagaatctagaagaaaaagattttattacaggtaacatgacatagcttggagccatcttttttggtctcttgacatacattgttctctgcatgtctaaggaagaatacacaaggtagcaagcaccaatactttctgcttcggagtttcacaaattgaaaatttgtccctctcttgttaagtcaatcaaacatctaccaatggccaatggtggtccttagttacgagtgcctgagagacagaaactagagcactcgactatgctaaataagtaagtatggggcaaggtggccagagaatatgcagaaaatacaaacagattttcattaagtttaatcttccgcgaacagacgtaacaaaataaaggaagcaatctgtaacgctgtcatgattacttcaagtatcccatccttactctccacttccgttcttgccctttgctgcctt

SEQ ID NO: 443585 - DNA, 644 bp, Homo Sapiens
  misc_feature (272)..(280): n is a, c, g, or t
  misc_feature (614)..(614): n is a, c, g, or t
gtaactctgcttttaaggaaaaagggggaaagcgaaattctgcagagtcaggaaacaggtttccttgctagagatagagacagtgagataaaggcatggggcttcccccacaccctgcagctcaaaagtgtgggacaggagtctaagacttcctgttgttggctggtatttacagctttttagatgatatgtccattttccccaggcactttggggccaaaactcagtatgctgagactcagaaattgctctcagtagcttcatattttgannnnnnnnngcaccattcttatctatctattgctcatctgacatctttatatgttatttaaacagtacttatctggagaaatataacagaggtcaagaaagtacatacatacagatacctaaaactcaaaagtccatctcttgttctcccccaatcactaaaactgccccaagcctaaaattaatctgatggttaacattgctaaattaatattagccaataaagttattcaagtctttgaaacttacaattttgcatcatttatttttgtcacacacacaaaggcaggtattaggttactgagttgggtttctcaccaaatagcaaagccagggaagcccanaggtgtttaataaaccttgttgactgattg

SEQ ID NO: 443586 - DNA, 641 bp, Homo Sapiens
  misc_feature (53)..(53): n is a, c, g, or t
gcttgcatttgctcaggataaagttcgagccttgcccccaccacacccagctntgtgggcattcattctctctctctggttacttctgtcctggctttagtccttgctcctctgctataactccttaaaggcagggccgatttcactggcacgttcatctgacgtgtgtgcgtgggtcctgcaggtatgtgacagggcacatctgggcctgtcctccaagtgaaggagatgattacatcttccattgccacccacctgatcaaaaaatacccaagccaaaacgactgcaggagtggtccaaaaagatgctggacaaggcgtttgcagagcggatcatccatgactacaaggatattttcaaacaagcaactgaagacaggctcaccagtgccaaggaactgccctattttgaaggtgatttctggcccaatgtgttagaagagagcattaaggaactagaacaagaagaagaggagaggaaaaaggaagagagcactgcagtccagtgaaaccacgtgagggcagtcagggcgacagcaagaaatgccaagaagaagcacttacaagaaaaccaacaagaacaaaagcagcatcatcgcgcctacaagaagaagcccagcatgccctagtgtcctgacaag

SEQ ID NO: 443587 - DNA, 1589 bp, Homo Sapiens
atctaaggtttcccctaaaatgcttcttcttttctaaccaacattggggcccagaaaatccacctttccaaaatagggggcagttccttgggcaccgggtgagccttgtcttccagttgcttgttggaaaatatcttggtagtcagggatgatccgctctgcaaacgccttgtccagcatctttttgtaccactcctgcagtcgttttggcttgggtattttttgatcaggtgggtggcaatggaagatgtaatcatctccttcacttggaggacaggcccagatgtgccctgtcacataccctaatttcttcacatactctaaatatccaataaggatctcatggtaaacggctgtgcggaggcaacgtggccggaagaaatgaatactatccagataagaaatgtacacacgcctcgtgtttggaggggggcaatcagagccgtattcttggacgtgcattccaaaaaagcagacatccacgccgtcaatttcctcaaaagcaaacagagctttggttcgatatgggaaagattcagacatttccccagaatccacaaaccgtgacttcatcccgggcttgacctccaccgtcttgtctgagctggccaccactcggacaaaaacctccccggcttcagggtgattctggcgccgcaaaaatttgttcactcggtcttccaagtggtttcccagtcttgtggtctgcagcctcttagcactgaatttgttttcttttcgaggtctgccagttttcttcaagcagttgtcgcacacaaaacctgaaggccaaatgatgtcatagtgcagaacgcaaatctgatgcatcttccggccacactccttgcaatcaacgaaaggttcggggtctaaggtttcatttttcttcttttcaaactgatcctttgaaattgtcgtctggggctgtgaagggtcgtcacccagggtcacattctcgccctggatctctgtgaaacacttctcacagaaatgatacctattctgatagctgtagtaggcagcatcgcgaggaatggtacacagctgcttcccatagcagcacaaagtctgtggggaaaactcatacttgcgtccacagcaatatccaagggactgcatgacagggtcaatttcctgctcaaagacctctgcaagcttactgcaaaacttatagactcgggatgtcttgcgattatagagccaggcattgttgaacatgagccagacgtcgtccacgtactgccagggctcttggtattgccctgtgtccagcttccgcttgatggtggagaggtccatgggattctttacgatgtcaaaatagtctggaattccgaggagctggggatctacaggctgccggaaaggtaatgactctgggtcctgtcgatacagtgcttctagggttggcatgagggcctggcgtaactcctctggtttaaagatttttttgcgcggctgcgaaggagatgttgactgagaggctgtgccgttactgctactctcttcttcctctttaacttctactttcacttcaggtttcttttcatccacttccatgggttctgatttctgctctgctatgtctg

SEQ ID NO: 443588 - DNA, 467 bp, Homo Sapiens
  misc_feature (16)..(16): n is a, c, g, or t
  misc_feature (62)..(62): n is a, c, g, or t
  misc_feature (457)..(457): n is a, c, g, or t
aaggttttccatgccnacgttcaggctcgtcccccaaaaaagcacctggaataagcttcttnacaaagccgttccgcaacgtcgggctccggctccccagctgtgcaagctctcgaaaggatcaggtaggctccctggtccccgcacctgctgccgacctggtgctgtggctgtcagcagcatgatggcttcaacaagcatcttgcggatgtctgcatcaggttctcgctgcttgtctggtggcaggtactgcaagtcgacaggcagccctaggggtgagtgtgtgggagccactgtgtccctgggctgggcagctgagccaggctctgcctgtgtaagtcccacctgtgctcagcaactcactgctgcaaagtttcaggagcctgtggcctggacacctctctctccctccactggcctccctcctctccggccaactctgaggctccacactagncactcacgtt

SEQ ID NO: 443589 - DNA, 2298 bp, Homo Sapiens
  misc_feature (17)..(17): n is a, c, g, or t
  misc_feature (22)..(22): n is a, c, g, or t
  misc_feature (39)..(39): n is a, c, g, or t
  misc_feature (44)..(44): n is a, c, g, or t
  misc_feature (52)..(52): n is a, c, g, or t
  misc_feature (66)..(66): n is a, c, g, or t
  misc_feature (75)..(75): n is a, c, g, or t
  misc_feature (101)..(101): n is a, c, g, or t
  misc_feature (110)..(110): n is a, c, g, or t
  misc_feature (134)..(134): n is a, c, g, or t
  misc_feature (151)..(151): n is a, c, g, or t
  misc_feature (169)..(169): n is a, c, g, or t
  misc_feature (881)..(890): n is a, c, g, or t
cggtaacccccgagagncgcangcccagaaccaattccngtacngaacccanaaattaggcagggncattaaggngggcccattaggccccatgccctagnctgtgccgngccgcctgccatgcctattactgnaatttacctttaccggngcccccagtggagtaagnaaaaaaaggtttaagtggaaaaatgttaaaaatcaagatgagcctaatcacataaaagaaatttcaggaatagataagtgcccaacgccatggaatggttaagtggcaacagtcttcttcaattgtttttattacagtaagaggaattttactcttaatgcatagaagctgaagaaaaaaatttatataagcttttaaaagaggcattttaaacaattattaatacaaatgtgaaacaagacccttcaaacaaataccaatttcagtaacagtttacatacagcaataatttattctgaaatgttcatttagtttctgttgagacacaattcatgtctcattaataaaagagcagccatctcacctcaaataccagaatatacaacaaattacagcatagcaaaaattctacctactttcagataaaatctagttcaggtaaaatagtttcattcaatgttttacagttacacagatttttgttttgtttggagcacaaaatagtgtaaattattacactgtagctatctctatgcacatcatgtgaccacataactgttaatcattacttctgaaattgaaccatcagtttcattcatgcagtaaagcaaagcaggctgggtaaacttgttcatcgggaaccatattactgtgaatttcacagccacatgattaattatgatgttagatggactcacaaggacaaaaacannnnnnnnnnggcataaataccaatttttccctgatgtaagtttagtcagtttataatctagaaatgattgataacagcaatatatcatatttcctatctgtagtgttcattattttaagacaagcaataattaaaggaagttgggatgggatgctactttaaatacatgtaaaacatactgtacaaacatacttggctttactatttttttcctaaccatcaagagtgcctcccaaaataagaccagtgaagacaaagtatactatcaaatatggcttccagaacaaaaaccctctaacaagaatcaaacctatttacaaaatttttcagtcttttaaagtttcatttgaaacaaaatgtctatatagcagttgtaattaacatagaattttcttagtttcattcttcctctcttttaaacagatgtcacaaggtaagacccagaatggcgcttaggactttgggttccactggattctgtgctgtcagttttggaatctcgcttctttgtgttgttattcactggagttgggatctgagatggccgagctgaagtgctatctgcgctgcttttcctagggcttgggttgtaattaaaaggagtcactctggcagcaacagtcccactaggtgaactgtgtttgcttgagctgctagaactgaatggggtacgttccactatagaactttcattagtctctgatacagggacaggattattttgtcctggttttatctcagttcctttttggtcaggggcatccacctgaataaaggagttcaggcgattttccaaacccacggtacgcatgggaacactgccattacccacattttgttttgcctgattatcttttgaatctttaatgtttggatttgccttttctgaaacactgtcaatcaccgggggagtattacctgtgggagatcttccagatctaggattgttaatgggacagtcctcaattctcacccaaacatcctctgttttagaaacagcaggtgccatttgataaattagagtctttgattcagcaccatttgtagcacctgaggaaacggtctgagaagtactatttgtgggagaaaattcattttcttttatttttctccatgttccttttgcggatacttggttttctttactttgtttggttcctgaaatagagttcacatgtttttcatcctcactttttgctttttcactggattctgatgaagcagaaagaattgaagatgaacttccagttcttctccaagtgcttactcgaggaagggatgatgaatgtttgctgtgctcacgtttccaggttcctgacctattgattggaagtctagaaggactttcagaatgagaccgtgcaatatcatggcgctttgctggtcttccatcattatactctatagtgggactgag

SEQ ID NO: 443590 - DNA, 445 bp, Homo Sapiens
acatacagcaataatttattctgaaatgttcatttagtttctgttgagacacaattcatgtctcattaataaaagagcagccatctcacctcaaataccagaatatacaacaaattacagcatagcaaaaattctacctactttcagataaaatctagttcaggtaaaatagtttcattcaatgttttacagttacacagatttttgttttgtttggagcacaaaatagtgtaaattattacactgtagctatctctatgcacatcatgtgaccacataactgttaatcattacttctgaaattgaaccatcagtttcattcatggcaggtaaagcaaagcagggctggggtaaacttgttccatcgggggacccatatttactgtggaattttcacagccacatggattaatttatggtgttaggtggggctcacagggggcaa

SEQ ID NO: 443591 - DNA, 807 bp, Homo Sapiens
agggcaatgggtggactcttccccaagccgaggggtgccgcaggctgccttgttcgagagccgcccgcgggagctgaagaatccgtgggcccctctcccaggcaagccattgaaaaagctggagacattgtagcctagagcattgggtggctggggggctcgagggaggtcaagctcagcggggtggctattgcgggtgatgatgacaggctcttccatcacattgatgctgttgcactgcatcagatcctgaaggaggttgaagatttcctcagcccgggaacacttaaatgcaaatattccctggcctgtctgacatcggcggccactctcaaaggagaagaggttggagtcgtagccatagcgccgcaagcagagataaggccagcggacggcctcacgccgatgcaggtgcagcaccagctcactctgcgtcagctccatcaccccagagcccagctccaccccctcatcatccacatttgtcaccttgaacttggtggggtggttgtctggaacgctgtctctgttcaggcagctgcagcagctccccatggtgtcagagcagccagcctgccctcacccaggccatcggggagctgaccgtgggaggggcatggggaagggttcccactttattccccccgtccttggtgggctgtcatggcaaacagtctgcagagaagtcacccggatccctctgggatacacctggggctcacatcgccccgcggcaccgggcggcgccgggccccgctcccgggtcccgctgcagcagccgccgcccgcccaggagctaagcctccc

SEQ ID NO: 443592 - DNA, 425 bp, Homo Sapiens
  misc_feature (20)..(20): n is a, c, g, or t
  misc_feature (187)..(187): n is a, c, g, or t
ggtctgaggacaagcatcantcccaccaagagcctccttaccttgctctgtcctctctccagcgttcccagccatcggccctcttccatgctaaagaacttgggcatacaacatcccctcttagttaaatataattttctttttctgtgaatttttttctgaataacaaaatatttaggaaggaagnaaaaagatatatcctggttttaaaggataacctagccactccggactaaggttatcagttccatacatctcttctgattttctaaaatggcatatctgttacagaatataaacatagatatataactccattttaaagaaagtagggatcattcctttaaatcagcctataagtattttagcttaaatatcaaacatgtattttaattttggggggtttgcttgactttacttttatt

SEQ ID NO: 443593 - DNA, 608 bp, Homo Sapiens
  misc_feature (79)..(79): n is a, c, g, or t
  misc_feature (96)..(96): n is a, c, g, or t
  misc_feature (149)..(149): n is a, c, g, or t
  misc_feature (164)..(164): n is a, c, g, or t
  misc_feature (440)..(556): n is a, c, g, or t
ttattttaaccaggaataccccaaaaacctgcctacattttcagcctatataataaatccatacaataaacctcacacntcccctatcaatggttnggtatgtaccaaaaaaccttggaaattcctaaaatttccatgacccataaaantaatggtcatacacnttgtaaacaagataaattaaagagttttgaaagagctaatactaaagaaaattgtcaccatgcaggcaggtgtaaagcctgcaaaggtaccattaagttttttcccaatagctacgacatactgaaacttggtatgatctcagtacaaataaagaacataaaactatttatattcatcagattaattatgtgagcaactaagtacaatgaaacaaactgaaagaaatgcttggtgtatactaaaagctataataccagcggggtgagagtgctcannnnnnnnnnnnnnnnnnnnnnnnnnnnnnnnnnnnnnnnnnnnnnnnnnnnnnnnnnnnnnnnnnnnnnnnnnnnnnnnnnnnnnnnnnnnnnnnnnnnnnnnnnnnnnnnnnnnnttagcccagcatagtggtgcatgcctgtaatctcagctacttgcgaggccct

SEQ ID NO: 443594 - DNA, 369 bp, Homo Sapiens
  misc_feature (320)..(320): n is a, c, g, or t
  misc_feature (347)..(347): n is a, c, g, or t
  misc_feature (355)..(355): n is a, c, g, or t
ttatgtggaataccacacgccctggtacatggctgaactcttccccttcatcctgcttggggtcttcgggggcttgtggggaaccctcttcatccgctgcaacatcgcctggtgcaggaggcgcaagaccaccaggctggggaagtacccggtgctggaggtcattgtggtgactgccatcactgccatcattgcctaccccaatccctacacacgccagagcaccagcgagctcatttctgagctgttcaatgactgtggagcccttgagtcttcccagctctgtgactacatcaatgaccccaacatgactcggcctntggatgacattccagaccggccggctngtgtcggngtttacacggccat

SEQ ID NO: 443595 - DNA, 579 bp, Homo Sapiens
aaactctttttcagaattgaccaaaagtagcggccagttaaaagtggaggagaagcacaggtctctaagtcatcttctctggacagacgcctcaaccacaacaattcacaattgcaatgcaaggggtttccaccaaaacttaatgcaaaagtagatgggcttatgattcctgaggttgctagtacctgagctcgctgaaagagagggtcaggtggtagcttctgcaatttatttgatgtcacatctaaccgagtcatcttgtgcaaatgggagaaggtccccttaggaatgttatcaatcatattgtgatccaaactaagggtatgcaagctaaccatcttctcaacagcatcccaaggaatggtttctagattattataggacagatccagctcctcaagggcgaagacatcatcaaacgctgtagaggaaattaaagtcagctgattgttgttcagtatcaaatgatgaagattggaaagaccactgaacatatcatttgtaattttagtcaatctgttgctattcaaatgcaaagccctcaaatttcgtaggtcagcgaaagcatgaggtgtaata

SEQ ID NO: 443596 - DNA, 355 bp, Homo Sapiens
  misc_feature (28)..(28): n is a, c, g, or t
ccagtagttctttgcgaactgtcttgtnccagagtccatagatcagggggtggcagacagcgctggcaaaggacagccatgtggcccaagtctccaggctcggggagacggagcttttcccccagagggccttagaggcgattacaaccatgtaggggccccaggtgaccatgaaggcaccgaggaccaccaggatggtgatgagggctttgcactggttggccgagtagaccacacccttaaaggcattcctcctgctgcctgaagaggaggtggaggtgctggagttcttcctcccggtcctctgagcatcctcctccacgatgacgactgtgccacagtgcaccttgcgtgc

SEQ ID NO: 443597 - DNA, 1428 bp, Homo Sapiens
  misc_feature (1140)..(1140): n is a, c, g, or t
  misc_feature (1280)..(1280): n is a, c, g, or t
  misc_feature (1331)..(1353): n is a, c, g, or t
  misc_feature (1392)..(1392): n is a, c, g, or t
gctgctgcgccgcgctcccggcgcactcggagcccggcggggaccgggaggcagagacggggcggccgtggctccgagggcgggagctgagccgggccccgggaccgaagtttggcggcggctccgggaggcagagcgggctccccgggcgacttccaggcccctctcgcgtcctcgccccggacccgtgggcagccgggggggacggaagccgcggccgggccaactccgaggcggggacgccgcgacgggaacttgaggcccgagagggatgtgaaggcccaaaatgaccctcttaccgggagacaattctgactacgactacagcgcgctgagctgcacctcggacgcctccttccacccggccttcctcccgcagcgccaggccatcaagggcgcgttctaccgccggggcgcagcggctgcgggccgcaggatgagccccgccagggctgtcagccccgaggaccgccgccgtcggatcatcatcaacgtaggcggcatcaagtactcgctgccctggaccacgctggacgagttcccgctgacgcgcctgggccagctcaaggcctgcaccaacttcgacgacatcctcaacgtgtgcgatgactacgacgtcacctgcaacgagttcttcttcgaccgcaacccgggggccttcggcactatcctgaccttcctgcgcgcgggcaagctgcggctgctgcgcgagatgtgcgcgctgtccttccaggaggagctgctgtactggggcatcgcggaggaccacctggacggctgctgcaagcgccgctacctgcagaagattgaggagttcgcggagatggtggagcgggaggaagaggacgacgcgctggacagcgaggggccgcgacagcgagggccccggccgagggcgagggccgcctggggcgctgcatgccggcgactgcgcgacatggtgggagaggccgcacctcggggctgcctggcaaggtgttcgcctgcctgtcggtgctcttcgtgaccgtcaccgccgtcaacctctccgtcagcaccttgcccagcctgagggaggaggaggagcagggccactgttcccagatgtgccacaacgtcttcatcgtggagtcggtgtgcgtgggctggttctccctggangtcctcctgcggctcattcaggcgcccagcaagttcgccttcctgcgggagcccgctgacgctgatcgacctggttgggcatccttgccctactacatccacgctgcttggtgggacggggcccccccgccggggcccgntcccaaagcccccggggggcggggcaaaaaaagcttaccctgggaaacaannnnnnnnnnnnnnnnnnnnnnnccttggcccccgtgggcctgcccggggggcccccttggngcccaattccccgtgggtaaacgcggggaaatagga

SEQ ID NO: 443598 - DNA, 1266 bp, Homo Sapiens
  misc_feature (97)..(97): n is a, c, g, or t
  misc_feature (114)..(114): n is a, c, g, or t
  misc_feature (132)..(132): n is a, c, g, or t
  misc_feature (1177)..(1213): n is a, c, g, or t
ctccaggcagacccataaagcaagtttttgctgggcatgttatttgcatggtgaaaagaacaaggcatctccttattgaggggaaacacacataggnggctggggtgggcgggngctgggctgatgacccangcttcctttcacggctgcaggcggaaggggcagggcccctctgctgatgttctagtgttcttcccggggttgtgggagtgagggtgtcctttccccgggtgcgtgggagtcggtgctgcgccaggactgcactcggaagcggcctgtccctctccaggcgtctgcagtggatggcaatggcttcgggccacagatggcaggcagggcaggcgtgtcctccgcgctcagttattgtctctggtgtccgaggaggcacttccgaacaagatgtcactgttcttggacacgctcagctgcgacttggttttgatgaggaactgcgccctccggaacatcaccctctcttgctcctgcttgagctccaggtaggagcgggagaaggtgtggaagatggaggtgacttggaaggccatgagcaggatgccgctcagtatgctgctcagggccactacctggcccggggtgctcctggggaccatgtcgccatagcccaccgtcgtcatggtgatgacagcccaccagtagcaggcagggatgctggtgaactcgtggctgtcggccatctcgttctcgatgacgtagagcaggggcgcgaagagggcgatggccacgcagaggaagagcagcaggagcccgaactcgcgggtgcagcggcgggccgtgagccccagcgtctgcagccccagggagtggcgcgccaggcgcatcacgtacaggatgcgcagcgcccgcagcacgcgcagcaccagccccaccttgtccaggtagctgttgcccgcgccgggcttgcgacggcccgcggcggcgccgtccaccagcagcgtgatgtagtagggcaggatggccaccaggtcgatcagcgtcagcgggctccgcaggaaggcgaacttgctgggcgcctgaatgagccgccaaacttcggtcccggggcccggctcagctcccgccctcggagccacggccgccccgtctctgcctcccggtccccgccgggctccgagtgcccgctctcgacgaattcgagctcggccgatttggcctgatnnnnnnnnnnnnnnnnnnnnnnnnnnnnnnnnnnnnncgccgccaccgcggataaaagcgtcgcgggagggttcgccccattatcggtag

SEQ ID NO: 443599 - DNA, 822 bp, Homo Sapiens
ctatctttttggccttgaacaatattttatttattcatgggtagaccataaggtttgataatacagttcttcctctgttagagatgaaggagtcaaggcatgatcagctgcaatgtcagcaacaaaaccaggaggagatagggctctctcctccttcaggacacggcacagcacagcacggcagtgttaagggtgtgtctccctttggggtttccaagttgctctgtatcttctcgtgctggggctgaatgttcttcagctgtacctccactaggagaacatcagctgtgaagacagagcctcaacagtgtgaccacaggacagatctttgttctctttgtcctcaggagatgaattttcttaagctctcatggagctctttggggactcccttttgttaggctgccttcaagcaaatgagagaatgtgggaaagcaagcaacctgcacaccataaagcaccacaagcaagaggactcacccttcctgtggctcagcccacacacatttcaggtggctcattcatccagatgttgctcttgaccttatgaattatgacagcacttcctaagactcctccgcacaagttgcaatggcacctgccacgtcagaactgacagaactgcctgctctaagcatccctcccctcctcagagggctatggggatgactgctgtcctgctctgcaaatgggcccatcccaccctcattttcggaaacactggtagctggcaggtcactttctctggccatttttctcacccagttctctgctactaaatcaggccctgctttctctaacacacacctctgctacagcagc

SEQ ID NO: 443600 - DNA, 1009 bp, Homo Sapiens
  misc_feature (423)..(423): n is a, c, g, or t
gcgccttggctcagtttcaagttcccaccttccacggggtaagtgttcactgatgttgagggcctcttcctcggtgagctgaaagctcgtggggaagtcaaaggcagccgcagtgtgcagcagactccggcagcgctccccgtgccagcacgacgcggtcataggtgcagtgggttctggcccggcatctgatggtgtcctcccccatcggccatcacccagtggaagcctggctcaagtccgcagctccagcttgtccaggcgctttttggtcagtgaagcgcagtcagcattgaaagtccccaagcaggatcacgtccttgctctgccagtgctgggagacctccagaaacacatcgtagagggcgttcagctccttctctacggccttaggagtggtgtgcagcgggaccaacaccaggnctgggaaggacattgctgggcaaagagaactgggccacaaatggctcccgggcaaagacgtcatcctcatcgttgtacacgtaggaactcaggacctgtgttttgtgtgaccgatagaagtacacatacgtctccatgtaggtgctgcgccccagctgggggctgctcagggtgctgtagggcccagagccatcaaatcgattgagttctcgaagcaggagcgggatggcgctgccggaagagtccaccacctcctgcagcaccatgatgtcacagcgagccagtatccgaactaaggtgtccatcacctgctccctggccaccttggccagtgtcagccgctgggcattgaaggcgcagatgcgaaaggcctgggccccattggccaggatgaggaagaggagtgcagttgggtagtgcatggctgtgtgtggctgccggggacaccccaggaatccaggctgccccagggtgcgctctcactgggctcagttctggctctggaagcgctgctcagaccagcttgtcaccaagtctgcctcatccttaagtggatcgcgataccccagaagagcagctcctgcct

SEQ ID NO: 443601 - DNA, 555 bp, Homo Sapiens
ggtttttgttggggtgagctgcgtggtcccttctttatcactcctccatcacccccttccagtagaggagtccttgacttgccagatatttggttttgtagtatcagttctgaagagcgtctccatggcttctctggcctgtatcagcattgatagatacattgccattactaaacctttaacctataatactctggttacaccctggagactacgcctgtgtattttcctgatttggctatactcgaccctggtcttcctgccttcctttttccactggggcaaacctggatatcatggagatgtgtttcagtggtgtgcggagtcctggcacaccgacttctacttcaccctgttcatcgtgatgatgttatatgccccagcagcccttattgtctgcttcacctatttcaacatcttccgcatctgccaacagcacacaaagggatatcagcgaaaggcaagcccgcttcagcagccagagtggggagactggggaagtgcaggcctgtcctgataagcgctatgccatggtcctgtttcgaatcactagtg

SEQ ID NO: 443602 - DNA, 524 bp, Homo Sapiens
  misc_feature (73)..(73): n is a, c, g, or t
  misc_feature (77)..(77): n is a, c, g, or t
  misc_feature (94)..(94): n is a, c, g, or t
  misc_feature (297)..(297): n is a, c, g, or t
  misc_feature (320)..(320): n is a, c, g, or t
  misc_feature (345)..(345): n is a, c, g, or t
  misc_feature (366)..(366): n is a, c, g, or t
  misc_feature (389)..(389): n is a, c, g, or t
  misc_feature (427)..(427): n is a, c, g, or t
  misc_feature (447)..(447): n is a, c, g, or t
  misc_feature (462)..(462): n is a, c, g, or t
ggcctgcagcttcttggccttgctctgccggtagtactccatgatcatcatggctgcgtagatcttcccccanggtnaggtccgtggacttgtnaggtgtgaccagcaggtctagcgtcttctgggacagattgggccaaatcgccatcatctccttccgcagctcagcgtccatctgctgtttgtcggctcctccccttgggcaatcttgatgtccagggctgtgcggatcagagccatgagggtggaattgaagtggacggtgttgtcatctgcgacgggcaggtccatccgcanaagccgcttgtaagccactctgnccggacacttcttccccagacccangggcggagacatgtgtctcancatctgatacatgtccaggtaangcatgcggccccaagctgcggggtcatactcggcccanacacgcacgtactcatccangtggtgggggcccangatggaggagtctcgggtgaggtactcaaagttgtccatgatgacggcgacaaagagattca

SEQ ID NO: 443603 - DNA, 1043 bp, Homo Sapiens
ggagggtgcacagagcaggaggctttattgagggagatacagaagcgggcgtgggctctcgtgccagccaggccgcggcctccactcgtcccacacggccctgcggctcctgcacacccctccctcccgggctcctggacagcaggcaacatagaggagtcttacccagccttggcagaggtgccgggagggccttcagagtctgtccaggggagggttggggggacacaggacagcccttctgtgctgtcgatgacatgcctgccacatctacccatctgtccaccgcctggtccatctctgcctgaggggccctcctgtcacttgcaactctggagccgggtcctgtggtgcttctcctcggtcaggagggggatgaaggtgtcgctgtgggagagcttcagccggctgctgcagctcggcgcctccttccccgcaggctctggagggaggttgtccaggtcactgcgggagcccccggtcttgccctcgcccccgctgctggagttgagttccatcagctccagctcgtgcttggccgcggtctccaggacgcgctgcttgttgtagtacctgacaaagttgttgatgatggggtggatgggcagggcgatggcgatgacaccacacaagaagctgatggccgcgttgagcttgcccagcgtggtcttggggtagatgtcgccgtagccgacggtggtcatggtgatgatggcccaccagaaggactgggggatgctcttaaacagggtctctggatggctctgctccatggtgtagcccagggcagagaagacgaagatacccactgccaggtacatgagcagcagccccagttccttgaagctgcgcttgagggcataggtgagggtctgcaggcccgaggagtggcgggccagcttgaagatgcgcgcgatgccatagatccgcagcgcctgcacggcctgctgcacgttggtcagctccatcatgcgggcacccaggtgcgtgagcgtgaggctcacgtagaaggggaggatggccagcacgtccacaatgttcat

SEQ ID NO: 443604 - DNA, 556 bp, Homo Sapiens
  misc_feature (390)..(390): n is a, c, g, or t
  misc_feature (511)..(511): n is a, c, g, or t
  misc_feature (514)..(514): n is a, c, g, or t
gcacaaagcaggaggctttattgagggaaatacaaaagcgggcgtgggctctcgtgccagccaggccgcggcctccactcgtcccacacggccctgcggctcctgcacacccctccctcccgggctcctggacagcaggcaacataaaggagtcttacccagccttggcagaggtgccgggagggccttcaaagtctgtccaggggagggttggggggacacaggacagcccttctgtgctgtcgatgacatgcctgccacatctacccatctgtccaccgcctggtccatctctgcctgaggggccctcctgtcacttgcaactctggagccgggtcctgtggtgcgttgagcttgcccagcgtggtcttggggtagatgtcgccgtanccgacggtggtcatggtgatgatggcccaccaaaaggactgggggatgctcttaaacagggtctctggatggctctgctccatggtgtagcccaggcagagaagacgaagatacccactgncangtacatgagcagcagccccagtttctttgagctgcgcttgag

SEQ ID NO: 443605 - DNA, 894 bp, Homo Sapiens
  misc_feature (466)..(504): n is a, c, g, or t
ctcaagatcgcccctttctttgattttttcttccaccgtcgcgaaaggggcccgccgcccgcaacaaagagggaggtcacaggaacgccaaaaccaggtggtaccggtccggaattctcgggatgtcggcagtgtgaggagctgctatggtgctgagtttcctggtagagccggccgagctgaggcggtcgcggccgtgaaggtgaggggccggtggagccggacagaccctcctcgccaatcctatcctgccagggcacctgaagcgcctcctttctttccgccttagcggttacctagtcgtcatctcggagagctgcgctgaggggggtcgcttgcccggcttcaggtgccccaaccgagccagggcaggctgccggaccctctcgagctcctccagtgccacccccgtcagcgacccgagcggtggggagaagccgggcgtccctagcgttcgcgccgggtnnnnnnnnnnnnnnnnnnnnnnnnnnnnnnnnnnnnnnnggcctgaggcagagccgccaggctcgcctgagcctcggtcccttggcgcgcggcgtgccctttcccgccccgagtccttgaactaacccaagtgttggggacatcgtgggaccgaggagaacaggaggggtgcagggggtggtgaggctagggccaggctaacgggttaaagaactctcagggtggggatgccacccggaaggggtgcttcgtaggctgcacgtcggggccgcgacctagagaaggctggatgtgcctccatcgccactaggtaaacgcagcaaggaatttggcagcttgagttctccaaggtgggagtgagagcgtgggagcattactgatgagacgttgaagacacaggggacaaggtgagcggggtttccgggccta

SEQ ID NO: 443606 - DNA, 1510 bp, Homo Sapiens
  misc_feature (693)..(730): n is a, c, g, or t
ggggttcagtttgggggtgattgtccgtgtgtaggggagcgttttcagggcttggaaaccgtgtcacggctcgcacccactatactgcccgccagtatgggacatttcaactcatgcgcttttccgcacttggtgccaggtaaaccatgtgtccacacaactccagtaaggacacagtcgagtgacggcatccaagcagatgcgacacaggcctgtcgtcttgcctcatcctggcagctgcagccggctcgccatttggcagtggtggtctcgcagccataatgacatcacataatgaagttactcctgttccagatctataaacaggctcatgtaactaactgatactcagtaaaatggtacacagctttctcaaaaataaatgttgacttaattgtgacaagacaacccagtttttaaaagcctaaggaaaaatactacagggaaaaaatgaaaagataaacctacaggacttttggttttcttcattctctttgtataaccggtttactttctctaccagttcccatttttcacaacagccagaatagttgacaaaattccgagccagaatttccttcagctggcgcacgctcattccttccacatcatcaaggcttgacaagtcagacagtgaagctctcactctctccttggagagcccggggttccgatcctctgcgttttcttctnnnnnnnnnnnnnnnnnnnnnnnnnnnnnnnnnnnnnnttctgtgtttgctgaagtgatttcactttgtacctgtgccggcactccagatctggatgtttggtctccatccataagctctccctgaaacgaagacatagtagcagagggggctgtatagtttgaaaaaaacgaacgtgtaaaaaagctagaagtctgggaccttgaagaattcagactgcttgtgtccatgtcgtcctcagagcctagtccatgatggcacagtactagatccaccaagtcttctttctcacgacaagtatctatgggtatatttctcagaatgagatactgccgcaggtccttcaccttcagtcgcattaactgagggcgctgaaatgctgtctcttgtaataagtgacaagtagaacatctacggagattttcttgtaagactgaacaaacggagcaaaaatccttcttgcagtcacagcaaacatgcttctttctaaagactgaaaatgaaagcccacaggctttacaaactatgttgggcccttccgtagctgctggtgggtaggtggaaaactcagggtttggtgtaaatctgaatggaccggtggctcctgcaaatgctgactgctggcccctgacagctccagttcccatgacttcattcagcagcccacagcacgaagcccacatagacgtggcacccgccttcatggccgcgaccgcctcagctcggccggctctaccaggaaactcagcaccatagcagctcctcacactgccgacctccttccctctgggcggtgattaccgcgccccgggaggcga

SEQ ID NO: 443607 - DNA, 380 bp, Homo Sapiens
taggccaggacgacatggacacaagcagtctgaattcttcaaggtcccagacttctagcttttttacacgttcgtttttttcaaactatacagccccctctgctactatgtcttcgtttcagggagagcttatggatggagaccaaacatccagatctggagtgccggcacaggtacgagggggtaactaattacacccagggcccggcacgcttattcttgtccgtatatgttggggcctttagtgcttgatgacttctgataaacttcaagtcatgtgctggagtgaagcttccacacccagctgaactctgcacttaaaggctgtcctgatgtatagtgtctgctgagttgctagttggctccagttctctgtctga

SEQ ID NO: 443608 - DNA, 401 bp, Homo Sapiens
  misc_feature (18)..(18): n is a, c, g, or t
  misc_feature (25)..(25): n is a, c, g, or t
tgtctgaagtaccgaccnagctctnaaaacccaacctggcattaccctggaacacaggaacatttttgtcatcctcctggcacaggggagggggttctctgctgccaaggcttcttggagctgaggcaggagggtcagcaagagagagtccagcacagccagaccctcccaggaacaccgaagacccctgtgatccagctgcagtaggccccgctccagcagctcctgcacctccttgttcgctccaaacacatcccacagggtcagctggggctcaaactgctgccagtgctggtgagtgatccccacatcggtgcgtagccccagggccaaaacttcctccagcagctccagcctgcccagggggacacgcttccgggtgccatggccaaacagcatca

SEQ ID NO: 443609 - DNA, 567 bp, Homo Sapiens
tcggcacctcttatgtaggtccgcattcaaggggtcaacttccagttccaggtcaatgctatccgcgtgctttgtacgccatttgatgagggtctggattagggtggcggtagccctgggcagcggccaggtggagtagggtcattccgcggaaagtctttgagtggatcaagtgcttggacttcgcccagcaggctcggctcatcatcttctcgcataccacgaccacacggctctcaaagcagctccccaaggccccagtcccagaagcacactgtgcctggctccctccattcccgctcccgctgccgcctccactgctgccgcctccgctcgcctgtttgtgctgctgggaccccgtcatctcggccatcctcctctccatctgctccagtcgttccaggatggacatcctgaactggttatcgtccaacgacagccagtcgtgctgggaggaagggagcgtgggcagagcccgggctttgtactcaaacaccaccgagttggagatgatctggttgttgaaggcaacttgtagggtcacaagaccagtgtcatgggctgggc

SEQ ID NO: 443610 - DNA, 1683 bp, Homo Sapiens
gttcatagtaacttcggaatttgctctggataaggatggcagcctgtgtcatcttgtttataaagtgcgtacttcaaggctttccatgtcagctgtttatattttctgtaacaacgctgaataacagcagcagctacttcttgctgttcccgcaagggtcggcccttgtatttccggaaagctgtctggacaagcctggcagcctcatagagttctctctgttcatgatcagacagagtgagttgagcaaactcattctctaccttctcactggtagatgcactcaggaattctgaccaatccgcggcggagggaaggttaggtttctcgaaagcgatttcactgacgggagagccaacagggctcaagctggtattagaagaaggggttagaggctcgttatatgcacttcggatctgggcagcactgggaaggcagtcagcatccgctagataactggccagccagctcattgtactgctaatggtggcagggtctgttctttccaatcctgaggactccatgggcacaaaattctcctgcttgattcggtcaggtgtggcttcaataatgtgttctgccaaggtcatcatgttcacctgtatgtcatccatgggctggccgcattcttcattttctgcactatcacggtaggaccccagctctgtattcaccacctctctgttagccatcatcaggacactcattggttcccgtggacgcacctgtgaaggtgctgcctcctttcctacactggtccccttcggatttccagtcacctgtactgtagacacaccaatgtaaagatctttggaattccactttcctacaggctgagatccagaggctttgaaatgctgcagtctctggatgtgggaggggagagttccccggctgaagtccctcactccttcactggggttgagtttctcggggacagactgtttagaactagggctttgcttcctgatatttggctcttccagactcagtgcagtgggaagcagcttctccttgccttgtctggaagtactcagggttcaatttatgctttttgggagccggataatctttgtggctctcactgctgtagtaattagagggttcagaacgaggtcttctcagctctggcgttggtgcttgcaataacagtgactcccttgggtatttctggagagctgatggcttcgctgtgccactgggccatccagctctctgtgctgggctcttcgcttgcaggacagtggattactggggttctgtcccagctgagcctgctcatctctctgcaggtgctccagacactctgctaatttcacatgaccccgtgacctggcaattcccaaaggcagccttcctagagagtcgggaatcgagatggcccgacggtcccacttgtacagcacgacggcagcttccaagtgccctagggcacacgcccacatcagaggagtacaggagaagtggtccacattcaaggggtcaacttccagttccaggtcaatgctatccgcgtgctttgtacgccatttgatgagggtctggattagggtggcatagccctgggcagcggccaggtggagtagggtcattccgcggaaagtctttgagtggatcaagtgcttggacttcgcccagcaggctcggctcatcatctcctcgtgccgaattcgccacccaggc

SEQ ID NO: 443611 - DNA, 886 bp, Homo Sapiens
cgtgggatttggtgcgtgtgtgtggttgttgcatgtctctgactagacacatgaaatgaacacatgtctgaaaagcattgtcacattgctaagggatgctgctgtatgtcttcaagttccttggcctttctcaattctttcactcctttggtacatgcctatggtccaccagggggctgtggcgacagctggcgaagaaacctcattatttttcgagcagcttgatcctgcttttgggttagcaaacttgctcctgagtttctgttgtacaatcacatgccgtccggcgagcctgccgtctttggccacatttcttataccttcggtagtactttgggatgagcacagcagcccgtcggctctgctggaatttgtttggttcatagtaacttcggaatttgctctggataaggatggcagcctgtgtcatctttttataaagtgcgtactgtttatattttctgtaacaacgctgaataacagcagcagctacttcttgctgttcccgcaagggtcggcccttgtatttccggaaagctgtctggacaagcctggcagcctcatagagttctctctgttcatgatcagacagagtgagctgagcaaactcattctctaccttctcactggtagatgcactcaggaattctgacctatccgcggcggagggaaggttaggtttctcgaaagcgatttcactgacgggagagcctacagggctcaagcttggtattagaagaaggggttagaggctcgttatatgcacttcggatctgggcagcacctgggaaggcacgtcagcatccgctagataactggccagccagctcattgtactgctaatggtggcagggtctgttctttccaatcctgagactccatggca

SEQ ID NO: 443612 - DNA, 781 bp, Homo Sapiens
  misc_feature (420)..(466): n is a, c, g, or t
  misc_feature (725)..(725): n is a, c, g, or t
  misc_feature (742)..(742): n is a, c, g, or t
  misc_feature (749)..(749): n is a, c, g, or t
  misc_feature (768)..(768): n is a, c, g, or t
ctgctgttattcagcgttgttacagaaaatataaacagtacgcactttataaaaagatgacacaggctgccatccttatccagagcaaattccgaagttactatgaacaaaaaaaattccagcagagccgacgggctgctgtgctcatccaaaagtactaccgaagttataagaaatgtggcaaaagacggcaggcttcgcggacggctgtgattgtacaacagaaactcaggagcagtttgctaaccaaaaagcaggatcaagctgctcgaaaaataatgaggtttcttcgccgctgtcgccacagagtgaaagaattgaaaaaggccaaggaacttgaagacatacagcagcatcccttagcaatgtgacattgcttttcagactgttttcatttctgtttttagcagagacatgcannnnnnnnnnnnnnnnnnnnnnnnnnnnnnnnnnnnnnnnnnnnnnntacaaaatccctctgcagttttggggagatcagctgcaggattttaacaggaatgttttggtcattgcatttgcactttcatggacaacttttaatttgatcagcaagacatcttgggaactcaatcttctgttgggatcacggggaaatcaaggacacccgggggggaattggaaagagggttcctctttcttcagggaaggaagccattttccttcttcatattggggctgtttttccaaacctcgtgttggggacntgttaccaattattttnttacccnaaatttttgggttaagggnaagggtggggggc

SEQ ID NO: 443613 - DNA, 543 bp, Homo Sapiens
ataaatgcataaagttactttatttttaagtatacatataattttgaaaaatataaatgctaaaatatctcatcttcttcatctcttaattccataaaagtcacaatagaaagcttcataaaactgtaaaatactatgttataggaattttaggatttatattggaaaaagttattagtaatatattgaaatgttttctgttctttatcattttgttccaccatgttgatctacttcatttaaaataaaaagatgcatcatttctctctccaaagttaataaagacttaagagaataaaaataagaatatctgaaagtgcgtattgattctgaaaagtaatgcgtacgaatatgtaccagccatgaaaatggctaaaaagaggcaactattcactcttttcacattgtaggactgggacaaagttacttctggctctaaaagtttcactggatgactttagccctgagttgcaatgtttgcctaggaaacagaattcttgctttttatacgtacccatagagcacaatgaaatgagccaggaa

SEQ ID NO: 443614 - DNA, 466 bp, Homo Sapiens
  misc_feature (422)..(422): n is a, c, g, or t
  misc_feature (434)..(434): n is a, c, g, or t
ataaatgcataaagttactttatttttaagtatacatataattttgaaaaatataaatgctaaaatatctcatcttcttcatctcttaattccataaaagtcacaatagaaagcttcataaaactgtaaaatactatgttataggaattttaggatttatattggaaaaagttattagtaatatattgaaatgttttctgttctttatcattttgttccaccatgttgatctacttcatttaaaataaaaagatgcatcatttctctctccaaagttaataaaggacttaagaggattaaaaataaggaatatctggaaagtgcgtattgattctggaaaggtaatgcgtacggaatatggtaccagccatggaaaatggcttaaaaggggggccactttttcactctttttcccctttgtnggggccgggggncaaggttacctccggggcccccaaaaggtttc

SEQ ID NO: 443615 - DNA, 383 bp, Homo Sapiens
  misc_feature (208)..(231): n is a, c, g, or t
  misc_feature (296)..(337): n is a, c, g, or t
aaaagaaaagacacctgggcctgggggaccactaccaccaagacgcggagaccagtagtggccccaaatgccaggctgcactgatatttattggatataagacaaaggggcagggtaaggaatgtgaaccatctccaataataggtaaggtcacatgggtcatgtgtccactggacagggggcccttccctgcctggcagcagaggcnnnnnnnnnnnnnnnnnnnnnnnncagcttatgccattatttctgcatatcagacatttagtactttcactaatttgctcctgctatcnnnnnnnnnnnnnnnnnnnnnnnnnnnnnnnnnnnnnnnnnncgcgtgggtcgacgatatcccgggaattccggacctgtaccagcct

SEQ ID NO: 443616 - DNA, 388 bp, Homo Sapiens
tttttaagagataaaagacagctgagcctgggaatcccaccaagacgcggagaccggtagtggccccaaatgccaggctgcactgatatttattggatacaagacaaaggggcaggataagcagtgtgaaccatctccaatgataggtaaggccacatgggtcacgtgtccactggaaagcgggcccttgcctgcctggcaccaaggcagagagagagagacagcttatgccattatttctgcttatcagagacttttagtactttcactaatttgctattgttatctaaaaggcagagccagggtgtacaggatggaacatgaaggcggactaggaggcgtgaccaccaaagcacagcatcacagggagatagttaggcctctggat

SEQ ID NO: 443617 - DNA, 448 bp, Homo Sapiens
acacaccaagcagagagtttattgaggccatgggcagggcccaggaacacagcacggggcgtgcgtggggtggatgcacgctggactgcaggggtgcgctacagcggcaagcggaggggtattgggggcccaggagggcccctttccttaggcagcgtctaggggcttcaggtgagcatcaagaaccactcctagcctccgcaggctcttttgggaacccctccctgcttccccctgagctccatgtggggtggggctggggcgagggggccctcttttccctgtggtcaaggatgggatgatcccttgagattcactataaaaattaaaattcccttataaatcgcaggggattggcaggagggcatcacttggaagccgacattacctgtccctagagccgcacctcctccacacccccgaagttctgaccccacagagagagctt

SEQ ID NO: 443618 - DNA, 814 bp, Homo Sapiens
  misc_feature (73)..(123): n is a, c, g, or t
gaaaaggggagggggatgggttgggttagtgggcgctcccggtggggattttttaagggcggggctgccgtannnnnnnnnnnnnnnnnnnnnnnnnnnnnnnnnnnnnnnnnnnnnnnnnnnagcgtggggcgtgggagatataggccgtgtattgtagggggttggcgtgtgggcggtacgctcgtcttccgggagcctatggcttgtattgaaactttaggttttcttgagctgtggtgctgagggcaggaagaagacactaacagcgaagcatgtgtttgtggttgttggaggattcctgcagttcacttgaggtggcggaatcttctggtggagggatgccctccggcgtgggtctggggttgtgtgctcctggtggtcctagtggttttctttgcctgtggtccagatactgctggatactggcagctcctgtggttgggccagtttgtacacttggcgttaggcttgatcagtgatgttgctgaccctcgcccatgctgggtaagtgtccaggtggaagaggctaactccccaggtgttgatggccaccattactatcaccagtccaataacgttgactcccaggccagctttcaccatatctttgatctggcagtgcccatagctgaagacgatggcattagggggattgcccacaggcagcatcactgcaaaggagatgcacatggtgactgggatcagggtgtagagggggttaatgtgcagcgtttcagacaggctgcacaggatgggcaggaagatggtgatggttgctgggttgctcacaaactcagtgacaatggacacc

SEQ ID NO: 443619 - DNA, 630 bp, Homo Sapiens
aaagacatttccaatgggagaaccagaaaaagggggaggggagggaaactttttgataacaattgtggttttattgtgtccaaccaatgcatcaataaatgaacttgaagcccaagcctgtgtgtgtcctaattccactcacccagccccgggcacctgccccactcacctctggctttgagaaggggcgtgtgtcggtggttgcctggctgcagtgtctcacctaggctaggtgtgcaccttagaagcacaaagcgggcacagttgtgggtaataagcttactctgcaggccgctgggtgtgtgcccaccctcctgagccccgaaagaggacctgtcagctcctgagaggctgctacgggtttgccttgttctgttcaggcatctgaggtaagaaggaggggccagaggagcaccttgtccagccttcaccatgagagcgggcatataaatataaatacaggtaacttataaatagaagtccagctctgagctgaaaaccacaggcaggataaagagcagcctccaagagcgaggctggcgggctgggcactgagcggccactctggtgactgacagcaggtagtgcactcctgccgtcagccaaccgtggactagtgggtaccgagct

SEQ ID NO: 443620 - DNA, 1224 bp, Homo Sapiens
  misc_feature (60)..(91): n is a, c, g, or t
gaaatttggaacttttattaaatactcattcatccatgtgccaccaccacccagagcagnnnnnnnnnnnnnnnnnnnnnnnnnnnnnnnncaatacaaatcaaacccaatccccagcagtctatgtacatgggccactgcctgcctctctgccatagagaggttggggggcagctgaggagtggtgggggctgggcaccttttctccagccacaggcccctgcaggaattaattgactgtggtgtcacggaatgtccctggtgccaagtagcctggcatctcagctggcctccatgggagtgtggttattgctgggagtggcaggacagggcctgttccactgctactgggctgaagagctgtctgtggttcacccctacagggccagtccccatagcagcccccaatctctacctgagaagggggaccagactgagggccagaagggtgttctttaggaggagagtgggcgcccagctgattttgagaggcgggtgccctggtgtagcctggctgttgtcagctcccgaggatgatgcactcccctgattccagctgcctggcccccttcttgagcagggcccccattcccttcagttaggcagttttcttgctgtcttctcaccccagagacctatgtggccaccttctatgtgtcagccacagcctgggcccttgggggcaagagtggccatgcagatggcacttcctccagcatggtgtgggacccagccctcttggactcagcagccactctccgacactgttgtctccagggtcacagccccttgctgcatggccgcagtggccacattgatggcctcctctaaggtctgctgttcctccagctgcactgcaatgtgcgttccgttggctgtggccaacagtgccacctgttgatgacgaagagatgctacacttgagtcctcagccaccacagccccagaggtgatgattgtgacctgctgggcaccatcctgagtgatcagagccacctggggggccccatcttcttcagtcaccatcgccacctgggctgggatgtcatctctctcttccttcacctccgaaaggtaagctatccggggtcgtttgggtggcggactctcctcggctgcagaggcggcctcaagttgctgctgctcatagagggcctgctcgctctcctccgtggcctccagctcgccgtgggcactgcgcttgatcccgggaattccggaccg

SEQ ID NO: 443621 - DNA, 1066 bp, Homo Sapiens
gagcccaaaggtttcttaggagagagtgggcgcacgcggattagagagcgtgtgccttggtgtagcctggctgtgtcagttccccgaggatgatgcactgctcggtgattccaagctgcgtggcgccgttcttgaagcagggcccccattccgttcagttagccagttttctggctgtcttctcacgcccagagacctatgtgggccacgttcgtatgtgtcagccacagcgctggtccttgggggcaagagtggccaatgcagatggcacttcctccagcatggtgtgggacccagccctcttggactcagcagccactgtccgacactgttgtctccagggtcacagccccttgctgcatggccgcagtggccacattgatggcctcctctaaggtctgttgttcctccagctgcactgcaatgtgcgttccgttggctgtggccaacagtgccacctgttgatgacgaagagatgctacacttgagtcctcagccaccacagccccagaggtaatgattgtgacgggctgcgtctgggtgccatcggcgctgaccatggtgactgtatgtgtgccagatgtggccaggtcggcatcaggactggggatgttgaggttggtgctgccgtgctgggtgaccatactgatggcactccccagggcctgcaggtcttccggggacaggctgacctgctgggcaccatcctgagtgatcagagccacctggggggccccatcttcttcagtcaccatcgccacctgggctgggatgtcatctctctcttccttcacctccgaaaggtaagctatccggggtcgtttgggtggcggactctcctcggctgcagaggcggcctcaagttgctgctgctcatagagggcctgctcactctcctccgtggcctccagctcgccatgggcactgcgcttgtgcatggccaaggtggaggtctgccggtaggtcttgccgcaggtgctgcaggtgtagggcttgcagtgtgtgttgaccacgtggtgcttatacaagctcgagtactcggtgaaagcgtttcccgcagccctgc

SEQ ID NO: 443622 - DNA, 479 bp, Homo Sapiens
  misc_feature (341)..(341): n is a, c, g, or t
  misc_feature (345)..(345): n is a, c, g, or t
  misc_feature (348)..(348): n is a, c, g, or t
  misc_feature (371)..(371): n is a, c, g, or t
  misc_feature (410)..(410): n is a, c, g, or t
  misc_feature (427)..(427): n is a, c, g, or t
  misc_feature (436)..(436): n is a, c, g, or t
gggattttagtgtattaaaccaaggacttttttttaaacttagagaaaacaagaagacgtgacaacaccagaaacaagaacagctctctggccagcctgtgctgaccagtacacagtgaatcacacacagaaaagtatgtcattccggtcagtgtctagctccaccgcctagaaaacagactgcaaataaataaagcgcatggagaccccgtcacgcagcaagggccccatctgggagagaagaggtggggaggggaggtggagaagcagcaggcggggctaccacttcaggcagcaggggtgaaaaagcaggggacagggagcagatgcttgagggcttnggcntgnacccttccccagttcagcccctnttgggccattacgggccacaccagaagccattgggggtngggcggacttgggtttncctgacctnttttttggggttggggttcctgcattgggggtttttttagggc

SEQ ID NO: 443623 - DNA, 1182 bp, Homo Sapiens
  misc_feature (65)..(65): n is a, c, g, or t
gtggcgcggtccagggagctgcttacgcccgccgtggtcaccatgtcgcgggctgcctgcagcantcttgagcacgctggcctgggccgagctggccgtgaggtccgggctggcctgccgcggtgggctggcgaggctctgcaccccgctgaagcagctgtagatgcccctgctgaaagccagcaggaagtccagctgggatgaattgggcaccgagtggcgcagtttccagtagaccaggtgctcccaggcgaagaccagcagggccagccccatggccaccagcagcatgtagaagacgcctgccaatgttgtcgatgtccagcttgcttctcatcacctcgttcttctcattctggcagatccctgagagccacactgtctccagtttctgtgtctctccgtcccccaggaactgcaagagcgccaggtctatggcccgcttccagtgggagttcttctgcatggcgatgcccgtagccagtggtagcaaagaccttgccagacccaattgtgaccagcttgcagcccttgtcctttgcttgccatgttgttgaggacagcagcatcatagatgaaggcattcagcttccccatcttgaaggctggtgagcgcgtccttcaccgagcgctggttgaacttgaccatgttggtgtgcatgtcacggtagttactgcggatgttccgctccgtgctgccgttgggcaccgtgccgaagcggaaaggtgggtactgatcttgaggccgctgaaacttcttgttcactgaggccccgacacattgtcgaatgtattgctcttggaatcatgaaagggggccaggttggccgtgtagctggcgaggaagatgacagcaaagaaggcccagaccagaaccatgatcttgctggtggtgccccgcgggttctcgatgggcactgagttgttgaagaccagcgcccacagcagccacacggacttgccgatagtgaaagctgggcccccggacttcttgcctctggtgaggttctggttgtagctgacagggctgaagtactcgaacatgaagacggtgatggccaccacagtgaggcacatgacaaacatcatcacccacactgcagggctatatggctccaagaaggccgagggggagacggtgccattgctgcgagccgccatcacactgatgcccgtctccgc

SEQ ID NO: 443624 - DNA, 480 bp, Homo Sapiens
  misc_feature (212)..(214): n is a, c, g, or t
  misc_feature (220)..(220): n is a, c, g, or t
tggcattgggcagctttcatctgtgtttattttttttcatataaaagttacatgtttgaaatgtctgcaggaagatgccaccatcagacaggttagctggggcatatatattacaatgtaaccctgtggaggtcgtggggccggagcgggaagatgctccccagaatcgggttcaggtcagacatggtgtgtgcctgcccctccttgccccnnnccaccncgacacctgcaggtgaggactgacctctgcaaggaacgagtcctccgcctggctcacgtctgtctgtgaagactgattcccacaacccgcccgggccccccaaaggaacagacgagccacggccaggccgcagcactgagcacagagctcagcaataaccagggccaggcttagggggcacagggggctgcctgccatcaataagttagacatacatcgcaccttgccgtcctcacgcagggagcccctgggcactgctc

SEQ ID NO: 443625 - DNA, 1910 bp, Homo Sapiens
ggggagttcaagaaacccatgaaaaaggacatagtggaagatgaagatgatgactttctgaaaggcgaagtgccccagaatgataccgtgattgggatcacgccaagctcctttgacacgcatttccgaagtccttcaagtagtgtgggctccccacccgtgttgtacatgcaacccagtcccctctgacggcagaaatttgtgactgagatgtgacatttgggattccccatcacttgtcatgccctcagcacccagcttgtgccattgggcattgatggcattgaactagagcgagtgcctgcctcggctgtggcacttccaggttcgactgaatcaagcatctgaagactgggtttttttgttgttgttgttccccttacagacaaaatgaagactatcatgtgcaatcttttacagtggggttgatgatacatttggaaggatttgcttgtttaatatgtacattttttgtgttaacagctttttgacacaattactgggtaatttctaatataggcagcagactgttttacgggttgctgttttaacatgggtttttgtcagatccatggtcttaggacttgactgatgagctttcagtgaagaatcctctaagataaaacttctatttaaagactttaactagaaagtgtttattttggctacattgttcaccttctgctgtattggtatttgtctgttgggatttcaagggagtgtagagaagacagaaggaaagctgagagctggcccgacatggtctgggacacagagttggagctggcactgaagatctccagggacttcagagaccaataaaagcccatagggaagagagagaggatatagggaaacagaatcagatgtgtaatatacttggcacagcgaaaaaatggatttaaaagacaaaaatggaggtccaggtagatgtaattcacacagactgaaagtgagttcgggcttgtgtaaaacacatgagattggatttgaccccttggctctcaagtgtccccttagatctagaactgctccttggtggccattagatcgagtcagttttgatctgcatcacttagttattgggaatttctttgttggaaacaggaaaatttttttagattatttggtgtacggttttgctcacaacaataggtggaagttgctagtgcagtcttggtctgatggctgtgtgcatcgcacattcggcttggtgaaatccttctctaaagcctctttttgtatttttataactaaacagaggaagtcttcagaagacctcgctttaaaacaaatttgtgcaaacactgctagagtcattttgaagctcaagcattttcactttgtttcttacatgtgtacttttttgtttacttgtgaaaatggccatctttaagcatatttattttctgccactttatttaaaggcaagcaatattttcttgatcataaatattttgtaatgaaatacttcctcttttccagggctttgtatgcacttgtataattacattgatggcaatgtagagtttgaatttcagtctgtaaatacttttttggaaaatagaaatttttattgctttaaagttttggatatgggtggttttcttttccgggtttggtggaaagtaatttgagaactttaaggttgtctttttaactgctggcaaaatgttgattttttaatattagataaaacgagtaaacgaaattccccagaaattagtagtaagtggggtctttgtgggttgggaagtagttttaatgtagaaagacatttacatataagtctgtttaatttcaaaggagtttgtgaaaaaaaatccatggtgaaaatgaaacaatgacatggttaatctggaacttacgttcttataccaataaaaggtacctcaatacatgttctttca

SEQ ID NO: 443626 - DNA, 717 bp, Homo Sapiens
gcagtgtcggcccaaacacaatgcccaggttgttggcagacatcttgttttccataaatcgtgcagccaccctgaacagatgggccaccaggtgccgcagggtgttgtagttagagtcaggcagctgtaccaagagggtcttcagcgagcggataacctcagggctggggctgggggtcccagggtcgtccccagggtctgcatgcaaggtcttagccagagagatgaaggcgtcgtagaggtggaaggggatcacgggctcggtgagctcctgaagaaatcgcttgaggacactcgagacgtcatgaggcgagttccccgacagctccaccaacgctcggccattctcgaaagcctggcacagccgctccacacggacccgggacccgctgacccggtaaatgccctgcacatccagggcacggtgttctatctcagccgtgcacttcgtgaccacaaagggtacctcctccgggaagtccctgggtagctgcaggaagtcaaacccaaaaaggggtgtccgggctgggagccgcctgtgtccacagaggatcaggagagtctccaggcagcgcttgtggcaggtcagaaagcactcctcacactccgtcccgctgaccatgaaggcttcgcactcgcggcacttggctgggccccgcagtcgccgcagctggtgggtctgagccgcgctggacagtgtccacttcccgaaggggg

SEQ ID NO: 443627 - DNA, 528 bp, Homo Sapiens
gtcaagcttggcacgaggggagaatgggaatttttttcctcccacctgggacatagtttgcccctgtggctggcctttctgagggagtatactaaatgtttacttaagaaacaccctgtttacagccagaggagaaacacccaacactgagtggagatttgactctggacagggcctggcctccttagtggcactgccggggggccccagagcgaatgagggcagagatgccgggggcaggggcaaacgccctccgctccctctgctcccaaccctgtggtgctaggaccactccccgccttccctacggcctcctcgccctgcacattccccacctccacattcccctcctccaagatctcagctccttaacatatcagttgtctcctagcctagaaaaccagtgtttggagcaattaagatgattatttttgcttggaatctttttctaaggagaaggaaaagagctgggcttgtggggattttctttttatgctgtttagctgttttaccttcttagaagacatc

SEQ ID NO: 443628 - DNA, 520 bp, Homo Sapiens
accccagactggaaaaacacattttccctggggtttcctattggcgtgtcttgagctgctctggtgataaccgtaataatgccaatactgatacgaacagcagaaaacagtaaccctaagaactctacagatgatcatcaaggaccactgtctcttaccatttgctgctttggtttgaaattctcactgcctcgtagatctcattttgagcactatacattcctaaagattgatttctttctatctgacttaaatttaggaatgattaaatcttcatttctcccatgatttgatcctaaaacattttgaaaggaaacagccttgagatctgtgattactaagacatacataacattcttatcacattagaaagcaagaattgactgttgcttgtcttgttcctgttgtcttgtcccctgaattcctgtttatctttgattgtatgtgggacattgtattttcagtacatttgtagaaataatgtgaagcctataaagatgttctctgcctccaaaaaaaa

SEQ ID NO: 443629 - DNA, 493 bp, Homo Sapiens
  misc_feature (96)..(96): n is a, c, g, or t
  misc_feature (201)..(201): n is a, c, g, or t
  misc_feature (339)..(339): n is a, c, g, or t
  misc_feature (384)..(384): n is a, c, g, or t
  misc_feature (411)..(411): n is a, c, g, or t
  misc_feature (425)..(425): n is a, c, g, or t
  misc_feature (444)..(444): n is a, c, g, or t
  misc_feature (451)..(451): n is a, c, g, or t
  misc_feature (456)..(456): n is a, c, g, or t
  misc_feature (469)..(469): n is a, c, g, or t
tttttggaggcagagaacatctttataggcttcacattatttctacaaatgtactgaaaatacaatgtcccacatacaatcaaagataaacagganttcaggggacaagacaacaggaacaagacaagcaacagtcaattcttgctttctaatgtgataaggaatgttatgtatgtcttagtaatcacaggatctcaaggnctgtttcctttcaaaatgttttagggatcaaatcatggggagtaaatgaaggatttaatcattcctaaatttaaggtcaggataggaaggaaatcaatctttggggaatgtatagtgctccaaaatgaggatctacgnggggcagtgaggatttccaaaccaaaggcaggcaaatgggtaagnagaacagtgggtccttgatggatccanctgttaggagttcntgggggttactgttttccngccgttncgtantcagtattgggcntatttacggttattcaccagagca

SEQ ID NO: 443630 - DNA, 1477 bp, Homo Sapiens
tgagggttggttgtcgaggtgtgagtgtatctctatatgcttcttgtctacattatatatcttcgtaggccgccgtttccagctctcttcgaaacacttgcacacatgcgcacgtggcgccgtcagctgcgtatggtgctcctcttctgctgtcctcgggtgttgagctcatccccgggaaggccctctccgagcggctccttacttcgggtgtttctccagacacgtttctaggagttgccccccggcgggtttcttcattgtgggcaacaatccccgcccgcatttgttgcagatccagggttttccgtacgcaaaccgggtagtgacccctttttcccttgccctgcgcggggctccgccgccccacaacgaaacgggttttgaaaaagcttcttcgcggggccgaggccgggcccgacacgcaccccatcctgtcctccccccgttttttcttctgggaccgttttatttattggaaaggttctttcaagggaacttttctgcaaggccaaggcaatgtatgtatttttctttggtaaattacaatttacattggcacaaaaaacacatggtgactaatgtactttgctctaggacaattaaagaaaatgtattttatcctcacaaatccagtgaagccttcattttatttctaaaagtttaaggaaggtctagtctaccagttataaaaatgaaaaccagttcaactctaatataaacattatttacatttgtttataaaaatagatttgagtttaggaaaagttgaacaactagttatttttacttcagttattaggtacaatgaattccttgatttttcaaggctgaccctgtttccttggttaacaatttcaatttaggccttataggaaaaaacgtaagggatcctttatctgcctccaactaggtaagttatttgataccactgacagcttaaaaagtaatgtcctaacctttctgaagattctggttgccataaccatgctactacagtctgttgttagtttgctctattaaaactaattggtctggagaaaacctacctgcagttgtacgaggctgttactggagtagcagatgttagctgatctaacataacttggaaaccaactgatgatcccataagagaatgccaaaaatcccaatagaatcaaagccaactcaatgacatttatgaaaagtacaaactttactaaaaggggggtataggcttcattaaaggtttacctaattgttggtttcaatatttggggcacaaggctttgtagcaccaggggttcccattatgcattggtttatcaaaatggcaactggggatagagagaaacttgagaacaagatagaagcataggatgcaacatgcccccaaaacaccacatttcagtcgatttaagggctcatccttttacgaagataaattgtctgtccttttggacaaaaatgggtatactaccgaatatacgaatcatag

SEQ ID NO: 443631 - DNA, 450 bp, Homo Sapiens
ttaaaaaattttcctccaacagccttccatatttggtccagccttccagggaataaagaaatccacaacccccgggattttacctatttgctttaattcaagcactgtttcacctatattaggtatgttttatacctataggattctgaattcatgcaaaaatgctctctcagagtctgttgtgaagcagttgcattaagtaaaacataattctcatttataaatcttcctgtgtccgatttcccttgatactcccaatgacaatgcattgctcctcactttcatctcccttggaattgggggttgtgtgagtcatctcattgacaggaaaaatgattgcatgatattttatttgcttgtatgtgtttgatttatttaatcaatatgaattcatcaagatcacacctatttgcttagaaaaacaagactaacttgatggtcatgttctcc

SEQ ID NO: 443632 - DNA, 374 bp, Homo Sapiens
cttactaaatccagcttttattcttaggtattcacctgattgctgtaaactttcaattcgtttccagagttcccataaatttgagtttttgccaccttatttgctgcttttgtggaaggacagacttgtggaatttccttttccatttcgttgaccacattaaagttttagaagctctcctctagtctacccttcattttaaaaagtcaaaaagacaggaagtgacatatccagggtcacacaacaaatcaggggctgagctgagatcagaataaggatgtttgactctcaggtcagagctctttctgcttcaggacttcatcagctcttagtgttgagaaggagtcaggctcaagctaaacaccaatattagg

SEQ ID NO: 443633 - DNA, 992 bp, Homo Sapiens
  misc_feature (291)..(291): n is a, c, g, or t
gtggatgtactccagctccgtgtacttcacaccctggtccaccaccaggttcaggagctcgtcagctgtgttgtaaagcatctcgtagtactgccttgcaaagtccaggtctgcctcccgcgacatggtgatgttggtcaaattctgctgaagaacaaaaatgttcctacacattttcttgatgccagactcactgatgcgcctgaagtactgggcaccattaatgaggatgcaggagatcaggtggcccaggccttcgaagatatactggaacttgtgcctgctgaaagntggcgctcatggcctcttcaatggcgctgatatctttgttgagcttgaccaccagggggtcataatccatactttccacattagccacaatggcatagttcccctcctttgcaagagggataagatagtggaaacagtgaaccctcacttccagatgtaagacaagcaagcagcggtcagccatatccctggaacgatttggcaagttcactgagagtctgcatgatctgctctgacactggggggagatccgtgttcgtgtggctgtcttgagcaggagaaagcatctgggatgtagaaagattggagaaagctgactttgttcgacttgccaaccattccaggctttcatgcatgttggccaaggctttgaggtcactgacgtcacgaaggatgtcttgtggagggattaatttatcacccaggttcccaataagaacttcagactccttgccaaaagctgcccttatgaaatcttcttcctcctctctttttggcctcagctgtttgggttgagccatattcatccagtttggtagagatttcaagagtctgctgatatcatcatcttttgcccaggatgcactgatgacaagtttttcttctgactggacaatacccctgtaagctgcagtgcaggtgtccttgtactcctggagcttcacgcacaccatgttgaggaattgatctgaatatgcacc

SEQ ID NO: 443634 - DNA, 617 bp, Homo Sapiens
  misc_feature (11)..(11): n is a, c, g, or t
ctccaggttgntgaggttcccgatctggatggggatgtagccgatgtggttgtaccacagcttaaggcaggtgagccggtgcaggtgctggaagctgatgatctcctcgatggtcttgaggttgttgtccttgaggtcaatctcctgcaggttgtggaggctgaagatggagtgggggatgcgctccaggtcacagcggatcagctgcagctcagtcaggttcgccatcttcttgaggctgttgaggacgatgagcttggtgccctcattgttgatggacagcttctgcaggtgcacgcccacatctgtgaccacctgtggcagcttgcttaggttgctcttgagccgcagcaccttgaggcgtttgagctcccgcagcccgtcgatgacgatgtagcggttgttctccgcgctcaggttgcccgtcaggtgcagctcctccagtgtcttcaggctatagatccacagcgggatctccttgatgtcggtgaacttgatgtgcagcgcccgcaggttctcgcgcaggaaggccagcgcgggcgcttcaatcttggccgctgtgtggtagagccacagctccttgaggcccgtgagctgggcaatgctgggcgggatgg

SEQ ID NO: 443635 - DNA, 2909 bp, Homo Sapiens
  misc_feature (711)..(711): n is a, c, g, or t
gagctgagtcaatcattcctgctttatatttaaactgcaaagacagaacacagagcattcgatttgaaaattctggacccatttgcaccagtccctgctgaccccacacccttccttcctgtcacagccagggctcactgtgcggtgactgcgaccctgggtgcaggagccgggggcccccgcaggacaggcacttggggggtggccttctggctcctctctgcagacaggcgctccaggcgctccgtgtagaaaccattgaagtcaagcctggagatgacgctggccatgccgtgctcacagtcactggtgctatagatgctcagccgggccaggaggtccagcaggtgggctgagaagttcttgtcaaacttgttgatggtggcctcgaagccggacaccagctgcacagtgtctgcgtgctcagccaggtgcttcctggcgagctccttccgggcccgctcctcggcccctgcgggcagccccaggacggtgctgtgctccagcgtctgcccgcccagctcgccatctaatttcatgctctgtgtaaatttctgcatgcagttggtgaacatgacgcacacagacatgagcttggagaagaccttcagcagctctgtgttggtgagcatgcagttcttcaggcaggtgtccaggaagcctgtgtggtggccaatgacgtcgtcaatgttggaggcggatttcaggttntttctccaggatgtgccaggtcggttccatcactttgaaccatcatgtagtattgaatattctggacgaagttgagcattcgctgccgcagagtgaaagccccagcaaaccactgggcggagtgcagcgagtgctgcttggcggttttgttgctgatccagacgctgcagagctgccgctccacgtgcttgcaatagaacatgtgcctgaagagcatctggtagcgagtgagggctttcctgttgatgatgagcgaaaggggccacttgacgatgtagtcgaaagagaaggcctccaggccgctcagcgccagctccgtggggtcggcgtgcgccatcgccttctcctgcttggtctcgatggccaggacgcgcaagagctgagtgatgaggtcatggggcatcaggtcgatcttgaggtcgtccttgaaggggtcagtgttggccgtgctcatgcgcagcgccagctccaggagcgcttccaggcgagggggcgtgatgtcctccaccggcttccggagctcctcctccgcgaggtccatgaagtgcacgaagaagtcgccctggtccatgaggaagtagcgcttgatggacctgaggtgagccaccagctccttctcctccatcaggaagtccagcagcaccttgctggcgtagttaaacgccttctcgatctgctccacatacgcccgctcttttaacgtgtagatgatctctttagccaccgggcaggtgacgtcatggccacactctctgaccacatttagatattttcctgtgctgaggatcttgtccgccattttctgcaggaaggacgggatctgctgctggacgatggtgtaccgctggtcccagtacttgtcgttgtaatcctcctggatcctctccttccgcagctcgtgctcctcgaccataaactcactgtatgggtcgtggatgatgcccctgtagatccacttctccagaacctcgaagtagggagcactggccgccttggttaggtacaggcatagctcctgcgcctggctgtcccctgtgtagctgaagctcctgtcgtggagcaggctcagcgtggaccccccaagacattcgcctttgtccaccgaggtggcgagggaggccaggatgtccatggtgcgcatggctggctggatgtagaaccagagcttctgcagcgaaaggaggccctgcctgtgcagctgctccagctgtgacaccagaatcaggtgctccttcaccagggtgcgcatggcggccgccagggcgtggttcacctgcccgttctcgaaggaagacttctcttcaatgaacctggtcacagcggagtagctggcggccactgggaggatcctgtgcaccagctccctgatggacaggtccaggttggggtccacgaggaaggtccggctctgcctcccagccaggggctgagcactgacgtacctcccgtccacgcccaccagcacgtacagcaggtcctccaccacggccgactcctgcgaggccaggggcaacgtgcctatcggcaaagcggtgtctgtgctgatgccagcaccaatcaggaaatccccgatcagggcaggtctctcatacacccatgctgggaagatggggaggtgctggcctgaattttttttgttctgcttgtctcgaagcatctttcttttaagttccagagactgctgcagcgtggagcctgtggccacgctgccaagctgcttcctcagttcctcaagctcctgcatggagatcttggaggccgcggcagggacgttgatgctggtggtactgctgcccacagcagcggctgcaagctcagctctttcttttgcattctgttgtaagtactgcagagtctctttgtcttccgtgagctttgacaacaggtacaccagcgggtcaaggttccttgtatttttagatttcagttcatcatatttctttagaaagtcttctggagtacgagaaaactctgcaattttaaccttggcactgtgagcagagacagtggtagtgacgtacggggtcctgttcttttgaagcaggtcaatgtagacctcagccccatctcctccgtggacacgcagcaggctaagcagttcattgacgtcatggtgaatccgaaattcactcatagttttagctctgaggcacgaacatcacaatatgttctccgcagtcccggagccacaacccgct

SEQ ID NO: 443636 - DNA, 288 bp, Homo Sapiens
atgtccctccgtgtccctgtgtcccggggagccctgtatgggtcgtggatgatgcccctgtagatccacttctccagaacctcgaagtagggagcactggccgccttggttaggtacaggcatagctcctgcgcctggctgtcccctgtgtagctgaagctcctgtcgtggagcaggctcagcgtggaccccccaagacattcgcctttgtccaccgaggtggcgagggaggccaggatgtccatggtgcgcatggctggctggatgtagaaccagagcttctgcagc

SEQ ID NO: 443637 - DNA, 701 bp, Homo Sapiens
  misc_feature (34)..(34): n is a, c, g, or t
  misc_feature (56)..(56): n is a, c, g, or t
  misc_feature (71)..(71): n is a, c, g, or t
  misc_feature (98)..(98): n is a, c, g, or t
  misc_feature (101)..(109): n is a, c, g, or t
aaaagggccaccggccataaaggcccgtaacagnccataccacacaccataaccangccataccggaatanccccaacaagagaaatatatcctattnggnnnnnnnnngaaatttgcctaaacctatttgtacttttgttgaaaaagtaacaatacagtccctgacttgtaatagttcaatgtaaaattttttgactttacaatggtgcaaaaccattccgttatttcagtataatattcaataaattacttgagatatccaacagtttattataaaacaggctttgccttagatgattttgcctgactgcaggctactgtttaagtgttctgagtatgtttaatgtaggctaggctaagctatgatgtttggtagttaggtgtaggaaacgggcttctaacttacggtattttcagcttatgatgggtttatcgggacataatcccactgtaagtcaaggagcagctgtatcacttagctgtatcactaagctggctttgggaagcagcaattaactatgtcactattttgccattgaactaaaacattccttacacataatgaaagtgttaaatgactaaattatccaaattagacaagagcatttcaaaaactgaaaccattatattctattaattttggttacatacttgggggatataagatacaataaaggaacgtgaattttagagttagacc

SEQ ID NO: 443638 - DNA, 542 bp, Homo Sapiens
  misc_feature (427)..(427): n is a, c, g, or t
  misc_feature (452)..(452): n is a, c, g, or t
  misc_feature (480)..(480): n is a, c, g, or t
  misc_feature (486)..(486): n is a, c, g, or t
  misc_feature (492)..(492): n is a, c, g, or t
  misc_feature (505)..(505): n is a, c, g, or t
  misc_feature (517)..(517): n is a, c, g, or t
aggataaatttcacgatccttttctaaagcgtgtctccaaatgttagtaggcagttctaaaaataattggtttcacttatggctttaaaagaaaatcctcaaaaaggaataacttatttcaggaatgtaatgtgggctctttaaaataagtaacacaccaatgttagtttctagtattgacaccacaagttttaagtggatcccaagatgtaattgctcttactgcttgtgcttaagttgttcgagccattgtctaaacacctatcattgtctaaatggcaattattttgccattgtaaaaaaacactatcagcttggccttatagtggggtcctaggatatctggaaagcatccaatttgaattaatatagtgctggaagggaaagcctgggtggcactttttggtgttgtctggtgtcttcagtncaaattcaggtatctgggaaaggcntccaattggaatttaattttagtgctgnaagggnaaggcnggggtggcacttnttggccgttgtnctgggtgtccttccagtccaattcc

SEQ ID NO: 443639 - DNA, 362 bp, Homo Sapiens
agtgctaggaattacaagtgtgagccaccacatccagccagtgtctttgaaaacaatcaaatataatccttaatgtttctttacattgtcatcaagtattagtaacagtgacttctagtgaacaccttgatccttaaaccacaggtctaagttcagttttgtgattcctttcatttttacactcaaccctgaatatggacaagaccggttagtgtgacctgttattttaggaattacaactttaaaaattcctaatagccacaatctaaatgtgcaattcaaagcttttaacaatttccatgttctaaagtttctaagagtcttgaggttatgctagggctcctggttaaagtaactgccac

SEQ ID NO: 443640 - DNA, 239 bp, Homo Sapiens
  misc_feature (153)..(153): n is a, c, g, or t
  misc_feature (166)..(166): n is a, c, g, or t
gagctgagaaggagacgctgcagaaagaggttcaagagctgcaggattccctcttgaggctggagccctgcccacatctttcccacaaccaagcaggtggctcaggcagtggttctagcagctctgaggcagacagggaaccctgggagactnaggacttcttctncctggctcacccccttcttcggcggctccgcagccattccagcacccagatccttgggtctcttcccaaccag

SEQ ID NO: 443641 - DNA, 856 bp, Homo Sapiens
  misc_feature (17)..(17): n is a, c, g, or t
aaaccccacagcctaanttcctcctcaacctgggaaatttctatccccaatccttccctaaattaaacccctcctcctcgctaaagcagtgggtcctccaataggggatgttccacacgggacatttggccaatgtctagagacattttcgtttgtcatctctgggagggggtccactggcatctagtgggtggagcccaccacacacaggacagccccaacacagagaatggtcagaacagcactagtgccaaggctgagaaacccggtcctggagggggtgctttacccctaagattctcaatttagcatgagcggaggcccttgggatttacagtcagatgaatgtgaatgccccacctcaagccctaacatgcctaacatgccactgccatgttgagcagaagtccccaattatcccagagtgttccacaaatgtccagacagctgctggaggttcaaattccagccaatacaactccaaccttacatccttctgtctttctcttctgaaaagcctcctatttctttctcagagccagggctaccccgatggccactgccaggatggcaacagcagcagcccctccaaacagcagtatagacttgccctcagacagcggcatgggcttcatctcaccggcgggggacagtctagacttgccctcagacggcggcacgggcttcttctcgctggcaggggacagctcttccacaaggctctcttcccttgcgtttatctccttctcactcagcagcgtttctgtgggttccagtgcggggaccacctcctccacttcagtaggttcagttgttgctgctttcacctcttcttcatcaagttctacaaacagag

SEQ ID NO: 443642 - DNA, 702 bp, Homo Sapiens
  misc_feature (146)..(146): n is a, c, g, or t
acctccctctaagagcacgggtctgttgcatgatacacgctatgtggatgtgactatctttcagtgttttatagccacttatttttccctaggtttgatcatttccttatgacttaattctccactctcagcctttcatagttatngcgtttgcttatgcccacaaataatgtgtggggaatacctagaagacccctgtaatggaggttggacaattggttttgttcttggaatccacactgaatgcccttgctagaagtccaaaataagggtcacagcagaggataactacagaaaggaagtcacttggcgatcaagtccctccatgggccagttcatctttgggcatgtgaactggtggctctggggtaattcactgcactgcagcaactgagatggcaatatgccgatggacatttcccaggtgtgcccgatggaaacggtcaccaaccagattaatgaaatgagaaggctgagtgcctgggccagtgtgcttatcagtgccagatgtgtgctccttctcagcctgtaatattcatggaaatggaaaatgcttctactatgtgggaaatacatggataaaacagagatcctaaagcggttatgatggaggaaaaaggcacgctctttgaggaagcatctctaagtgaaataactatatcatatggtcagtgttgacactggcattgctgttatttgcat

SEQ ID NO: 443643 - DNA, 541 bp, Homo Sapiens
  misc_feature (52)..(52): n is a, c, g, or t
  misc_feature (517)..(517): n is a, c, g, or t
taacaagccaaagttgtatttttttaaacaggaaaattatgtcaatataaanacagataaaaagacaaaaatcaaaacacacaacacagaaaagcacaacactcaagaccagtgcaaacccttcccaacccacttcccaggttttaaaaccttgattacagatccccaaggattagactgtatcggagaggtcacagtattgaatcagaaaaagaagacatgttttaaaaggtctgtacacaggtagtggtgtgtggggtgggggatgtacacttcatcactccaacatcaaaaaacatgatgcaaaaaggatttcagcgatgaccacagatttctagaaccctaccacgtatgctagcccccctccccatccacttttaaaagttgcttttaaaaaggataaaaagtgcacagacactttcgtaaggcacagacagattgtcacacaagtcgtttcattagggactcggataagacagcgagacagttaaataccgaggaaatgccgggaggccgncatgttcctgagccggtgccccct

SEQ ID NO: 443644 - DNA, 378 bp, Homo Sapiens
  misc_feature (341)..(341): n is a, c, g, or t
  misc_feature (352)..(352): n is a, c, g, or t
ttttttttaacaagccaaagttgtattttttttaaacaggaaaattatgtcaatataaaacagataaaaagacaaaaatcaaaacacacaacacagaaaagcacaacactcaagaccagtgcaaacccttcccaacccacttcccaggttttaaaaccttgattacagatccccaaggattaggactgtatcggagagggtcacagtattgaatcaggaaaaaggaaggacatgttttaaaaggtctgttacacaggtagtgggtgtgtgggggtggggggatgttacactttcattcacttccaacattcaaaaaacatggatggcaaaagggattttcngcgttggaccncaggttttcttagggaaccccttacc

SEQ ID NO: 443645 - DNA, 444 bp, Homo Sapiens
  misc_feature (42)..(42): n is a, c, g, or t
  misc_feature (47)..(47): n is a, c, g, or t
  misc_feature (54)..(54): n is a, c, g, or t
  misc_feature (78)..(78): n is a, c, g, or t
aaaaacaaccccaatttttcaaggaaatctcccgaaatgaangggcnaacaaanaccatgaaaaaaaggggtgttttncaggtgtccccccgtccctcgccccctggaacccctggctgctgtggccccagaagagcaacaccatgggcagtgaagcctggaaacagccgagggctgggtccacgtgaagggggtgcctcagggggctggggccccgcttgagggggtggtgatcacggggcctaggaaggtggtgggacaaggccccaggtcccttcctaactgtggacacccctgaataacaagagagggcccttgggttggagtccagatctctcagacctcagctctgccaggagaatgcgggcagtgagcagatgagcctggaagggaggccgcttctcctcccagggtgtgggcagcggaggggcctggctggggctg

SEQ ID NO: 443646 - DNA, 2251 bp, Homo Sapiens
  misc_feature (56)..(56): n is a, c, g, or t
  misc_feature (240)..(240): n is a, c, g, or t
ttatgaagttcattattatatatttgtactctgtacgtgtgtatatttgaagtcgnagtgtatttataaataggttagctgtgtattgagtaggagtctctgcttgcatcagcgtgcgcgcgacgatcgaataagtggataatagattgttgctctgttctgagatttatcttgtctgtagtacgcataggcgtcgagcggtcggtataccctcgctcacacagagacgatagaaagagnacactaattcacagtttgttttaattattaatatattctccgcatgtctgactccatcgatactttagttattgatcaattacgtctacgattggacgtgttttctttcgtctctcaggtgtcaagtttgatgtaataaattagttgtctttgagatatacaatcgttgtacttcgagaatattctatttacttggttagttgtcttcacgcagcattccaagtttaattagttatctttgttatatgactcctcaccattcactagctactaatttaatattcatcatcacgcgagtggtcaaggcggcctatatataccataaatcttaattatttgtgtgagattaaggtgctatttactgacggttcagggtattatatttagtggtgctatgtttggaggatattttttattgtttatatcccacacattaaattgatatttattttatgttataaagaaatggtgtagcgatgagaggatgcaagtcgtggttatctagtataaatgacagttggtctggtatttttgttgtgattttcccaacccttgcactattgtcctaattggcatgttttctttcactttaaaactataatcatgatggtaagacgatttaatttttcttttttagctcgaccaacgggcggattaaagtgttttttttcctgtcattacaggttggtcctcactgaagaatcattgatctttttttgcaaactttcgtaatcctaccatagcttgtcaacctggcgttcctgctctggaacattgtaaaaccaccgtgctgcaggttaggatcatcaggactgcaatggaagaggaccccaagttacctctttacagtggctgggtgtggaggaaagcaattatattaattttagagaatggagatgctgcaaacacaaggcacaattctttggagtacaatccaaagaattctagaagggagggaaggaggtattcagatacattgtgccagtgaagaggaaaaattgagcaaagtgaacagagtgtcattctagaaataggactaagtatatttacataaattccttattctataatcatgataaacaaaacacaaaacattcacacaaaaatataaatttgaaataattaatagcaccagtgtgtcagataatagtttctttccccccaccccgcccctgctacgcaaagtacaaagttgccatagtgttaaaggctatatatgaatctcaaaggtgggttggtaggaggaagggggtgtgtggcagggaactgtcacactgtggtcttaaaaccacagagctgaggatcaaaagttgagaagcccactaggaaactccacgtaagggtcttccctctacacttagagggaaggtttagagtggatttaaatcacaaagtgcaggaactcgatagcgttggcagctgtgtgaaatactgagtgcaagtatttgccaccaggatttggcaaacaatgttttttgagggattctggaagatggaaacatcagaagaaaactggagctaagggtcaaatgtctcatctctccaacagaagaacaaatggatacacgggattctgacagtacaagctgccatctaagttttatccctttgctagaaaagactaggacgaggaggcttgtttttcttctgttttgtcaagaccttagggattaactgttctctgccagatacttaacactagttccagactaactaataaaaaagctgtaagaattagtttgattttgaaaacaaactttagtggttatcatatccctatttcttctgtgtaagttccatttataagaatatcaaagatgtcttttggtctattggtgagtgcagctgcccatccagatttaaattatcagctgcccaagatctgaaaaaaagttcatcttcctagtcattattaatatactagaaaaatcttcagccatgcggacgcgtgggtcgacgatatcccggaaattccggaccgtacagcctgcttttcatcgacgttcatagt

SEQ ID NO: 443647 - DNA, 224 bp, Homo Sapiens
  misc_feature (157)..(157): n is a, c, g, or t
ggcacgaggcagatgtttggcattgttgtagcagggctactgccagtgtgggggaaaatgctataaatccacttctttgattgccatggatttgaaagaaccatttgcccaacagcatgattcgcctctgaaagtctaaaaataattttcaattttnccatgaaggtgtgtggagggtagacacacagcctacgcataggtctgcatgacatgtttttcctttt

SEQ ID NO: 443648 - DNA, 1377 bp, Homo Sapiens
  misc_feature (54)..(54): n is a, c, g, or t
  misc_feature (85)..(85): n is a, c, g, or t
  misc_feature (313)..(323): n is a, c, g, or t
  misc_feature (1275)..(1275): n is a, c, g, or t
  misc_feature (1282)..(1282): n is a, c, g, or t
  misc_feature (1345)..(1345): n is a, c, g, or t
gtgttcctgttccccgtccaattccttcttaggctgctagagacagccagtggncaagccttcccctgtgctccaggcaggcctnggctgcagctactgttacctttttacagcctttgatctgatcgctgcagagttcttttgtttttaaatcacttgtatttgtctcttcattaaggcttcaagtttatttcttgaaaaagtttagtcaattgaaccaccctccaggaagattcccagcgtggaaactgcccctgaaaaacaaggcagcccaaagccagctctcttttgtcccccactgatgtcatgtccnnnnnnnnnnncatttcaggccagtttcttaacttgggggcaaagagaatgtgttgctaaagctaccaagaaaactgcttgattaacaaattcttaatagaaatgcctcccacactgtctctttgaaaagagaaggcaccttggaatcggcattccaaaaccaagctccttgtcatcctcatccctcctccttcttgcttcctattatcaaactcgtgtgtgtttcttgttttctcagaactgaacacagcctcctaattccatcctcttgactagggcttacaatactgagagcgattacaggctgtaataagttaaaggtccctgagcgtggctttcttgttctgcgcctctaattaattcttctattaaaagatgctttccttctcactgcagcttacagaaaggctacaagctttaatcacagatcatttcatttgccagagcctttccttttctaactcctttaggaaataagatttccctctctgtttggaatctctggatacaggactctcctccaagctcatgggcttgattgggctttgctgtgcacacacacatcagtttgccttaaacttggagctatggggagtcccagattttccagcttagtgggtgaagtttagctgtcacctacatccaggaagtgggggaaaagggaaaaaaagaggatattcaccaccatgttcccatccggtctttcccctgccttgctttgtgcagcaggtgggcagacagagcccacagaaacagaagtagaaagagggccgcaccatctctggggccagcactcctaagtcttagctctttgtgggaatagaaaatcctgagctcccaccacctctcgtctgaccctccatcaactccctcggaacctgtgcaaatgggattgaggcaaaagaaatttgaaagagatgttttttcaccacacaggagacctctttctggccccaagcacancttcatntctgcgtatgtcagaaactcagaatttagctgtacttatgtgttagctccattctctctggtntgttacttagagacacgccagttttttactta

SEQ ID NO: 443649 - DNA, 376 bp, Homo Sapiens
aaaagcccaggggcagggcaacagctgtacctttgcagggtccatcgtgcagaaagctgtgcagaggccccgctggctcatcatcttttagttatgagatgtcccaaatggtaatccactttcagcttggccaccagatgtcgagaaagaccccttcccagggaagcttcacagtaccttggtataaacatgcagcacctgctaccagcaccacggagcggcctggtggtgccgggctccttgctttgctgccacaccatgtggtattcctctccctgcacgtccactagagtgactgctctgaggcacaccagagggtgagcgaccctggatctataggagctatggaattccagccttgtcttctcagtctcct

SEQ ID NO: 443650 - DNA, 396 bp, Homo Sapiens
ggccacttcccctgcttcctaacggttgagtctgtttgctctgggccttttaagcccagcgtgatccctctgagtcctgcggtgcatctgcgccatctccacgcttcctgttgagccccagcccaggcttggtgcgggcagtgctgcactgcactctcctggttgcctcctgagcacctccacccgcttccccaccaggcgtggctgtgttttcacccccagtgtccatctggcacccttctcgattgccaggtagttacggtctgtgtgggcaacacctgagggacccaaccaaaccaaggtccaggacacacttccgggcaggggtaccgcctctggttagctgctcactccccagcccaaatcttccgctgatgacttgctggggtgcagagg

SEQ ID NO: 443651 - DNA, 451 bp, Homo Sapiens
  misc_feature (257)..(295): n is a, c, g, or t
  misc_feature (424)..(424): n is a, c, g, or t
  misc_feature (440)..(440): n is a, c, g, or t
gatggacttttaggttgattccatgtctttgctattgtgaatagtgctgcaatgaacatatacatgtgtgtctttataacagaacaagttatattcctttgggtatctacccagtaatggggctgctgggtcagaaggtatttgtttttcggtctttgaggaagaaccacaccgttttccacaacggttgaactaatttccactttcaccaacagtgtgtaagcattcctttttctctgcaacctcgccagcatctnnnnnnnnnnnnnnnnnnnnnnnnnnnnnnnnnnnnnnnttgccggggctgggagtgcaatggcacgattcttgggctcatcgcagcctctgcctcccgggttcgggtggattctcctgcctcagcctcccaagtagttggggattacagggcatgcaccaccatgcncgggctaatttttgtnatttttaagta

SEQ ID NO: 443652 - DNA, 287 bp, Homo Sapiens
aggtggttggtcccagaggggtctctcagggtgggctggtgtgtgcacaggcctggccatctgtcctctagaggcctgaggagagaggtcacagaggggactgactccagctaggaccttttctcagggtgtcctttttcatccagtttttagacctcatcttcctgggtgttagaaactcgtgaggttggtggagtgtaacaagaacgtcttaaatccttaagatttctccagtgtctgactcttactttgtttcctgtttggggtcttcttgaggcttgtgcttg

SEQ ID NO: 443653 - DNA, 902 bp, Homo Sapiens
  misc_feature (119)..(128): n is a, c, g, or t
tcactcggtattgcatacattatacgcaaagttactgcgatcacgggccaacatccggggcccggagccgtcgcacattccgctctgaacgagccagcggacgtgctgcacaacgcaannnnnnnnnnacaaatggagcttatattgatttttatttcataaataattgaaagagggtagaaaaatctgcccttcatttaaaaattgaatgtttcactatgtatttaaaaagcgattcaggattaggaggatggataaccataccagctgtagctgatgttctaaaatattcttgcattgtttgctggtcttctagggaaaagaataatgtggaacaggaccttaaggagaaggaagatactattaaacagaggacaagtgaggttcaggatcttcaagatgaagttcaaagggagaatactaatctgcaaaaactacaggcccagaaacagcaggtacaggaactccttgatgaactggatgagcagaaagcccagctggaggagcaactcacaggaagtcagaaagaaatgtgctgaggaggcccaactgatctcttctctgaaagctgaattaactagtcaggaatcgcagatctccacttatgaagaagaattggcaaaagctagagaagagctgagccgtctacagcaagaaacagcagaattggaggagagtgtagagtcagggaaggctcagttggaaacctcttcagccagcacctacaagattcaccaacaggacacttcagttcagcaagaaagtagctcctgaactactgccttctggtgtgactgatgacatctgcgtgacctacacctgttacttgcacccagtttgtcctgaactccaccatactcgacctccccccgcgcagatccccttcatgtagactcaactcc

SEQ ID NO: 443654 - DNA, 1108 bp, Homo Sapiens
aactccttcagcgccaagcttgccccccactacttccactccatctcttacaagatcgaggagatctcaccaagcacattaaaaaacagcctcttcccatcgcctattagctccatctctcctgggttacacagctttaccgaccaccagaggctgatgaaacgccggaagtccgtttaggggaactaactgcacattcaagagaggcgtccgtggatgctgggtctcactgccaaagccgaacacggcttcgggatttcttgccttctcaagtggacctcttgctgtgctgggcgaatgcctctactcattcccctacacaactgtggggatggtccagctacacatagacaggaagcccagagaaacgctcgatgtgagggtccccgcaagcccgtcggtctttttcggcacctggcccccccaaagctcctcaacgaggagtagagactgccaagcccttccactcattcatcatcataaaaatgtaacttgctatggcagcctcttggccattaagggctatactttgtgacctctgtccttgagatctttgctctgacaagttctatagccttctcagtgctgctatcgtgacgcagtgtccctgctgtggctaagtaacctttcgttttgatcaagatttgtccacgcagactcctacctctgcgcctttgcccgtgccgttcccactacctggaaggtctccccgttgctctccagctttgaggtggagacagagcatctcacacttccttttggtgtctcctgacccttttgctccctgctggacttggcgatgtcctcttctgggctcccctagtccttgttttggttgtgagcgaccgcaccagggagcaaaccttctatggccccggccacaggagcagcaagcactgggcagtgccccagacggaaggaccatcgcgagaataaaggcactgagatgtctggcatcttggcccaaatggccacttatcaccgtgattgaggcacgtcttaacttgctgaagtggaaacagggtaactcaatgcacgcctctgcaccatccctggaaaccaatccagatctatgagaagaaaactggtcatcatagcactggtgatt

SEQ ID NO: 443655 - DNA, 1014 bp, Homo Sapiens
gtgcgcggcgggcgcgcgcaggctccgtaaccgaaccctgagccgcctgcgcggatcggcgtccgcagcgggcggctgctgagctgccttgaggtgcagtgttggggatccagagccatgtcggacctgctactactgggcctgattgggggcctgactctcttactgctgctgacgctgctggcctttgccgggtactcagggctactggctggggtggaagtgagtgctgggtcaccccccatccgcaacgtcactgtggcctacaagttccacatggggctctatggtgagactgggcggcttttcactgagagctgcagcatctctcccaagctccgctccatcgctgtctactatgacaacccccacatggtgccccctgataagtgccgatgtgccgtgggcagcatcctgagtgaaggtgaggaatcgccctcccctgagctcatcgacctctaccagaaatttggcttcaaggtgttctccttcccggcacccagccatgtggtgacagccaccttcccctacaccaccattctgtccatctggctggctacccgccgtgtccatcctgccttggacacctacatcaaggagcggaagctgtgtgcctatcctcggctggagatctaccaggaagaccagatccatttcatgtgcccactggcacggcagggagacttctatgtgcctgagatgaaggagacagagtggaaatggcgggggcttgtggaggccattgacacccaggtggatggcacaggagctgacacaatgagtgacacgagttctgtaagcttggaagtgagccctggcagcccgggagacttcagctgccacactgtcacctggggcgagcagccgtggctgggatgaacggtgacacccgcagcgagcacagctaccgcgagtcaggtgccagcgggctcctcttttgaggaactgggacttggagggccgagggggccccttaggggaagtcacgggctgggacccctggggactgaaacc

SEQ ID NO: 443656 - DNA, 1312 bp, Homo Sapiens
  misc_feature (269)..(269): n is a, c, g, or t
  misc_feature (283)..(292): n is a, c, g, or t
tgggaactcccgggttgaagagttccccggtgaaggggccttcaagacttccccttctggaatttgtttcaagaacccttcgggtttcccgcccgggcggtttttttattgggggaggaattccaagccacttagttcatggcccggaatcttccttgggaaacaggttaagaacccatgttccacttaacctagtggggcccgggcggccaaaccgaaatggtttaggaaagttttttcgagggccggagggcggccgaacagggttntttttaggtgggtnnnnnnnnnngtgaaacaagtaaatcattggctttattctgggtcctggaagctccactgtgagtctgaaaaaaagacacaacaggggcggcagccctgggggctggtgcagaaaatagtccctggctcctctggccctgggagcctaaagggcagtgaggagaaggcttagcaagaggcctggagcaggggaagtcaggtccctcaggaacccctcctcccccagaggaaggaggaagagggctggagagtctgctggagagtctgctcagttcctcagcaactgcactgcaggagggtgcaggccatgggttactccttgcccttctcaggggcagtgggctcccagagccacttggtagtccccaggggctcagtcccagggtccagccgtgactcccctaagggcccctcgccctccaagtccagctcctcaaaagaggagccgctggcacctgactcgctgtagctgtgctcgctgcgggtgtcaccgtcatcccagccacggctgctcgccccaggtgacagtgtggcagctgaagtctccccggctgccagggctcacttccaagcttacagaactcgtgtcactcattgtgtcagctcctgtgccatccacctgggtgtcaatggcctccacaagcccccgccatttccactctgtctccttcatctcaggcacatagaagtctccctgccgtgccagtgggcacatgaaatggatctggtcttcctggtagatctccagccgaggataggcacacagcttccgctccttgatgtaggtgtccaaggcaggatggacacggcgggtagccagccagatggacagaatggtggtgtaggggaaggtggctgtcaccacatggctgggtgccgggaaggagaacaccttgaagccaaatttctggtagaggtcgatgagctcaggggagggcgattcctcaccttcactcaggatgctgcccacggcacatcggcacttatcagggggcacctcagcagccgcccgctgcggacgccgatccgc

SEQ ID NO: 443657 - DNA, 749 bp, Homo Sapiens
  misc_feature (530)..(530): n is a, c, g, or t
aatctcacccccctggtggacttggcaggagctggagatgtcagggaaccacttccctgagatcaggcctggctccttccatggcctgagctccctcaagaagctctgggtcatgaactcacaggtcagcctgattgagcggaatgcttttgacgggctggcattcacttgtgaactcaactggcccacaataacctctcttctttgccccatgacctctttaccccgctgaggtacctggtggagttgcatctacaccacaacccttggaactgtgattgtgacattctgtggctagcctggtggcttcgagagtatatacccaccaattccacctgctgtggccgctgtcatgctcccatgcacatgcgaggccgctacctcgtggaggtggaccaggcctccttccagtgctctgcccccttcatcatggacgcacctcgagacctcaacatttctgagggtcggatggcggaacttaagtgtcggactccccctatgtcctccgtgaagtgggttgctgcccaatngggacagtgctcagccacgcctcccgccacccaaggatctctgtcctcaacgacggcaccttgaacttttcccacgtgctgctttcagacactggggtgtacacatgcatggtgaccaatgttgcaggcaactccaacgcctcggcctacctcaatgtgagcacggttgagcttaacacctccaactacagcttcttcaccacagtaacagtggagaca

SEQ ID NO: 443658 - DNA, 609 bp, Homo Sapiens
tttttttcaggtgtggaaaaaatacatttattttcttttaaccaaaatagatgagaatgagtctctatcctgctacctggtttgttgttattatggtttgttcccctctccagaatcacgaaaaggtcctggggtctcacacagtgcaaaacattgaggtgagccctctaagccttggtctgcacaggttctgctcatacatgctcttaagcttgcaaattcagaaagtgttggtctgtgtgccccaggtacaagagaccttcccagggagccttggtgaccagggcccagcatccctggggactccatgcagccttttccctaggaagttctatcatctccaggtgctttgccacaatcagggcaggagtctcaccgctcataggccccgtggactttttttgtcccctacttatcttttggaaaactacccccctttttctctccccttcttcctccgggaccctgggcctaattgcagttcactagagctttcaccatagggtccagaagcacagctattctcatgcagtcctgctgtccaccctacaaaagcaactaaggcaaggaaatgcaaagaattcaggtatgttcttggactaagttgtt

SEQ ID NO: 443659 - DNA, 318 bp, Homo Sapiens
agaaagtcattagaatgggtaagggtgttggtgtggttttccttcaaaatgataatatcgaagcaagaaccagcattttatattgataatttttttaatatttctacccagttgaggacagtggaatataagtagatatatttaaaatatctagatatttaaaaagaaagaaaaggttgtttatcccaatctgaattcattctcagcaacaagacagaaaaggtggtttgggttttgcttttaaacagtgtccccctgtctttttcaatttttcccttgaagcctttctcttgttcttcagagtacgcgctgcaggct

SEQ ID NO: 443660 - DNA, 974 bp, Homo Sapiens
gagccgtcggcgcattggcacgcgtttttttagtctcgcaggttcaggggttttgtttttcttgcccttgtagaatttcttttagggcaggttgtacgggtttattgttccaataccacaagagacatacagaagcagtgctttctctgggcagcctcatggaccagatcagtgtcaaactgtacccttgagtgtccccaaaggttccagcagagggaagaagaggactggacatgtttgggcccctgttcccggtctttggtaaacagacgcttaagttgacaacttggacttggccaatactgcattctaaatcaccacatcattcccaacttgtcactcatgcttcagatgacgaaaatgccacatcagattaaatgagaaaaaaacctttcagataaaatgagacttgaagtcatacaaattttatacttgatctaaattaagcaagaaccctcaactctgtaataagtcgaaatacaagatataaggcaggaaacaaggcaagggaaaacacacacaggggcatctacttgctggaaacatgttgggagagaggcaggagcaggcatggctttgtttcttcccaaacctgcctgatgtcaaaagtacgtcaaaaggagcctcacagtcccaggagagcatggtcccaggtattgctgtgacaggtggtgaccctggagccagatctggaaggccttcctgggggctgcccagggaactcacccatgaatccagaagcacttaacactggtggtggtgatttgtcacatatggcagcaagcagccattaaggctgtaggaggagagatgtgaaaagcaagatgcgtttgctcggtggcatgtgggcaggctgactgtggctctgcaggctgcagcaggtccagccggtgacccaacagggcatcgggcaacctggcaggtcacaagtcaatcattcaccctcacgtcgagcagcacagcactagtttttt

SEQ ID NO: 443661 - DNA, 617 bp, Homo Sapiens
  misc_feature (43)..(43): n is a, c, g, or t
  misc_feature (321)..(321): n is a, c, g, or t
  misc_feature (334)..(334): n is a, c, g, or t
  misc_feature (447)..(447): n is a, c, g, or t
  misc_feature (489)..(489): n is a, c, g, or t
agaaaaattcccaaatttgcttccagcaaacagaaccaaggtnaaaacttgctccgtcaactggcaaatgactcaactgtgaccctgaggtcaagcaggtgcaccagccccctggtgggcaatgccaggagttactttaaccctgtgctggcttctttcctggccatcaactccccaaagtagcagaagaaaagatggcagggagggggtagtggaagactggcatttctacttagttcaggtaggttaactcccttggtggagaatgcaaccttcttgcttcagtttcaagtccctctgggagtcaggcagtccccccancccccgcaactcncactccgtgccacatcaggctctgtcttgcaggagagctcaggctggctggccttgggcagcccaatgggttatacccaggaaacccctccagcaagaccagaagggtcgccnagtgacagagggctttagcagtgtaaattttgggggaaggcnagagtgctcctgcctaaagagtattatatcaatgatattctgtatacagatttaagatcaatcattatcaaaatacacacactaaatatacaatgtttcccatggccataatttattatctcaccagc

SEQ ID NO: 443662 - DNA, 422 bp, Homo Sapiens
  misc_feature (365)..(365): n is a, c, g, or t
tcacagtcagagtggacttttattaggaaatcaccctgcaaacacaccacggagtcttgtgggttcaacgcgcttcctgaggaaggagggtcacagtattggagctgtcggagggacgggtggcacagcctgtgagcctggcggtgactcgaggctgcctgcggccagcactccctcacagcaacaggactccaccgcaagagccgacacgcaaacgcgacacgagaaacacgcccaagcacacacatctgcgctacacttaaataataataaatacagaattccatttgctgttatccgtgcctgaaacaaaagggaacccaaaatgggaaaaagaaaaccaaaatgtctttctctccattagnccaagggaaaacaaaatccccaaattatcaaaattcctcagttacaaaatacttttt

SEQ ID NO: 443663 - DNA, 376 bp, Homo Sapiens
  misc_feature (23)..(23): n is a, c, g, or t
  misc_feature (73)..(73): n is a, c, g, or t
  misc_feature (109)..(195): n is a, c, g, or t
  misc_feature (325)..(325): n is a, c, g, or t
tatcctatgaataattgggctantcctttcatatgcccaagggccattttatagctctatatttcttttgtgntctgtttggggcttgaagtctctacttctgtatcgnnnnnnnnnnnnnnnnnnnnnnnnnnnnnnnnnnnnnnnnnnnnnnnnnnnnnnnnnnnnnnnnnnnnnnnnnnnnnnnnnnnnnnnttttcggtgtgtatcttgtgtgcagcacacagttgagtttttgctatacgagccaatccgaaaataatcttttttaataggcaaattaagccgatctagttttgatataactaccatgtttgatgtcaantctgtcatattttagattgtaattgctgaatgtattatatttactgtgtct

SEQ ID NO: 443664 - DNA, 801 bp, Homo Sapiens
ataccaagctcttaagcgctttgcacggcttatttcctttaatctttgcaacaacccaaagtgtaatagtaagcacagggtttttgcgtgatacccggtagccttattaagaattagctcttattttcatcaaaggtagagaaaatgagtaactattgaggcccccgctggctccctacggaggcccccgctttcagccctaggcgcctctgtcttgtagggctgtataggacagtccggtcagcagttacctcaagctgagctgggcttgtaggttggggagggtggtgggtgggagaaaagttgatggggaacgcagcggttcccaccccctgaaacaccggcaatgctggccgtgggaattattagacagtccctaaaaccacgtgatcgctgctcctccgcctccctctcattttgggcccagtgttagctccgcaggcgttcgcccggactcacacttggctcgcacgggctacgcggcacgtactgagcagctggcggggcagggtctccgccgtcactgtgaaggccgtggggagcatccttagtgccctgatcaaagatggcggaagacaacccaccagctggaccaatcagaaggcaagctgggcgtggccccttgggaaagctcacgctagagagccgaggaggatttctgcgcatgcgccctatctattggcgtgaaacggctgctgggtccgggtccctgacgccgtctgagtttgggcctcttgagtgagaggcagcgaggagcctagcggtgggcattgaatttcactccctgcgcactgaacgttg

SEQ ID NO: 443665 - DNA, 1104 bp, Homo Sapiens
  misc_feature (614)..(625): n is a, c, g, or t
  misc_feature (1023)..(1023): n is a, c, g, or t
  misc_feature (1043)..(1043): n is a, c, g, or t
  misc_feature (1053)..(1053): n is a, c, g, or t
  misc_feature (1084)..(1084): n is a, c, g, or t
  misc_feature (1091)..(1091): n is a, c, g, or t
gaaagacctcaaagtgtggacggtactaccagcgtggagaaagcccaggagccaggactcttccacccactatctaggttatgttgagtgacattcctccctggcttcaggtttctctaaagccagaggaaaagtaaaccagacaagccctcccatctattttgtctgaaacaagatggagtgaatgctccctactgagagggtctggatttcacccatgaattgcactaggaactgggagctcctttttgaacacaagtcccaagaggcagttgtgataaagtctctcttttggtgtccgctgtctgtaaatgaaacaatgcaaattggtgtatgttaaatgtgtcacagcttgcaggcaagaggttttgtttattctctaaggacttgctgactcgagggagcatcaaagatgagctttctgtctgtcttggcaagtgtgaaaataaagggagtcagtcacctccccaaaggtcatgtgaatcagaattcaggagaaagttggaggaaacaatggcagattccaagaagagatgcttgtttctccatttgagaaagccttactgaaagctactgaataaagagcacaatttccagttatttctttctttgcnnnnnnnnnnnnctggtcactataacagcacttccagtatatgttgatagtagcttgtaattattcctaataccccagaaagaagagagtcgtgatctttggtgattgtgagggattagattaacagtcgcgggggaccggctacctgcgacagcctttaaatggctaatgagggatgctgagtgctgagcggtgcctgcttttgatgtggcccacccatgaccaggggagagagggcaggaagagagcagctgcaggatccacaagtctctaacccttctgccccaggaaacataaaaccctaggattcttgttctttttccctcttccttaaagtaggactgacgtccccagtaattgttttttcttaacaaggccctgttgtttctccccgggggaaagacctaggnttgggccaagaaaggttccngttcagttcngggtgggagagtttgcacaagccattgggtntttcaanttttttccaaggg

SEQ ID NO: 443666 - DNA, 467 bp, Homo Sapiens
  misc_feature (413)..(413): n is a, c, g, or t
  misc_feature (422)..(422): n is a, c, g, or t
tctttttggatatttaaatctggtattttggggggatgtttttgaagaagtagaggctgcagccatgtttcaagttagtatcctaatataaaattacagcagtgggtatactaaagaaatatagctaaaaaatgtttgcatcttggcttgccgaggataataggtccaaatatacttgaccataaattctttagtaagatgaagctgtctctagttgttatcctcacagtgtcaacattgaaccatgacttctgagattcatctttaatgctgaatacgtacttgacttgctttttttcttcagttgaatttctagcatcccttttaccaattcatttattggctcagcttgttaattctaatttgcctttgactgctcagacgtgggcttgaaaagacttgaggcattgttnccgatgttngaggggaatatttgccttttcccgtaaatggaccgcaggtccagg

SEQ ID NO: 443667 - DNA, 464 bp, Homo Sapiens
  misc_feature (58)..(58): n is a, c, g, or t
  misc_feature (70)..(70): n is a, c, g, or t
ctactgtgaaagaaccgtatgctgcactttcgccacaccttgtgctgttttcagtagnaatgggtagtancataagcatcccccccatcatgcacaatccaccacacatcaatgttgcccctcagaaaattgctcccacattgctgggaaagaaggagatgtttttagccaccagcagtgcaagatgggcagcagttgtcactcgaactgtgcccaataaaagtcttcccaagcgcgggcatcttcgctttgacgccagccattaggccagcccatcaccaccgtgttgtgcttcatgcccccaaggccacatgactggatgaggtgggaaatgccctctctcagcttggcggccaccaccagctggcagaatccttttaccttctctgcctccattaggtgctttatggtctgctcagcagctaaagcttcaccgtagttctctaggaagttcctgcccgagg

SEQ ID NO: 443668 - DNA, 1441 bp, Homo Sapiens
  misc_feature (17)..(17): n is a, c, g, or t
  misc_feature (40)..(40): n is a, c, g, or t
  misc_feature (82)..(82): n is a, c, g, or t
gaacttttaaggaaaangcccccaaagatgtgtgggaaangtatgccctgcctaatagtgaccggcctccctacaatgacantaatgaaactggagcctacaaaaataattttgcctgttttaaataatgaaaggagctaggtttttaaaatatattacttattctgcaacagctaattaaattgacaatccaataagaatacaatgaacagattccagccttcccattcctgcaagctgaattccaggttatattttaattacagaatagccttcaaattataaatcctaactgtcccaatagtaaagagaccatcaaggcagtaacatcagatcaattctgtcatcatcctgcatggagcacaagatgtgcttttggataaaggcattaaaaagaccttgggctgatgtggaaagcgggtcagtaaagactccagttctgcacaatggaatcttccaagccaagccgctttccacaaatacaaattcagtctatcttttctttctggaccagtctgggagcatcgacaaaatctttgccattgtaaagaatgataaaaaatgttccaatgcttgcaactccccagaagagcacataggccagtgtttctgtccaagtgtcaccagccataagcaaacagataatgcacattgaaaaggcaacaaccatgataataggcaaagccaggaatttccagtcccttggaacacttaaaggactatgagattctaattcatccactgaatagtttccaagaaataagtctatggaatcttgtctaaatccatcggaaaagttgttcttataatatcgtatcattgagttccagccatccattataagtcccaaatgagttctctttccagttctggtaaagtcagtcttcaaggcaccagttcccgcatattgcttggcacaagcatttgcgttgtcagcccaggcatttttgaaaatcttctcaaattcatcttgttcttcaagcttttgtcccacatgcaaaactcctagtctctgaagttgggcctgaagtgaacgacgagctaacaaactctggatcacattggttctatctagacaatccatgcaattgcttcggaacacgccttcctggtttgccaccacctggccagcagagtccactagaaaataacttaattcatcttgcatttctgctacctgatccaataaaatacttagtcgatcccatctcatatttttacattccttatggaagtcaaaggcaatgtatctcatcattccacttcccaaggaagacaccattgttgcaaatgtctgctcaagtggcttctccgagcccttctggttaatcagattgattataacttgttttccataaataattacttgggaatcaaaatgcctttggaaaccgtccatgtgatttgctactttgctgatctgtggcagtggtttgtaccc

SEQ ID NO: 443669 - DNA, 556 bp, Homo Sapiens
  misc_feature (13)..(13): n is a, c, g, or t
  misc_feature (62)..(62): n is a, c, g, or t
  misc_feature (157)..(157): n is a, c, g, or t
aagttcctgtggncggggggaaagggcccacatttaaccacctcaactgcacaagccacaangtttcactttgggtgtgtaaacgtttaaatagtggcatcgctccaacgttgaaaattatgactggtctcctcaagcacctgccccagaacacaangaaaaatgagtgtctttatttccattatgatctgtgacaaataagtataaattcaaattctctcctggagagttcaggggcctctgagcatacagtcaggtagcacatcccagcttgaaaaccactgagagcaaccgtatttaatttaataaaggagttatgtgtttctgctttagattttagaatttttcctatcaaaaattgtgtctagtccaaagacaggtacttgagtcccaggccttccgccgagcatgtgcctggcacagagtagattctcagcgatacgggatggcggcttcctgagcgctgcgcgggagagctcgtcatctgtgacgcgccctggagctagcggtgatcgttgtgaagttctggggtcaggcatttcggaagattaaatct

SEQ ID NO: 443670 - DNA, 477 bp, Homo Sapiens
ataactcaattcaattaagccagaaaatctgagtgaacacctttcaaggcgtcccatctttacattattctccagatccagcttactgcacgtatgcctcctaaatgtctctcaaagtcaacatcattatctcttacctggaccactttagcagctccctgaatggtctccctgctgtcttgttgccccatccagtccatttcctttcttttggccgtagtttcatctttcaaataaaactatgaggtttccatcttagcctcccacccccaactctatgggtcccttctggccgtatctcctccacgccctccacagccaccataacctgtcaccctctccagcctatgctttcattcccaacacacatgtgcttccagtggctttgctcagcttggtcccttggccagaaatgaatttctcccttctcttccttgactacaaaatgctaattcatcctgcaagatccaactcaca

SEQ ID NO: 443671 - DNA, 463 bp, Homo Sapiens
  misc_feature (307)..(316): n is a, c, g, or t
  misc_feature (354)..(354): n is a, c, g, or t
gctgagtgaaaccatttattttagaactacctgaactctacaaattccagtcagtgtgcagaacaacacagccagctctacattcagtcaaccattcatgttaacaacgatgagaataccaaaaagtgaatgttctataaccaggccaaatttgcattaggcgtcctctcttccaaacttcagaaaatcaggcgattctccacctaataaatagtagtgctcatggaacagtgaatgacaagaaaaaagggatgagtcctaaataatccacagctgctgttatggtagaaccagctctgcaggaaannnnnnnnnnaaaaggcaaaatttcttaggggaaatcatgcatttcantgttggttaatttcccgcaaatacgaagtttgacaaaagaaaaatatttagctagacttacatggcaaagaggaaggtaaactcattttcttgagatcgtgcctattcc

SEQ ID NO: 443672 - DNA, 2088 bp, Homo Sapiens
  misc_feature (1221)..(1221): n is a, c, g, or t
attttcaagtagaaggtagagaatgtaggacaaaaggtgactggaggatcccgattttaggtgacttggcaaagtcatccaattagcaggtgcaagagtaataatatggaaccccaagattttcctgtctaaaaatgctggaagattaagtatattcaagattaaggggaagaaaatctaattatactttagatcatttcataccagaaaacagctatagaaactagtttttcagttttcaaaactcaattaagtgtgtgaatggtccgttggtgtccagctttaacacctgcctgttcccataagtgccatgttccactacaaccctagcttcagcacacttgctattagcagctacttctttttcacatagagtcacaaattgagagtaaagttcaaacccttcttcttttccagagttagagtgatattgcatgtttcttccttttagtcttcctccaagggtagcttgagggataataagaatgttgccaggtagatccaatatagagacatgcttgccattttctgtctcacttaatttcacatttaacagtgtattaaccattttgggaagaagttctttatcagctcccttgaaaaagcacacgtagatcaccagtcctctttggacctccacccactgggccgcgacgtccccatcggctgggcgaatttgcagccgggcgtgcaggcactgctgtaggagcgcccgggcctgaggaatccagctaccctcagccatggcttaagccagcgccgcggccggacggttactaggccatgtgtcgctggcccctccctcgacgcgctggccgaaaactgaagttttctaaatgactttttcctcaatcattaaaaaaactcttacaagttttaaatataaaagctgtaaatataaaaactattccatgacttatggcaggtgactagtatctttaaactagagatatctttaatagaaatccatctcaactcaaggtcaatcaactcattacttcccaaagtccctgtagggtgaatccatccttcaatttctctattgcaagccccagttcttctgaaaatacaggttcacgatcttgttgcttattgccatcagcaaaataagccacaaaagcatccgtgtgaccatcagagtctatttctacatcatcttgaatttgttcgactgtcagagcttcgagcggctggggcttttcttccatctcataatcgacntccaaatatgggactggcagaatagactttgtgaagtgaattgatttccttaactgattcttgtagtttttccacaggatctattttaaagccaagaacatatccaccactctgctgagagctttctatgacaagagctaaaccaaattttgaatctctaatctttattgaacgaatttgcagatatggtatactgacattaaaactatcattcatatttgcatgccacacaattctcacattggtaataaaaaaggttcctaaattgccctgatcactggataaattccaaactccatttattttatcatatacatgttcttgtggcaacagtcttagttgcttgttctgaattagtgcacttcttaatttaaaatcacgatacattttagaagtttcataagctctgtgtactgccatcacagaagtaaaaagtctagggcttccaggaaccaaatttgtaaatataaattcaaaacgagtactgttacattttgttagtatatagagagcttcagtttggcctcgtaatttagagttagcagtccttgttgtaatattcaatatgcaattgtaaccgacagaaacattgactcttgataatgccaaagagtgccagagaattcttaaatttgttaccaagagtctacctctatctccattatttcctttggtgtcttcaatggaatctaaacaatcaataaggacttctccaggtcttgttttcatttgctgcgcggacaggtcgaaacggacatcccgatcctcccaaagcgcatccagcaccgacatggtgaacaaggcccgtggcaggatctctccacagccgtgcaggcctagctgcgtctctctgatcccgggaattcc

SEQ ID NO: 443673 - DNA, 846 bp, Homo Sapiens
tggggtgttccaggcctttaaacaccgggccggttcccaataaggcgccatggttcccaatacaacccctagccttcagcaacacttgctatttagcagctacttcttgttttcacataggagtcccaaattgagagtaaagttcaaaccccttcttccagagttagagtgatattgcatgtttcttccttttagtcttccctccaagggtagcttgagggataaataagaatgttgcccaggtagatccaatatagagaacatgcttgccattttctgtctcacttaatttcacatttaacagtgtattaaccattttgggaagaagttctttatcagctcccttgaaaaagcacacgtagatcaccagtcctctttggacctgtggtccccccaagaagggagacacgctcttcctctcgggtgctacaactggcgctggggaacggtgatgctggaccgaaaagacaagcgcagccaggcaggccaccgcggccagcttcaagctgacccggtatccccgcggccggaccgccggtctcagagggagacacagagcggacgagtcaccgagacaacgcggaaaaaaccgccccgcacgccggaggataacgagagctgccgggctgacgttacctccacccactgggccgcgacgtccccatcggctgggcgaatttgcagccgggcgtgcaggcactgctgtaggagcgcccgggcctgaggaatccggctaccctcagccatggcttaagccacgccgcggccggacagttactaggccatgtgtcgctggcccctccctcgacgcgctggcggggcagacgaggcggggcacaacccgct

SEQ ID NO: 443674 - DNA, 394 bp, Homo Sapiens
acgtcatcatcacagttaatgagcatttatgccacatgtggtagtcagcactttgcatccatcatttcgttactcctaactttaaggaggagtacttttcccctgttatttaggtatggaaaagacttgccctcaatctgaaaacgctcttaaccctctgatgccactgtggtggggcctcaggctaagacaataaacaggctcaagaggaggccctggaggagtcagagtggaaagaccaacaaaaagaaaggctggttactgatagaagcagagaaatatgaagtgccccaacaaccccttagtggagtggtctgggcaagttatatagcctctctgggtctcaaaggcctcatttataaaatgaggagaataaccccttcccctcgtgcca

SEQ ID NO: 443675 - DNA, 1579 bp, Homo Sapiens
  misc_feature (273)..(273): n is a, c, g, or t
cagaaagatccaagcaagatacgcaggagaagaactgggccagcaggggaactgagaggctccacgttggtgctgggctccaatcttgaggcatccttagggaagctacagtcccagccatcaacttctacctgttccccttcacctgctctctgggtaagctgggccacagtaggaagtactggagggtctctggtctgaaggaagtagatcactaacaacgtcaaggcgtagttattgagaagggggccacctcctgacagcccattatgntgagcccagcagcgtaaggtatacacaaggggccggactcgaccatccatctcagagcagagattcaggaaacgtgaattatataaggccaaccggttactgagggatacatctccatgaagacctgaaggccgatgacagaacttgaccacagggcgccgggcagagggcacagtttggactcggtacaccccagggacacagccccggagaatggatcccaccagctccagcattgctgccccctctgctttctcctcctttggggtctctgctagttccgaggccttccccaggtccccctcttccctgtcctctagcagtggtgaagctggaggcagagactggggagaagcaagggtctcggaggccaaggcagagtccggagtttggggcgccagggaggaggaaggggtttcaaagtccagggcttcagaatcctggggagaagcaggaggttgtgaatctggaggggaagctggggtgcaggccagggcttgagggtccagtggggaagccagggccgagtccagcgatggagattctggagcctttgggactggctggggctcttccaagtcacccagatccaagaagaggtcaagatcacagccatggacatcgaagctatttatggaagagccaaaagggtggaccacacagccagggaagaactctgtgaagacctcctgcatcagggccaccactaggctgcgaagctgccgctcggcctcggacaactccctcagccccacaagctttatcatttgtgcccccacgtctgcagcctcagctagcgctttggccagctggtgactgtcgggggccgctcctttgggggatttggaggccgggctctggaactccttctgctcccgtgggcggacacgcaggcgatgtcctcccaggctgtgctgggactgtgacaagacagcctctcgagcacccacgtcccccatctccacaatggcaaacactcccttgtccttgtccatgacaacactggccacaggtccaaatgctaggaagtactcagagagctgagcagaatccacatccctgggaaagccactgacaaacacacttcgaagtcctgggcctttctcgcagctcgtagttctaccaggtgccggtgctttctgcctcccaagtgggcatcaaggctgggtcggttggctgtagtaacgtggcagaggcagcagcggaaccccccacgcggcagcgcattcgacatccgaatccaccgccgccatagcgactctccgacgcgcggtcgacgatatcccagtacgtccggaccgtacca

SEQ ID NO: 443676 - DNA, 902 bp, Homo Sapiens
  misc_feature (65)..(65): n is a, c, g, or t
gcaaagcattctttctcagagcatttagaggcatgcgtggcattttttcagtgggtgtgagattncacaatacccaggctcccttctactgtggggaagggcctgcatgttggctgttttttaaacttctagttcaatttccttccataatgctactgattttctggcatacagccgaattccatcttttaagcatgctttctacggtgggcttttcaaaacaggtttgagttttgtatgcacacgtttactacctctaactcctacatcagctagtgtggaagagggtgcacctcaaagcttttacacgtaaggacagcggcttggaatgtgagagccttttctccaagcagacccacactctgcatctcagtggcagctcccacaacgtgactgcaatgtctcttatacagtattccttggtgttttcttagtgtctggatgttcttacgtgaaatctgctccccagccctggtccttggcattttctgcttgaagctgggctgattttcttgtaatttacagcaggacgctttcagcagcagtctcttgggattttatctaagatgtttgaggatgagagggcaagaactataaacactcattaattctagtagtctccccatggccagacaatggcgattgttatttaatgagcttttcctttcaatggaattcagctctcacattagtatgatttcatttgatgtttcaaatagcaaagatgctaggtgcggtggctcccgcctgtaatctcagcactttgaggagggccaaggtgggaggattgcttgagctcaggacttcaagaccagcctgggtaaacatggcgagaccctgtctctaccaaaacaacaaaaaaaagacagactgctttgatcaaccctaaatgcaaaagcagc

SEQ ID NO: 443677 - DNA, 1005 bp, Homo Sapiens
  misc_feature (378)..(499): n is a, c, g, or t
  misc_feature (689)..(836): n is a, c, g, or t
ggtgatgcttatagtgtgccgaacgcgttgaactacacctctgtatgttcgccctgttttttagacaatcgttcacatgagtactcgcactataaatgtgtaccaccgaacgcccgatctgtgctaattttgggtaccagaatagccaaaaagggtgattcagttcacaagcttccaagagggatatcttggctattgaatgagtccatattgagaaattcacctgtcatttatggttggtccaagggatttttttcaagggtaattttacctgcttcattgttcatttaagggtacacatctgaactttggaactaacgcttgcatgggtttgtgcctccaaagcagtcaacactgaagtcttggctgggctcagtnnnnnnnnnnnnnnnnnnnnnnnnnnnnnnnnnnnnnnnnnnnnnnnnnnnnnnnnnnnnnnnnnnnnnnnnnnnnnnnnnnnnnnnnnnnnnnnnnnnnnnnnnnnnnnnnnnnnnnnnnntaatataaaggaaataatctctctgcataagcaacagacgtcagaccccactaaggtgttgaaggacccattttaatgaatagttaagaatggtttgtatgttatactctgcttttttatgttttgacttttaaacaaagaaaaataggctgcttttgcatttagggttgatcaaagcagtctgtctttnnnnnnnnnnnnnnnnnnnnnnnnnnnnnnnnnnnnnnnnnnnnnnnnnnnnnnnnnnnnnnnnnnnnnnnnnnnnnnnnnnnnnnnnnnnnnnnnnnnnnnnnnnnnnnnnnnnnnnnnnnnnnnnnnnnnnnnnnnnnnnnnnnnngaaacatcaaatgaaatcatactaatgtgagagctgaattccattgaaaggaaaagctcattaaataacaatcgccattgtctggccatggggagactactagaattaatgagtgtttatagttcttgccctctcatcctcgaaacatgccctcgtgccgattaacacg

SEQ ID NO: 443678 - DNA, 657 bp, Homo Sapiens
cgaaacaaaagctcaggttggtgccaagagcaagaggctcatccgtggatgggtccccacctcccaccgagccacccatgatcagctcccttttaaataactgattaagaactgaatgacaaaatgcactaatgctgcttttaatggcggcgcaatagagaagtacaaggttttactagcttgagctactagaaggtgtaaaagatgcccgctgacactaccaagtagcctcttaatagaaatgtagaaaatatacaggacagggtggagatgagctcttgaatttagtagggtgaaagagttaactgccaacccggcactatcattgtacttgtttggagaaaatctgttttgttctggtgatgatggttttatcttcccttttagttgggtgggaagtaacagaaaatttgtttccccaaaagtttgacattttcttgttaatacacgtttcatttcagtacgatgccaactgttaagcctgcaggaatcctcctgggtatttctgaattgtgctgtgtgcatgtgtgtttgaaagctcaaacagcttgtcttcttacagcatcgagttgtttgctttattgttagacacaatattagcagtgtatcctttccgtattccctaccatcgaacccattaagatctaaaatccttcc

SEQ ID NO: 443679 - DNA, 417 bp, Homo Sapiens
aaggggatccagccaagaaacatttgcaaagatcttgaggcataaatgagcttgagacatctggagtaactgaggaaaagtgagagagtaggcagggcctggagccgcagagccattgctaaccatcctgtgtgagatatccccccattctgtagctttattctcataaccctgctcaattttctttataacacttctcacagatttatatacgtgtttgtttttgttatctgtctctcccaccagaccacagctccatgagagcaaggtctttgcttaccaatatatcactagcacttaaaactatgcgtggtacacagtaggttcttaatatgtgttgaatatagccatcaaattgatattggatataattcaatctgataagatattttgagatattaaagagtttttaacttg

SEQ ID NO: 443680 - DNA, 555 bp, Homo Sapiens
  misc_feature (293)..(320): n is a, c, g, or t
aggcagaatcaacccatgcttttattttcattgcatataaaaatttcatatgaaggtattgatgtacagtactatccccgtgggctgtaagagaggctaagaaaccactaaaagaataatcatttgtaattctcacacacaatttaccactctgaaaatatatccaaagaaataaaaacaactcaaatcagttaaggatgtttttgtaattatagtgtcccctttgtactgtttaaaacaaaagtaatcaaattcctttgggccagggctgctaaaatctacagtttgtgtcnnnnnnnnnnnnnnnnnnnnnnnnnnnnggctcatttttcctagaaaaagaatctttcctttcactgaaaagccacatgattcaagggctgggcaagtactgggaggatgtttccatataatccattataaatgtttcctgctttaggggctggccattgtacaaggtgaaattttaaaattctaaagcaatgaaagttttgcagaaacaaatcttagaggatagtgaatgctttctgctatgtaaactgacatcaacccacc

SEQ ID NO: 443681 - DNA, 912 bp, Homo Sapiens
  misc_feature (51)..(101): n is a, c, g, or t
  misc_feature (407)..(407): n is a, c, g, or t
ccccaatgggtcgttcatagggaggagaaggaaagcttgttaaaggccaannnnnnnnnnnnnnnnnnnnnnnnnnnnnnnnnnnnnnnnnnnnnnnnnnnctggttggtgccccccggtggagggtcccttccaagattgtcttgaggttcccgtggttctgggggctgtccacccggaagacggttctctgttttctctaagcccaaggaggctttgttagagggaaacctctgattttctcttccttttcctgcggaaatttccattgtcgaacattttctcgcagttggggtccagggtccagtaattaccctttgcctgggtcgtcctcgtcgcggggcaccttcttgaagcagtcgttgagcgacaggttgtggcggatggagttctgccagccggccttntgctcttgttgtagaaggggaagttgtcggccacgtactggtagatgtggctgagagtgaggcgcttgtcgggtgccccgtggatggccatggcgatgagagccgagtaggaatagggtggccgcaccagcttcatcagctcctcctgcgaggggatgggcagccagcccaggtcgctccccccaagccccgacacgctgggcagcagcggcctctgcactccataggcctggggcaggaaggggctggcgttggggccgggcaggtagggtggcggggtcatggtgggcccgttgaaccagaggtaggggttgggggtggccccatactcgccgcccccctcgaaggagggccgctgagggctgggcacgccctgtgggtggaagaagttctcatagtagaggttcatctcggggggctcctggccgatgctggggaactgggggctgcagcgaggtggggagggcgccggcaggtcgaaggagctcatgctggggctgggctg

SEQ ID NO: 443682 - DNA, 868 bp, Homo Sapiens
  misc_feature (48)..(48): n is a, c, g, or t
ttatggttccacctcctgctttgggctggccccaggaccccgcagctnccccggccaggtctggcgttctctttctccaggcgtctgcttattcttgtctaggttcgccttggccttcttgaactgctcaagctgctctgtgagctcctccaccgcctgtgcgtgtttctgcctcatctcctggacctgagcctcatgggaccgcgtctcttcatccagggccttcttcagcaccgtcacctcctgctccctcttggccctgagctcctgctgagtggctgtgctgtccagtgtgtcttccagctctgtctttagggcctccagctcctcgccgaggtctcgcttctgcttttcagccttgttcctggcggcccgctctgagtccaggtcctcctggaggtctgagatgtggccctccagctcccggatcttcttcagggcattgttcttctgagcgatttcatcgtcaagcctggccagggccgcctgcagctcctcctccttcttggccagctgcatcttgagctctgcgatctgcgcctggaggtcagcgatctgctcgtggaagtcgctggcatcaccctccagcttccgtttcagcttctccagctcctgtcggctcttctcttccttctttagccgcacttccagttctgaaatcatagattcatgcttgtttttcagcttggtaagattcttggccttttcttcctcttctgcaagatttgtcgttaagtcactaatcctctcctcaaggagttttcgttcttttgatagtttattgttctgatcatccatgaccaggatctcatcctccagtttcttgatcttggcctcagccgatcccgggaatccggaccggaccagc

SEQ ID NO: 443683 - DNA, 311 bp, Homo Sapiens
gagggcccttgaagtgaaggccctgagccctgattccaacctctgctcccagcacactgctgctggccacatgctgctgcctgaacttagctcaaggctctccatcacttcctttggggacctgggcaccaaactgagaatcactggtccacatttctctcaaccattaacaaaagggggtagagatgggggcaacagggacaagaatgccacctcccaattgagtgaggatgaattatggtaatatacgaccactcctcacccagtgcttggcacacagaggtggtcaacacatgtgtttcttgaaatcc

SEQ ID NO: 443684 - DNA, 646 bp, Homo Sapiens
  misc_feature (38)..(38): n is a, c, g, or t
  misc_feature (43)..(43): n is a, c, g, or t
  misc_feature (80)..(80): n is a, c, g, or t
  misc_feature (87)..(87): n is a, c, g, or t
  misc_feature (630)..(630): n is a, c, g, or t
ttgttcacctgccttctacctgaatgtccagaggaacnccatnggtggtccccttatggttttccccttcctactctggnaaggccnaagatttaagcggcaacttcttgaaagctatcagccagagtcaccgagctcactggtggcagcttcattctcagctggggcctctgacttgggctccttgttctgatctgtctgtggtgagctccatccaacaaacgtgctgctctgttgagctcctgagagtgttgggcatgggatgggctgagggttggctgaggcagactcgccaccaacccttgccttagaggcctcacactcacaagcaacaagactttggctaggagacaccctgcctaggcaggtgggggttgacaccctttctgggctggagagaaagctacttttgaccataagctcctctctgcagaaaggccctggagaaggacaagaggggccttccctctgcacctcgtcaggctgagggctgatgacctcacttgtgtctgatatgacactagaccaagggctagttttgtctgtcaccgtggtgatctcatttaaggtcctgggctcaatgatgtcttcttcatagtcctcatcactgtaggctgggcctgcctcagncctcgtgccaagcttg

SEQ ID NO: 443685 - DNA, 258 bp, Homo Sapiens
aataaatgtataaatgttaattcatgtatataaattagaaacacttttctagattctgtaggcttttgttaaaaatagagaatttcttggggtttacttaggccacagaatggccaaataataataatgacaatgatattactaataataatagctaacctttatttggcacttactgtgtgccaggcactattctatttttttaagaatttttaaaataacagctttattgaaatacactttaccataaacttcacc

SEQ ID NO: 443686 - DNA, 201 bp, Homo Sapiens
tagcaagttcccccaggccgtgggcaggtctagaggtgctgtctgggagccagggactgcagtcaaaaaccttagaagtctacttggtgttctagtgtactgtggctgagctggcactcaagccatgagatgcagcccttcccactcttccctcccctttccaaagaccccttccccactgtggccgagctggtacctaat

SEQ ID NO: 443687 - DNA, 1802 bp, Homo Sapiens
  misc_feature (1705)..(1705): n is a, c, g, or t
  misc_feature (1749)..(1749): n is a, c, g, or t
  misc_feature (1754)..(1754): n is a, c, g, or t
  misc_feature (1762)..(1762): n is a, c, g, or t
  misc_feature (1769)..(1769): n is a, c, g, or t
  misc_feature (1778)..(1778): n is a, c, g, or t
  misc_feature (1785)..(1785): n is a, c, g, or t
attaatacatttttcttattctctatagttatattattcctcgatttccctagacttatttgtctctttttcttgtttcttctttgtgactttcacttgctccatctcttactctttcttcatctcttacctcgtcaatatgctgttcattgtcagctttggtttttcttgcctctttattctcgttttttgtatcctcgttgtctgcttcatactttctgctttatgcttctgtcaatctgcggctctcccttactgtcctttttggattatgtgtatcgttgctttagtagctttgtagtccgtgccatgcgtgtacttcttgctgtgttctgtcgtcttgtcttttgtgagcttgtttcttgcttagctgttctctcgtgtcgtatctgctctctttgtttgatattttttggtcaatagatcttcctctcgcaggtgttccttgtgtctcttgtaatattttttctggaccactttttaccgatttgactccagggatttttagggttaactttcccaggtcagggctgtatatttcttccgtcccaaatttattctgtttggtcttaaagttacttacagatgtgattcagtccatactaatatgcccaaactgacttaattctcagtctcttcctagcttgagacctcagatcttgagttataacttttgacttgatcttcaagttgagaatgcttcataaatatgttttcttaaaccagggctatttaacataatttctttttcttgaaatatattgagtgtttttgatacacaatacatatattacacatgagaatgtttaaagcatcaaaataatgattaaattttttacataacttaaatgacaggactacaatatgccccccacttttttgctgtttgaagtaaaagaggaaagctctgtaacaattttcaaatacataggatttaacttatgttaatatcctgttataaaaaataactaccatataaagaatttaaaatatgcaaaagtaattagttcatttaaatttatacttatacaccggtgtcaatgaaaatatgcgaagttgccaagaaatttctaaggattaaagtggaagtaaaaaaacctgtttcaggcttcatttattgctacataatgactacttcaagggtcatctggcccgtcgtcagtcactcttagaagtggtaaatacagtggtatagtttggaaggaaaggaggaaaaaaataatgcattgtgatacaaaaatattacctacatataaattattaaagatttataaaacattcagaatatgttcttgctataaaaacaatatacttaaatatagaagcaaaaagtcctgaagcacccgcaattattttaatatccatttaatcagggaaaactatatatgtggatatataatacatacatatgtaataatttgagaagaaaaaaggcaaaattctgattataatccaaaaagagtttatctaattatggaggtaggtctccactccaattatacaaataagttatcagttttattcaaagaattataagtctaagacctcaaaactggtttttgtgccactgaaatacaatttgacagactttagaaaccagtattctaactgggcatatacacaaaggcaggatatttccttcatgagggttacatctggaaaaggggcctttcatttaaaatcatttttggggcctaaggggggntttaccccaggtggcgggtactttggggctttgggcctttttanattanccccggtnaatggcnttttaattnttccttnaaaggggattccctggt

SEQ ID NO: 443688 - DNA, 1058 bp, Homo Sapiens
  misc_feature (995)..(995): n is a, c, g, or t
ggggtgttgatcttctaggacatcacttgtttattcagtgccccaaacacagatttctcttctagcactttagagttgatccttgaagtctctcctggttcattcaaatacaagctgtgtgagtctggtggttttctgtgattggtctaatgtgaactctttgaacagacagatctgacagtgaaatgactctcccctgcttctggcataactgctttgcctctgtctagtgtccaagcatcttagctgttcaagaggagagggcagcataacttcctgaccactggtgtcagatatcagagcattctggactcctgagaggcagtggcctcttgagtgaacaggggaggccagtagatgccccagatccagagccgtggctgcaaatccagcaggaataaggagggacaaccacagcctcctcatccatgtgtcatttccaagggtttgccttgtgtctcagctcattctgggcagcacgtttgtcttctgtccctagagatttgaaggattttggactcttgtgaatgggtgactggacttggctttacagagttgggtgcttttttctctctgcaattacctgtcatagcattttgtgctcaccacgaaggatggtctctgccttctcttgtcggtgtatgccatctgaacctaggaacacaaagtatattggcctcaaacggagacccagggttgccagttttccgtgggccttcccctcccttgaaatgtctttaattacctccccttcatcgtcaggccacgtgtgacttctgttcttagcactgccagggtcattgacttccatctaagcttgcatcaggaagatgttccttctgtgatcattggtactgaagccagaaaagctctcattcaggaactctggaagaggcaaaaaggggacaaacactaactgctggagctggggccatttgatctccttttcaccttggcattgctgttcacagcaccttgttatggatgggcagggncagggtttccgcagaggggaactgcacagtggaccatgtattttttaaggtttttcccgggga

SEQ ID NO: 443689 - DNA, 556 bp, Homo Sapiens
ttgtctgcgcgtgttgtttactgttggtcactctctgctcttagcttcacattaccatttcgtgttttgtcaaagtccgtctcaattcgcgtttggtaaaataaatagataatgagcctctaggccggcgctctctcgagccggttaacgtcgtgattgaattttcacatcagacctgtgaagacagcccacgtgcaggcggcacgcggtgcccatgggggtgggctccagggtggagcgggggcgggggggggtcttgacccctctggagccacctgccttttgacaggtggtgattttgtctcaaaacaaacaggaaacgcgtgttgggtaagaattgagttgaaggactggatgggaagctgcgtgtgcgggtggagctgggcttctggaagattctggtgttgccgcctggcacgccctgtgagctgagtgaggccgggactctctacaccttccggacccgggctgctttctcggcccagacgtggggatgggattcgtgccggaaccttcttctggtgggagctcgcattccaaaaaggagcagcggagg

SEQ ID NO: 443690 - DNA, 122 bp, Homo Sapiens
gacaggtcaatgaagacacatctccttttcacgtttatttcattttgttttaagatcacagaagagcagagcattcatacgtgtaaagtaacagaagagagaaacagaatttaaatacattt

SEQ ID NO: 443691 - DNA, 388 bp, Homo Sapiens
  misc_feature (369)..(369): n is a, c, g, or t
ctggttctgcagaattcttttattaatcacttattctggactgaagcctggataggtaattatcagccttagatttctactcaagcaaaattagcagaatcccacctttccccgttggatcaagcgtgccatgaaatccatgccttctttattccttcctgttggctcctgtgccacgctgccttgctggggatttgtctgtgcaattgtcaagaggccacgactgtgtgcccacgtttgcatggcacgtaagcacatcacacccaactgcaggcatgcagcccggtgggtcaggtcttccccccagagcactgcgtaactgcagaaaacacacccagttttcatccacgcaggatgggcttgggatgnccccttgcccgtggcccag

SEQ ID NO: 443692 - DNA, 470 bp, Homo Sapiens
tcaggtttaagagcttctggagcctgaagagttcctcacggctgtgaaggagtcggcactctgcctggctgctgcagaagacggacagagtgaaagcatctccaaagctgatttcagaggacggtgtcaaaagatgggtgctcggctgctacatatcttctcaacacctggatgaatggttacagggattctggtgcctctaagggaaaagacggtcgtaggaagactttctgcctgcaggtacaatcccggcaaggtggctccaggtggctttcacagtcgtacgcgggtctcgctcgtcacttcgctgccctttgccatagctcagcacccgcatcgtagggaatcggaaaggcggctcctgccactgccgccgctgcccgcaggtcgctctgggtgggggaatcgctgcaatcgccccatgaaacccgcggctccgcgcccggggagcgggcagaggcagggcggcc

SEQ ID NO: 443693 - DNA, 547 bp, Homo Sapiens
  misc_feature (21)..(21): n is a, c, g, or t
  misc_feature (106)..(106): n is a, c, g, or t
  misc_feature (111)..(111): n is a, c, g, or t
  misc_feature (220)..(220): n is a, c, g, or t
acggaataacaatttcaacanggaaaacacttataacatgaatacgaaattaaatacgactcactataaggaaatttgccctcaaagcccaaaaattcggcacgangtcangtttaaaaacttctgaaaccctgaaagagtttcctcacggctgttaaaggaattcggcaactcttccctggctgctgcaagaagacggacagaattgaaagcatctccnaaagctgatttcaagaggacgttgtcaaaaagatgggtgctcggctgctacatatcttctcaacaccctggatgaatggttacagggattctggtgcctctaagggaaaagacggtcgtaggaagactttctgcctgcaggtacaatcccggcaaggtggctccaggtggctttcacagtcgtacgcgggtctcgctcgtcacttcgctgccctttgccatagctcagcacccgcatcgtagggaatcggaaaggcggctcctgccactgccgcccgctgcccgcaggtcgctctgggtgggggaatcgctgcaatcgccccatgaa

SEQ ID NO: 443694 - DNA, 721 bp, Homo Sapiens
  misc_feature (28)..(28): n is a, c, g, or t
  misc_feature (69)..(69): n is a, c, g, or t
  misc_feature (115)..(115): n is a, c, g, or t
  misc_feature (117)..(118): n is a, c, g, or t
  misc_feature (371)..(371): n is a, c, g, or t
  misc_feature (398)..(398): n is a, c, g, or t
  misc_feature (528)..(528): n is a, c, g, or t
  misc_feature (679)..(679): n is a, c, g, or t
  misc_feature (687)..(687): n is a, c, g, or t
tgcattggggcagggtttttctgttggnccaggttcagcctgtattgcactttgttgttgagttggtgntggttttcattgttgttgtggagagtggcattgactgattggaaanannagaactgctcctgcaccagcctcactcccgctctgacactaccccagggctcccgccaggtcccccaccctctgcctgctccctctgttggctctgggggtgccactgcacctccccaccctgctccgggccctcagtggtggtcatggccttccttccgggcctctgctctcacactgtcgtgactctcatgaccagctctcggctgctgcctgggggacttcgctgttcatgaggtctcaagtgactcagnatgtgcaggatggtataagcacagtgntgatgggacagagggcctgaggggtggccggcagcctgggcagggccctgctcaggggcaggggtgctgcggtctcctcttccgaggaggggatattggcctgggtggatgaggaggtccgggggttggncctgcctcctgccttttgatcctccaggtcttttgtcttgtcatagttcagcactttccactgctggttgacagcctgccaccgtttaaagatgcggtacaccgagggtccttcatggatgatgagacctatgcacaccacgtccatgaanccatacancccgtagcagatctggaagagaaggtcttggcgc

SEQ ID NO: 443695 - DNA, 2429 bp, Homo Sapiens
ggtttttgtttcgcagaataataataattattataataacagtatcatacatcaaggacaaacccagctgccccaagcctactgcaaaatctgtatgtacagtatagtctatgtgggtggggtacagggctgcctgcctgcaccctcaaggccttactcataccagcttcctgaggaggggccggcccctcctcttgcccctgttgaagcttggcacaggctggggaggctggcactgccaacgccatccctccatgttgggcaagcctgttccaaggggctggactcacctcccccattgtggcctggctgcaagggattgggggtgagcttgttgagggacaaggcggtggcagctgtggggtgtgtctcatctgagtcccctttccacccctaccggctcttcctgcgggcctgcccatggcaggaaggggccagggacactcatggcacagaccagggcatgcagagcggacccatggcatgctcggcccgccgggtgccatgcagctgtcctggactgttgggtagctgtcagagggctgagtcggtggtggagttcaaggatcccccgatgggctgggctgctgatttggtctgtggtggggttctcctcggagctgggcccttgggcgggcagctgcagaaattctggaagtaccaggtcctctttcctcagaaggcccctctggtcgtgggccccgctgctctgcacccggttcagcagctccaccaggccttcgatgtcacaggtctgccgctttccagtggcactactgggcaccttcaccagagaactgggggacgctggagggggatgggtggccttatcctgagttctaggtgggcagccctggctgcggcagggagatttgtcacgggctttggagatcttcacacctggaagagtgtccaaaacccagtctttgggccgcccaccgagctcactagcttccccagatccagagggtgtttctcgcctggccggtgcagcaccacctctagcgggctcaagccgtgcttctccagaatgggctgcagcgcctcctgcagccgcttggtgggcttggctgagattcgtaccacgcgctccagcgccgtcagctccagctcgaaggtgatcctgttttccagccgcacttcctgatccgccagcacggtgcagtcctgatccaggaccagggccttctgttcattgcccaccaggtagaccttgatgtcaggtagagagaggcctcgtttctcacagatccctgccagcatgtctcggatggtgaggccaggtctggccagggccaaggaggctgtgccatcgggcaggtacacacagcagtacttccctggccggctttcactttcaccctccgtgctcccaaggctcttccggtggctctcagatttgctgctgacgaaggctaggaagccaaggtccaggctggcggaggagttgagggagccctgagactctcggcgcaaggcggcgtttgcagtcccgcccagctcccggcggaaggacttgcggagagggcggcccccaggaccctcaacgggtggcagctgccccaactcctccacacccagcggcagcgacttcccgggcttcagcttcggcttcttcctcgtggcgtcagggctgccgaggcgcgaggagccaggttcccgcagagggcgtccctcggcttcggctagcaggcactcgcggtacagcggggacttgacgaagcgcgcatagctgtcgaacttcatcaagttgaagatctgaagctgctgtgcccgaaacatgtccggccggggctcggccagcacctcctcgccaagccaggcctgacggtcgatgttcactgggctcagcgcctggctggacaggaactcctggtagatgttgcgggcctcctgagctagctgctgggtatcgctggccgggatctgctggaagcgctcgcaggccttccagaaagtcacgttttccgcgctgaactccttcttcaggaactcagtgaagtaagccaggcccagcgggtcctgcaacagccgctcgaaggacagggcccagctggccacaggctgctcctcggttgggaaggggctgctgggaccactggggaggctgtggatgctgagagagctgccgcggccctcgccctggccctggggccccgtcgtgctgctcagctctccatctgacacagccagaaccatgcgcccgttggggacgcccaggtgcttgggcttccctggcatgccgctgccgatcaggggtccccgccgcgggggctgcccaccatggggactgtgggcagcgccggccagagcttgcacggtggcgggcaggcagtggagagagcctgactcggctcctgcgggccctcacatcctgaaacaccgctcactacctcttttctctgccacaggaagtgtctctatagaaa

SEQ ID NO: 443696 - DNA, 410 bp, Homo Sapiens
  misc_feature (29)..(29): n is a, c, g, or t
  misc_feature (60)..(60): n is a, c, g, or t
  misc_feature (358)..(358): n is a, c, g, or t
accctcattactggagaagctggcagagncgttgctgtcaaacctgccagagaacaagcnaggcttagacttgaggagggaagacaggaccccacggcctcaggacaggaggaagacaaatccaaagatacccacccaaaaggggcaagggaggaagaccagaggacagtatccaccaccaatccccaacactgctttctcccattcactgtggtggcttcagccatgccctctccagacccagccacagcaattggttacttgattggaattaatgaatgaaaaacaaatcaatgagcttcagcggatctccctgggcatggccaaaccaggtcctagtccatccccaggacaccanctggcagaaacactgcctcattcatgcctggaacatggcccaaatccacttc

SEQ ID NO: 443697 - DNA, 507 bp, Homo Sapiens
  misc_feature (417)..(417): n is a, c, g, or t
tgtcattatttctcccaactgtgagaagatacagtcaaaaggtgggctggatgacactttgcacacaattattgattatgcctgtgagcagaacattccctttgtgtttgctctcaaccgcaaagctctggggcgcagtttgaataaggcagttcctgtcagtgtggtggggatcttcagctatgatggggcccaggatcagttccacaagatggttgagctgacagtggcggcccgacaggcgtacaagaccatgctggagaatgtgcagcaggagctggtgggagagcccaggcctcaggcacctcccagcctacccacacagggccccagctgccctgcagaagatggccccccagccctgaaagaaaaagaagagccacactacattgaaatctggaaaaaacatctggaagncatacagtggatgttaccctgggagctagaagaatccttggaggcttcaacctctcaaatgatgaattttgaatttatgagagttctttg

SEQ ID NO: 443698 - DNA, 379 bp, Homo Sapiens
  misc_feature (37)..(37): n is a, c, g, or t
  misc_feature (69)..(69): n is a, c, g, or t
  misc_feature (122)..(122): n is a, c, g, or t
  misc_feature (191)..(191): n is a, c, g, or t
  misc_feature (257)..(257): n is a, c, g, or t
aaacactgtacaactgggccaaaatcggccttaaaanggtgaaaaccaagaagggaaacacaaaatccnaaagggtaaatggaaccttaacacgggagtcccggggggattaagtcttttgnacctaggcacatacttcccatcaaacacattccttaaaaaagcccttagttctcgcctcccgtcccccncccccggtgtgctgtaccatgagctggatattggaatttggccaaataaaactgccaactcttttntcctgaatactactatcaaagtcaggcttccccttcttttacctgggtaatggaatgtgtctaatttcattttgaagcttgtctccacattgaaatatttttaaacattattatttttttac

SEQ ID NO: 443699 - DNA, 884 bp, Homo Sapiens
  misc_feature (51)..(51): n is a, c, g, or t
aaaggggtgcaaagctttaatgccttgcctgggtgtgccatcctccaggancctccatacgttcacatatccaaactcagtcctcttggttttgtagggaggcttcaagatgacagcattcctttccgcagagtataggacagaaccctctctgaaatgggggtcttaggactcacagaaaggtaggggaagatcaagagtcccgtcttagtgaaggtaaaagggcagaagtgaagtgagtttcctgtggcctaacacacacaacatgactataacaagggctatagaagttatgaacgaggaactgtgggcaaagatccgtaaaaccagagtgactaaggcagtttacctaaaattatgcgtgaaaccattctcaggtacactatgaatatcaaaggtgtatttctagatatggtattcctgcatttgtgtaatacacccatgggtacttcttgcgtaccaaaccactaactagagattaactggcccgtgatttaaagtccttactctaagtatgcacttaccatgccagttttagtaccagaaaacattatttctctactataaacctgggaaaaacagcgctccccacaccattcccaattttgtgccaagatgagaatcacatttattgaagttacattacagaagatagtgaaggggaaagattgagaacttccttagtacacccttactccaatattttctattagcactgcacatgtattactgcctagtgtccattggcatagaagcctaagaactgcttatgttgccagtcttagacaaggataagcatttttaacaaatacaggtaaaatctcatttgttgctgcaatcttttcacaataaagttaagctgtgtcattaagaaccaacagcgt

SEQ ID NO: 443700 - DNA, 825 bp, Homo Sapiens
  misc_feature (15)..(15): n is a, c, g, or t
  misc_feature (41)..(41): n is a, c, g, or t
  misc_feature (50)..(50): n is a, c, g, or t
  misc_feature (72)..(72): n is a, c, g, or t
  misc_feature (77)..(77): n is a, c, g, or t
  misc_feature (118)..(118): n is a, c, g, or t
taaaggccgctgtcnaaagaaaacggcaaaaattaaccctnaccctggtnccgtgaaaccggcctagcaccnaggcnggccactccaaagctccccggctctcggtggggccggactnacccgccttgggaaggaacaaagccaaacccacctccgggcaccctgcctttaacaaggcctgaattcggggctggagttaacccactacgaagtgtgccatccaaagtatccagttcctatgccttatcctgctttcccagaggatgtggtcccctgtcctattcccagtaggctaaaacactcctcataaatgggttattgccattggaaaactaataattttctagtaatgtaaacaataccattttgtatctttaagactctcactgtgtgaacatcatgtgcatcaattatgcctacaggtaactgcattatggtggaagtctaggattgtctcccattctctcctggaaacaacagtgacagatcagaaatatagtgctgttttcattggctgtgttgaagaatccaaccaagggaaaaaagttctcttatttttcacaagcagatttcctttatctcaagttttgagtcataactttgtagatttctctaacggttgatcatactgagcctgctgcataatgtcactgactatcattttagcaatcttccaagctagctcttcctgggcctcatcagtatttccttgcacccatttcttcatagcttgtgagaacatggatccttttgatttccttacatcaggttcaggctcagattctcggatgaattgccccaagtcactgactcttccaaatgtca

SEQ ID NO: 443701 - DNA, 1157 bp, Homo Sapiens
  misc_feature (1010)..(1024): n is a, c, g, or t
aatgggtgcaaggaaatactgatgaggcccaggaagagctagctggaagatgctaagagaggatagtcagtgacattatgcagcaggctcagtatgatcaaccgttagagaaatctacaaagttatgactcaaaacttgagataaaggaaagtctgcttgtgaaaaataagagaagcttgtttgtccctgggatggagttcttcaacacaggccaagtgaaaacagcactatatttctgatctgtcactgttgtttccaggagagaatgggagacaatcctagacttccaccataatgcagttacctgtaggcataattgatgcacatgatgttcacacagtgagagtcttaaagatacaaaatggtattgtttacattactagaaaattattagttttccaatggcaataacccatttatgagagtgttttagcctactggaatagacagggaccacatcctctgggaagcagataagcatagaactgatacttgatgcacactcgtagtggtaactcatccctaatcagcattgtaaagcaggtgccagaggtggtttgctttgtccttccaaagcaggtgagtcagccccaccgagagccaggcagctttgagtggcagcgtggtgctagcagcttcagcggaacagggtgagagttaattatgcagtcttcttgacagcggcattaatttggaaggaaactgacaagtcatgggtcaagtttcagtgacttcctccttcctctgatggcagtatatagttttcacattttaattcctcctcctgagatgcactatacttaaaaccattctctcccctgctaacagaagggtgtgaatctggtttactttgagcattaggatttgcccctttggaattctgcactccagttacttaactttcccttcagaatacatgtggaaaagaaagaaaggaatagcgatggactcccactttttgcccctgtgggcacccttgaaacaaagcagttcttccccaaattaaacnnnnnnnnnnnnnnnaaataaaggggagcagggattaactgggggaagagaaaaaacaatttggactttttgaatggcccctccccccatttttttgcctgtggaagaccgggaaagatgttgcccacttgtggtccgtccctttcct

SEQ ID NO: 443702 - DNA, 726 bp, Homo Sapiens
  misc_feature (236)..(263): n is a, c, g, or t
  misc_feature (266)..(267): n is a, c, g, or t
  misc_feature (271)..(272): n is a, c, g, or t
  misc_feature (579)..(591): n is a, c, g, or t
aattcatatatatatattttaaaatcaaacacaattaaatataatatggtttaagtacatgaatacttcagactttaaaagaataacagaggtggtacatagtaccaaaaacttacacaaagcctttttgcttcttctgtcgatgaaacagtgtgcctctatacaatcaaatattgcaatggaataaattctctgttcattcaagactttctcaaggacaaaagtgattaataatnnnnnnnnnnnnnnnnnnnnnnnnnnnntcnncccnngcaaagtctgagcaaaagcagtaacatctaagagaactttctttcctctcaatcatgtgcattgaggaagcgctggcgccacgtggtcaatggagtgtgctcaccaactgggcagtcctgctgatggctgtgtgatcccgatgcaggagccaactgagcagaagtgcagtgagtgagtctcttactatcctaaagaaaggagaagaaagacgaccaactgcacactttccagctcacagcaaagaatgggggaggcagtcaaagtcaaatgtttctctctccccagtcatcctgctcaccttatttnnnnnnnnnnnnngtataatttgggaagaactgctttgttcaaggtgccacaggggcaaaagtggagtcatcgctatttctttctttctttccacatgtattctgaagggaaagttaagtaactggagtgcagaattccaaaggggca

SEQ ID NO: 443703 - DNA, 344 bp, Homo Sapiens
  misc_feature (245)..(272): n is a, c, g, or t
  misc_feature (281)..(281): n is a, c, g, or t
  misc_feature (312)..(312): n is a, c, g, or t
ttttttttagaattcatatatatatattttaaaatcaaacacaattaaatataatatggtttaagtacatgaatacttcagctttaaaagaataacagaggtggtacatagtaccaaaaacttacacaaagcctttttgcttcttctgtcgatgaaacagtgtgcctctatacaatcaaatattgcaatggaataaattctctgttcattcaagactttctcaaggacaaaagtgattaataatnnnnnnnnnnnnnnnnnnnnnnnnnnnnttttttttngcaaagtctgagcaaaagcagtaacatctangggaactttctttcctctcaatcatgtgcatt

SEQ ID NO: 443704 - DNA, 352 bp, Homo Sapiens
  misc_feature (241)..(270): n is a, c, g, or t
  misc_feature (272)..(272): n is a, c, g, or t
aaatagaattcatatatatatattttaaaatcaaacacaattaaatataatatggtttaagtacatgaatacttcagctttaaaagaataacagaggtggtacatagtaccaaaaacttacacaaagcctttttgcttcttctgtcgatgaaacagtgtgcctctatacaatcaaatattgcaatggaataaattctctgttcattcaagactttctcaaggacaaaagtgattaataatnnnnnnnnnnnnnnnnnnnnnnnnnnnnnntntttttgcaaagtctgagcaaaagcagtaacatctaagagaactttctttcctctcaatcatgtgcattgaggaagcgctg

SEQ ID NO: 443705 - DNA, 539 bp, Homo Sapiens
  misc_feature (130)..(186): n is a, c, g, or t
  misc_feature (512)..(512): n is a, c, g, or t
agagaaatgctcagtaccctgtattacttatttcagtatgttgatttttgtttgccaaattaaaaatactcatatactggtttaatgaaggaaataaaacatattagcttattccttttgttttccaacnnnnnnnnnnnnnnnnnnnnnnnnnnnnnnnnnnnnnnnnnnnnnnnnnnnnnnnnncatgtcgatatgttgtaagacctattttgatgatgttgctttgccatttttcttgttgagtatgaaggtaatcattaaactggaacacggttacctatagaaaatggaaattatcttagttgccaatttaatgcaagtcttgctttaaacatgattcatttccccattacgcattccactgctctttctttatgtgttgtgcttttgtaagctgacagatttttttgtgtgtgttcctaatgctagaatgtaaagtcttttggttcataaaccatttttattattattattttacttagcactgcttttgaagaaatgagaagagncaaaggtctagatggcactgcttgaaa

SEQ ID NO: 443706 - DNA, 473 bp, Homo Sapiens
gcctcgtggtgccggatcgtgtccttggcctccccatagctacgcttcagggtctgaatctggtgtgtaatcagctcctggcgctggcactgggcttcaagctcactttgaaggtcttggttgactctatggagcctctgccatgcacccgatggggaggcggccacttcagtctgcagcacgtagccctcacgggcgctctgctcccggcccagggccaccctcagctggtcctgcaggagccggttctgctccagaaggtctgaggcctccttctggctctgctccagctccttctcgagcagagaggtcagctcgtgtgtggagagccggtcacccccatcttcagaagacaggtggacggaggcgatgggcacctgcttctctttccggagaggtgtggtctccacctgatgccaccgctgctcaatcttcacgtggacgttatgcgttctgaggtcgctcataggcag

SEQ ID NO: 443707 - DNA, 1080 bp, Homo Sapiens
attgggggaggaatgccaacgcccctaggtcatgggccagggtttttccttgggaaaccagcttatggcccatgttcaccttacctacgggggcccgcggcgcccaaacgaaatggttttagaaagctttcttgaggggccgagggcggccgacaaggctttttcttctcactttgggcttccgctagtgcaagatttaataaaaaacaaacaaaaataggaatggttgctttcaacattttccaggttgtgaaaggtttgccacgactctcaggggtgtggttctaagctgcatcagtggaacaaatacaaaatgctgtcctcctcctgggctggaaggcagtgcactttctcctcttaacagccagactagcgggtgaggagtcagtgctgtgacccaggccaagctggagtgtccgcatagctttttctctgaccagtggggattccatctaccttgaggcgtgctggctgggccccgtttccacaccagcacatggtgagacagggtagcttatcaacaggctgctgggccttaatactgacagtgagtgtggcgggtcacagccaggaaaggactaacacagatgccctcccagcccccactgctggcctaattttagaataccacggaaaaaagctttgatgaagacaacaggaagtcaacacagcagagagtggtgtggacaacccagaagccagcctcacgcattccatgcccacagttaacgatgacaacaacagcaataataataataataatgaaacaaaggtacaggtgaaaagcagcgcttggggtgtgctgctgcaagctggggaaggcgcgtgctcaacttggatgggacacacctagtctttcttcaagtccctggattcaaagagcttcaaccgttcttgcaccgtcaggccttccttcagactctgggtagagacagagcaggaggagaaaataaacacaccgttagaccccctgcactggaccggaccggaccagaccggaccgctggtggagccggcatcagtcagagagccggtgcaggtgcggttagtggcatgccagtgtggagtagatggtaccgg

SEQ ID NO: 443708 - DNA, 1842 bp, Homo Sapiens
  misc_feature (69)..(69): n is a, c, g, or t
  misc_feature (85)..(85): n is a, c, g, or t
  misc_feature (226)..(245): n is a, c, g, or t
ttatcaacaggctgttggccttaatactgacatgagttggcggtcacagccaggaaaggactaacacantgccctcccagccccnactgctggcctaattttagataccacggaaaaaagctttgatgaagacaacaggaagtcaacacagcagagagtggtgtggacaacccagaagccagcctcacgcattccatgcccacagttaacgatgacaacaacagcnnnnnnnnnnnnnnnnnnnnaacaaaggtacaggtgaaaagcagcgcttggggtgtgctgctgcaagctggggaaggcgcgtgctcaacttggatgggacacacctagtctttcttcaagtccctggattcaaagagcttcaaccgttcttgcaccgtcaggccttccttcagactctcctgcatgggccgggaagcgggtgcatttcaggtatcccacgagacctgctcaattacggacttggacctgatgtttctgagttgccgggtgacacaggatttgtctttcttcaagaagtcagggttgcttttagatttcattatatcatatccggacaccgtggcactgtcaggggacttctcccccagtgcttccgttgcagccttgagctgctccttcaacctgctgatgtcacagtcagccttagccttcgcgatgctgagctctgtgtagatgtctttgtacttgtcacttgcgtacttcttgtcccgcagtgccgtctgcagctcatccttgagggagctaatctcctgtttcaggtactgtatttccgattcctttacccgcaataagacctctagttcataggcatccttgccctgtgcaaggggtgacccagtggcctccccaccgccgtccccagtcagcagcgtccgcaaccgtgtgatctctgcagccaggcggttgttcagctcctggttgtgggcattgagctcctggttctcacgctggcactgccgcagggcctgccgctcggcctccagcgcctgggccagatgggcattctccaggcacttctgcgagtactgctccgagaggacctccagttcccgctgcaccgactgcagctcctccaggtactggcgccgcagggcctcaacatccgagttgacgctgctgatctgggaccgctggctcttctccagctcccgctccatttcctcccggtgggcgttcttcatggcttcgatggctgagatggtggccgctgtctcctcggctaggaggcggtctttctcttctcgaagtttctctagctcccgctggtgctgcctctggagatcttcaatcttcttctggtgcgtttcttccattgctgcaaaccctcgctcgcacgtggcctgcagcacgtagccctcacgggcgctctgctcccggcccagggccaccctcagctggtcctgcaggagccggttctgctccagaaggtctgaggcctccttctggctctgctccagctccttctcgagcagagaggtcagctcgtgtgtggagagccggtcacccccatcttcagaagacaggtggacgggggcgatgggcacctgcttctcttcccggagaggtgtggtctccacctgatgccaccgctgctcaatctccacgtggacgttatgcgttttgaggtcgctcataggcagccctgggctccggtccacctccatgcgcagggctgcatcctcagtgcctggcccgtctgtggcgtcgagcatcccgaagcgcttgcggcgctcctcccgcctccgtgcacgctcccgctccagctccccaggctccgcctcagggcgcaggggctcgtgggtgtcagcaggcctcgtgccgaattcgccacccagc

SEQ ID NO: 443709 - DNA, 493 bp, Homo Sapiens
  misc_feature (350)..(350): n is a, c, g, or t
  misc_feature (479)..(479): n is a, c, g, or t
ttgcaacacaagtcaatctttattgaaaactgcagtattaatacataacaattcttgttacaataaacgtgcttttgagatttttaaatctgagctcatctcatcagattgcataaaaaattaaaatagtatcaattgacacctaactgaactggctcaggatggaaattccattccttggcatggatacgtaagttcaatgcagaggtgagggatgcctttaacactggaagacaatgctgacttagcttaaaaaaagtaccgagagaacggtgtaaaaaacggtatttaaaaatcatttttaaaagaagacaaaaaggaaccgtttcttctttaggttacaatccatngagggctctctaggggcctctccggtgtggccagcacagacaaccctgctatggagcacaatacggctggcctgtatgatctggcccagtctgccttgcgccactgtgtctgcaatggaacccacgcgnggtatcctattagt

SEQ ID NO: 443710 - DNA, 283 bp, Homo Sapiens
tttttcttcctctattgacattattctaagtgctcattcgagtgtgttgaactgttgtaaacatcacctctgaaaaatcagttctgctctcttttgcagggagtggagggaaggaaagagggagctacaaagtgaaggaacttatgaatgttaccaagtagtccagagctcaagaaaacaatcactttgtgaaaagtctgcatatgccaaaaatagcttattatttttatgtcaaaaacaataattcaaaaagccaaaaacagtattgtttattccttggata

SEQ ID NO: 443711 - DNA, 540 bp, Homo Sapiens
  misc_feature (25)..(25): n is a, c, g, or t
  misc_feature (58)..(58): n is a, c, g, or t
  misc_feature (73)..(73): n is a, c, g, or t
  misc_feature (83)..(83): n is a, c, g, or t
ggaacccctttaaaggcaaagtgangttaagcgggtacttcctccaacacctgatttnacccgctgctgttancctcccaaanggaagtttgttttaagaacaatgatggcagtagtaatcccccctatttcactagtgagggatttaaacacagtcggggccactggggcccagtcaaaaggtcctctttcgacagaactatgtattttcggtagtaaaaggaaggtccttactgatgggataactgccaacactggacaatttttcagccttaacagtttagagaatatcattttaaactacccggtataataaaactgtggcacaatagatcaatgcaatgaattctctatagtcagtaaaatgctctcccaaataatgaaatccattaataatgattactgccctggtgcctttgccacaaaagtaatgcccagtgctacgtctcaatggtctctaataaatacatacaagtcccacaagaagaacataatcataacatggcaaatgagggctgactccagtgacagtacaaatta

SEQ ID NO: 443712 - DNA, 431 bp, Homo Sapiens
catgttttacaaataataaatttatttccaaatcctgaattataaccaaattacaattccctttaggtcttttttgctgctttacacaaggattaaaaaagacagccacagccaagtcacgcatacaccaagtgtcctgggccagttttagatgcgatgggtccagccacctcccgctgccccggcagcaccctcggatactctgcagccccgctcccgccatgccgtgctcctgcatggaggaactccacctcctctgccagagagtctggtccagcaggaactgccctggggggccgtgatatgcacagatgaaagtcctcagatgaaagggctttgtccgcagcctcagggctcccgccagaaggctgaggacccaatacctgctgccatcctctctggggacagcctcagctcacagaccaaagcgg

SEQ ID NO: 443713 - DNA, 532 bp, Homo Sapiens
  misc_feature (207)..(305): n is a, c, g, or t
  misc_feature (334)..(334): n is a, c, g, or t
  misc_feature (388)..(388): n is a, c, g, or t
  misc_feature (430)..(430): n is a, c, g, or t
  misc_feature (457)..(457): n is a, c, g, or t
  misc_feature (463)..(463): n is a, c, g, or t
  misc_feature (486)..(486): n is a, c, g, or t
  misc_feature (500)..(500): n is a, c, g, or t
cttaccattatagctttattataccaaaaaggtacaaattagaaccagccaaaaggagagatgcatagagcaaggtctgggagggtctcaaatgcgaagcttcgtttgtcctcaggaccacgtccccccgtggcacactgatgcatgacagtatgacaggttattgctagccaggaagctcacctgaacttcagtgtccagagttcnnnnnnnnnnnnnnnnnnnnnnnnnnnnnnnnnnnnnnnnnnnnnnnnnnnnnnnnnnnnnnnnnnnnnnnnnnnnnnnnnnnnnnnnnnnnnnnnnnnatagcacgtgggcttcagagcaccagtgntaaccccggggcagagaggccagcctgccttggagtcatgttgttaggttaaantcaagggggtttcaccaagagttcaccttcattaggcataantttcttcaaacgaggggttgagggggncccccntggattaggcaggacatttccantcatttgggggaanttcccaggggtttaggatttgggttcctaggg

SEQ ID NO: 443714 - DNA, 408 bp, Homo Sapiens
  misc_feature (18)..(18): n is a, c, g, or t
  misc_feature (346)..(346): n is a, c, g, or t
  misc_feature (390)..(390): n is a, c, g, or t
taaaggagacaattggtntgggctcctactctgagtgcaagcgctgtgtccacaaggccaccaacatggagtatgctgtcaaggtcattgataagagcaagcgggatccttcagaagagattgagattcttctgcggtacggccagcaccccaacatcatcactctgaaagatgtgtatgatgatggcaaacacgtgtacctggtgacagagctgatgcggggtggggagctgctggacaagatcctgcggcagaagttcttctcagagcgggaggccagctttgtcctgcacaccattggcaaaactgtggagtatctgcactcacagggggttgtgcacagggncctgaagcccagcaacatcctgtatgtggacgagtccgggaatnccgagtttctgcgcatct

SEQ ID NO: 443715 - DNA, 378 bp, Homo Sapiens
tttaaaggggagcataatctttaattgtggtactcaaccaagcaggacaacaaacagcagaaagattacctcagtgctgtaaatggaaccaagacacctaaaatgctggggtgttttttacaatccctttagtaagtatgaaaattggtaacgtgagtcctcagtgaagttattgtaggaaagtccttttattcattattgcttttctcctcaagaggcgcattatttccatctctgctttgtctgagttttcatgttcactgactttgcctgggcagccccacctcttaccttgggtgccagtgtgtctaaggaaggtttttttccccgggggtccttgttaatcaatactggggggcagggaggaggatgagaacc

SEQ ID NO: 443716 - DNA, 646 bp, Homo Sapiens
gctgtacatgaaacataatggacttacattcctagtcagatactaatattctgtagaagatatttctaaaatcttatctttaaaatatgaaataatttttaattggggtggcaacttaaattcaattaaaataactcatgtgtcacaagagtaaattttacataatctgtacgtagttctaatctgtatatagtcttggaggttatgatttgccacagattggttggatcacatacatttaaggatcatattattaaataatatatgcacagacatggagagaattagtttttactaaaacatttatcagaaattttaatactctgcataaccagtattagcattagaaattagccacttttaaaatgagaaaactgtgtcactcttcaatttttttataagccattgaggaaaacattaactcctggatttcagcttcacttttaacctgcagactaaatttctttctcaattatgtcagacacacccaagtcaatccccacccccttgttaccttgggaagaccgtgctgaaaaaggagatcttccacctaaaccgtgttctcttatttgaagccaatctttttgagaatttgtttacttgattctctttcccaccataaactgaccgagaacgctactaatga

SEQ ID NO: 443717 - DNA, 917 bp, Homo Sapiens
cctccttcaaggagcccttctggccctcagacggcatgggttccagttttggattccaacatcagcaggttcattgtggatgagcaggagacagaggaaggagacaaccaacacacagtgcccccagatagggccagcgtgctgcgccagctgtagctctgggcaaggatggttgccaggatagggcccagccctccagccaggttcatgctggttgacaggatggcccaccaagtgccaaactgagatggctcaaaccacttccgcaggaccttcccacatgggggccagcccagcccctgggccaggccattaaggaaccagagggcagcaaagacaggtactgtggagctccaggcaaagaatatgttgaccaggccaaccaggagcagcccagaagagaagagccagcgagcactcatctggtcagacagcaccccactgacaaacttgctgatagcataagctgccgactggctgctggtgatgaaccccaaatcatccttgtccaaagggatctcttccaccaatgatggcatgacaaaggagaaggtcttgcgattgaagtaatacaggctgtagcccccaaacatggctgagaagatcacagtgcgataatagccatagccctgggctgccatggtagaaaagagcaggccctaccagccaagacgcacagcctctgaccacagttcctgcttgccgctctcacagttcccagatctgctgagttgggttttttctgctccctcctccacccagcctcccaggctccctttatagccgccttctggacaatcattaagcctggggaggctccaaggggacccagtgtcctgaacagaggcgggagcccgaatagtacgggaccgacgcgtgggtcgacgatatcccgaaattccggaccggtaccagcc

SEQ ID NO: 443718 - DNA, 877 bp, Homo Sapiens
ctaccagggggcccgccgctgcagaggggtacacggcctggtacatgagtggttggctgcgcatgaagttgatcacttcatcaggataatccttggtgggacttcatagatggcgtgaaggttccaccaggggcacgtgcccggccgtgggtagggcatcttccctgagaagggcatccactggtagttgggcccctctttgtgggcaaagggcccgttgaagaccatgcgaatatcagccatggagtagacacacacggcagagcctcggaacacggagccagaggaggtaaagacagcgtaaatgacagggttcctcacgtcctgggtctgctggacaaacacgtcctggagctcatcaaagtgagtctcaatgccatcctcggccgggacagagcagacgagccgcgccttcaggaatgtgctccacttgttgaccaggcaacagtgaccaccgtcatcgttcaggcaaatgcgcccgatgcgggcgtacaccgcggggctctgcggcgcctctgccgaccgctcacggaagaagaagtaaagcttatcatcattgcgctccgcactgtcaggaatgagctcagcatggatgaacgacgggtcgttcagccaccgggagttgtactgatccgtgcgcatggctgtctgctttccaagtgtgcggaagatggctgcatcagtgcccataaaatcgatgtacacaccagcatagagctcctcattgatgagggccgatgctgtgtccagcttgggatcgtacggacacttgcccttccctgactcgagtcgctcaggctccaggtagaagatgtaatcctggcgtggggctgtgggcatcgggcggagggcaccatccgtggctctgctgccgcgg

SEQ ID NO: 443719 - DNA, 868 bp, Homo Sapiens
  misc_feature (590)..(590): n is a, c, g, or t
  misc_feature (674)..(674): n is a, c, g, or t
  misc_feature (722)..(722): n is a, c, g, or t
cgggagttgaggacatttatttcacattcacacaactgtacattttctataaataatgtggggctgaaatatttacagtcatttcttgcccatacccaggctgtctctccctcctgacaccccgtgcctggagagacagcctgcagacagatgtgcaaacccagcttggtctttcctgccccctccctgatgctcaggcagagcagccagcggtccctgggactccactagcctcgaccactccatcctctgatgccgaagtgtggcaggccacagggaattcgccgctccactgcagtcacagaggctgtggcaggcagcagccaacactgcgggccctgggcagtagctgccggcttgggaatgcagaaggaagcagggaggctgccactcactccggctgccccccaattcttcccttcctctctgtgcccttcctctgagagggtgagccccagggttccctcactcctcacagagtgaaactgctccaggcgcccagtcatgccgggtcacagagaagggagagccagactcttgcagtggacagttattacgccagggacaaggacaaggaaccacaacacaantgtctcaaggacacaaaatagtgggttcacaccggccccacagactgtacacattcttgagccctgaggggaaggcagtttggntcttcttgggagtggagagggagaaggtgggacaacgctcaaggacanaactcagagggacacataaccggtaaccaaccaagccacaggcaggggggttggagaggacacacgagcatcatccactcctcagtcacagcagcatcgtgcacttgggaacagcaaggggccaggggcgtccctgggctggggca

SEQ ID NO: 443720 - DNA, 549 bp, Homo Sapiens
  misc_feature (27)..(27): n is a, c, g, or t
  misc_feature (358)..(358): n is a, c, g, or t
  misc_feature (377)..(377): n is a, c, g, or t
  misc_feature (399)..(399): n is a, c, g, or t
cctttacccctcacccctaattatatncatgagtgatacagccactcactctctcccctttcctggtcaaaagttagttcagcttccctcagaagaaataaaattagatttaacttttatgtaaaatacaatttaacagtagtttgttagagcagatggtaattcatatgaaccttcatgggaagccagcgtatgagcatgacagaaatttctatctttgaagagatcagagagaaggcatcactgaaggcccggagctctagggaaggtacagtagagccctaaaggattagctggatggaagagtgggctggggccagggatcaaaaacattgcttccccaaatcttcagtgtcantggctggctagactatacnttttacctgtagaatggtaagnagaagtttttcaccattatcagtcttttaaagggacatttccatttctgtttgagagaggaatttgtattgtcatttgaaatgtttaaattgcagctgttaaacctttgaaacagttatgagcataatagaatctgggaaattatagaag

SEQ ID NO: 443721 - DNA, 1524 bp, Homo Sapiens
  misc_feature (504)..(518): n is a, c, g, or t
gggcggagggtgaagatagagcggttcactgtcggtgtggttatagagactacaatgaggacagagtaatctctcccgcatgtatcattaatatactagtgctgctagctaaatagaggaaggatgattgccagacgcgcggcgtgctggaccgtgggagtagcttagatttagtgaacggtctagattatataccgggaggggagcgggttcgactggtcggagcgaggggatgcggtgagctgaggtacttagaaccacggcggtaaacgtcgagggcggcagtgcgtgcggtagcgtgtgatagtggcagtgacggcgttctcgccgcggggcgtgttagataaagatcagaggcgcatgagtatgcttgtggagcgtggatcgaatgtagatacacggcggtcgcccccgggaataataacagtgcatggttggccgagtgggcggaagtgggcttgcgggggtgtcgacgtggtaagcacgcgcgctgagcgggaggtnnnnnnnnnnnnnnnttgtcgcacaacaaagtggtgggggtagcgttacggaaccatctgcggtgaggtaccattggtttggggtcaggcagatcctccgggcaggggaccagcgtctgccaccggcccgggtcggcccaagcacacaatgcccccggtccagccctgagccctctctgtaggtggggcccagatccagccttccttgagcggagcactgggcacctcctatccttacatccacagcaacctgacaacctcccaggcgggcgtggagtttgaccagttccaccaccggcgtctatctgggttctctacgtgccgggcctctgcaccccagggcctgttcttccctcctcgtagggagggcacctctctcaggacacggcgcactacatggggtgagactgtttttagttaattctgtgtctattcattaagaaatctggtcaaattagaaagtctgtaaaataagcgttcattttgccacaggttttaaatagcgatgaatatggtcaaaagccggtctaacctgctgacctgtatgaaacgctgccatgtgtgtgcatctaaacaaaacatcagcagtttcacgtggctcagcgtatggaccatctgtgtccagggaaaaggctgtttcctaggagttagcagttacagcctaaacacccccaaaccattaactgttataattttaatgatttgcttaaagtatttgtggggccaaaaagcctggttgaagggaggcctcatgggagtcaccctggagcccccaagtgccatggccgtccctcccccagcccgtcccgagcccacctgctgccccccggggcttgtctgacagcctgacagggcagggctgcacgctgcccccgtgccggtgcccccagccctccccttgggtgctgtgtagatggatattttttcagtgcacagtatatacttgtgtccagagagttaactttatagctgccattctaaaaatactactgttagaaagtatctttgtatcccgggaatt

SEQ ID NO: 443722 - DNA, 418 bp, Homo Sapiens
gccatcagagaggtttatttcacacttacaggcacacacagacacagaccagagactcccagcagcagagcccaagcactggcttcgccctcagtgccctggggcatgttcagggcagggttgagggggacgccctgcacatggctttgctgtgcaatgactggaaggccgcccggcatgggcagtagagacccctggcctctgagcaccttctagctcactggtagtgggattctgcattagtggggctgagagatgtgggggcccctccagccccattatagtgcacctgaaggggtccacagcctgtgtcctagaagagggaagaggaaggaaggtgggtggggctggtagtatggactaaggtgctgcaggacctggggccagggacatcctgttgcagaagttccggttgctt

SEQ ID NO: 443723 - DNA, 567 bp, Homo Sapiens
  misc_feature (440)..(440): n is a, c, g, or t
gctgcacggtgcacgcatttccctgaaggcagccccttcttcggaagcagctgttccaggcctcggaacagggcctgggtatccgcgtggtgggctggcagctgacggcctgctcagtggagccaggagctaactcagaccccaaagcaagcagggggccagtggcggggcccagcgcccagcaggacacccatgcaagaggctgagccccccaacatccaaggacaggagagacatggagtggcgctggacagtcacgacaaggacttgcctccagcactggacacacctgttttaagaccagccctctgcttcccagtcccgccagcctggggcatcctccatgggctcagcactgagaggtcttgggtctgccacgttctctagctctccagtcacccactcatccagggtaggaggggttctccctgccccccccncgtggccttgggatctcaccctctccatgtcctggggacagcctcgccctcagccggactgcatccctcctgggcctgagcctcgggactcagtggacaccaaagtcaagaccagcacccaccacgg

SEQ ID NO: 443724 - DNA, 1242 bp, Homo Sapiens
cctggaggtgacttcgatgtcccgttttggggcctggccatctgccgctcccttctcccaggccccatagaaggggacggaaaagacgaccccacaagccagctcactccacgctgctctgtgactgtccctgctgaagccgctttcaccggacacagacaccgttaggtgttagctgagatgttaggggactgtcccctgccagcttagtccgtgagaaccgctgtgctattctattttcttctgaaaagctccctgtgattttagaggtgcggccatcttccatccattggcgaatgttacatttatggaaactctactcaaaggcagatggtggttcttagacccaggcacctggggaagtcttccagatgcacaggcatcggatcccagagtgaaatgtctgccatccgccctccatgaggacccaagctcggcggggagaaaaatggcaaagaaatgcatcggccgccttcccacccatacatcagtccggctgcaacgccctcttcctgggcctcagctcccaccccgggaccctccaatccgttcacacagaaaggaccccatctataaaaaacataaatctgatccagttcttggtttattcaaaaccctttgctcacttcaagtacacatcaagcctttgtcgggaatccccggccccgcctgctcccggcaccaggtcctgttccagccaccccaggtcctcctggggcctttgtatatgctggccgctgtgtgcatcacattccggcacagtggtgggcgggagagcagtccccaaaggaatcccagtcctatccctaatccctggaacctgggaatgctccctcatgcggtgataaaggtgaatcctaggagtacccaggtgggccctaaatgccatcacctgcatcagcagatgaggggcgcagaggctgaaggccctggagcgggatgctgcacacccacatggaaggaggaggcgccagggaacaaggcgtacaaggcgtgcaaggcccgcaactctgggcacctgaacggaccacgagggacgctcctggagcaaacattctggcctcagcccatggctcctgcgctccagagctgtgggagagtgagtattattttccagccccaggtgtgtggtcagtgtcacagcggccacgggacacacagaggcaccttcctcagctctgatccagaggaaaatgtcatttcctcaggaaaacaccacctggtttctaggaccacaccgct

SEQ ID NO: 443725 - DNA, 480 bp, Homo Sapiens
  misc_feature (402)..(402): n is a, c, g, or t
  misc_feature (455)..(455): n is a, c, g, or t
gaacataaactggtatttatttatgcaaacacattgcaaaattcctctaaatctttgaaaaatatttatgttgtcatgaacacataaaatgaaaaatctaaagtgagtattattttccagccccaggtgtgtggtcagtgtcacagcggccacgggacacacagaggcaccttcctcagctctgatccagaggaaaatgtcatttcctcaggaaaacaccacctggtttctaggaccacaaagttccctctgtcaggggctctcggagccaccccatgtcctctctttcacaggaaattatcccgggtgtctctccctggcagttaccttgtgggttatttgacttgggggagggatcttcctcactaggctggcaaatttccatggagggacagggaactntgggggtgggggtttacaccagttgcaccattcaggcaggcacccggccgagnccccacagcaggcgttcaaggattt

SEQ ID NO: 443726 - DNA, 906 bp, Homo Sapiens
aaaactcaatgttgacttgtaatttatcagtttaaacaaaaatgacaaaatcggaaggtgtatttgacataatcagaaataaaatttcaaatagcctataattcacacaaagcctaggctggaaaatacaagtgctttgactcatttatttaaaaaggcttcatgtaaaccttgcatgagaagatgtccattagttactcaggatagagggcaaagagattatatacaaaaagtattttcaaggactatcttgttcttcctttataagaagttgaatttaatttttgaagtaattacttaggaagaaatggcagaggagttccacagaaaaagatggcaaccagaatgatattccgtcagccagatttttaaaattccttcactctgaaatttcttctttgtcagctaaaactgttttctgggtcagtttccttaggtgagccttgttcacattcagtatcaaaaccagctgacatttattattttggtttcattttccctttttgcgtctttatgtttctttcgacaatccatacgcaggttggttgttctggcctcccaagagttcctgctcatattacttcctactcctctccagcataagtcagaacctattaggggaaaaagaagaaagatgagccagcaaactactactaaaattggtaatattctaagtgttggcattatcaaggtctcgaataccagttaagatcattcttttccctcagtttctacctattttcaaaaattagtattttttctttccaaatgaaaaatataatattgcttttacgtgtttatatatatcatttactattatgtaactttgtttatgcctaggctctaagaaatgagctccccaacagcctgagttttcacatggaatttatggctgagtccactact

SEQ ID NO: 443727 - DNA, 980 bp, Homo Sapiens
ccgccacagccccccagacgacttgggctccagcttctacccggagctggggccctacagctcccgggaccccgaagtgctgcgggagcatatgacccagctcaaggaagccgccatcggcgtcctggtcctgtcctggtacccacctggcatggctgatgataacggggagccctcagatgacctggtgcccgccattctggacaccgcccatcagtacagcatccaggtggccttccacatccaaccctacaagggccgggatgacatcactgtacatgacaacatcaagtacatcattgacacgtatggctcccatggtgcattttaccgctataagaacagcatgggcaagagcctcccactcttttatatctacgactcatacctgacgtcccctgaggcctgggcccacctcctgacaccaaacgggccccattcgatccgcaacacgccctacgatggggtcttcatagcgctgctggtggaggagggccacacccacgatatcctggccgccggatttgacggcatgtacacctactttgcctccaatggtttctcctttggttcttcccatcagaactggaaagctgtgaagaacttttgtgatgccaacaacctcatgttcatccccagtgtggggcctggctacatagacaccagcattcggccctggaacaaccacaatacgcgcaacagggtcaatggcaagtactatgagacggccctgcaggcggccctgacagtgaggcccgagatcgtttccattacctccttcaatgagtggcacgagggcacccagattgagaaggccattcccaagaagacacccacccgcctgtatttggactacctgcctcaccagcccagcctgtacctggagctgacacgccgctgggcggagcacttcatcaaagagaaggagcagtggctcatgtgaggggcctgtaaatgggcgtgaggtgctgatgtccttg

SEQ ID NO: 443728 - DNA, 473 bp, Homo Sapiens
  misc_feature (406)..(406): n is a, c, g, or t
agaatttgtatccccattttaataatgagaaaagtgaggcttagagaggtacagtaatttacccaagattgcacagctaagatctggtggaggcatgcacacagggccctctgaccatgggctctaaatcactgtactatgttcccttccataggcctcaatcagtcatgtaatatttgacctggtcgttatcttaggtattatctagaccacagattttggatgcagttctctggctgaagacctctgagctaggataaccccttctcttttgacagacgagtcagagaatcagatcagtgatagaagtggagtgccaatcctgagtatcacctctactcaagtgctcaacatatccctagatcctcaattccctggcaaaagtgatttggttgggaccacaggntttcaagagggggccagtcaagcattaaattcggggaatgcacatataacctcttggggcaattttt

SEQ ID NO: 443729 - DNA, 585 bp, Homo Sapiens
agatgcaatcgcaccttatgttcccatctagtttggagaacagcccaaggagtttttcaggctctagacctcaagatccttcttacctctccacagaatcaacttctttctctgacaagggagaaaggcaaggagaggagggaggctttgctactctctcctgatacctagaaaatctttctggagccaaagggctctgagttgagtttgcaagaggggaggacaaagaagggagtgtgtgatgattttaagcataaaggggatgatgtgggagaattttggaattttttttagggaagtggctgttcaagggaagaactctattgtccaaggagagaaaaggctgggactggtccatcagtgaagagcacttttttgcccattatcttctccccataaaggatccactcttggaagcgccccctggggccttggaacatgaagatggctcagatgcccataattccagtgaggcctctccttgattgggacacaaggagctgaaattcattatgtgaatgagtgagagatgggtgtttatactctgcaaatgaaagagagtgtatgggtatgggaggactgtgt

SEQ ID NO: 443730 - DNA, 529 bp, Homo Sapiens
ttttttttgaggtttcatcatactgtttattttaggggttgggtggaggaggcaaaaggaaggcaagggacatcctagtaatcgtactaaggggatggctgcagtttgagctgctttcccctaggcctttctggttcagtcaccctttctctggcagcaccagcccgagccccgagacctctcctgaaggtgggcttcacagattcctccaccccatcaggagggaatggattttaggaggacagccacagcacctttaggccattagtttccagggtggccggagggcaggaggaagggagcgatgtgggggctataggggactctggcaactaagactttacagagcagaaagagcagaccagaggcttctcaaaaccactaggacttggcactttcaactctttaccccttgccaagaatttgaggtccttaagggttgactgtgaggggcagctagggtgtagggagtgggaatgtttcctagagcaggtccttaggcagtggggtcctcaagcaccttttctcc

SEQ ID NO: 443731 - DNA, 456 bp, Homo Sapiens
ttttacagtgaaaatggttttatttaacatgcagcaaaacaagggcagcagagctgggatatccagtacagccatttgccacgaagcactgacctcaacagtaacgagtaacactcaaataactgtaatgtctagagcataacacaaagttccatttccacatagtaattccacagacattcccagggctgcagcagccagtctctggaaagctcttggatttattccttaagtagtgaaaaatgattcacttttgacttgtcctcttctaatgaagcagtgaaacctgcttgctaaagacagcgaggggcagggaagggatatgacctcttcccatagtaaggaataaggaagcctggcaaggggcagggaggaaccagggaacatggtctgtgccaccttcctttccccagagatgtccgattgctgagcttgttcacctgggctccgcaagct

SEQ ID NO: 443732 - DNA, 1258 bp, Homo Sapiens
  misc_feature (855)..(876): n is a, c, g, or t
tttggtggaccgggaggggcttgggaagtaccaatgttcccccagggatccacatcccaggcagcttagaggtggctgggacaagctggcgggggccaaagcactgttgaagcaatagggtctggtgactcagctcaagtgtggcccgatctcatcacctccagacccaacatctcgctgacagtgcccctcagtagctggggaacagttgaggtttctgggcagcacattaggacatatgtctagtgtaacatttgtgatcctgaggcctcctgtgtccagccacaggtgccacaccacatgccatctggtgagaggagagggaggccaaagcagtaggatgtagagtggcggtagattccaaggggaggatagcagtttatttcatgccaagcaagaggtagtcagtaggatggcctgtccccacggctggaggcacgcttttcccagaaagctgagtacctgccttctggagaaggggaaatactggctctcttcattttccttcctatccctagtttggcctgtcatgaggccaaattccatgtcctgccaagatgtccataggacacagcctgccactgccagggacaagcacacaactcatcactccgtggccgttccaggacgatgctgtccaccagaggcagggctggggactttgcagtatgccagttccttattctgggccaggcaccttcctgggccacctccctggggatggcagcaggagctggttggcgggggaagcatggaattgcaacagggctgcagccccttgggccgtgcatctgtcaggtgtgaggatgtggctcttgtggggaatgacccatgacagtctctctttagagactnnnnnnnnnnnnnnnnnnnnnnagtggcttcagtgaatgccagtagaaggaagcaaacacctacgccaagcctgggggtccatgttcccgggacagcagtgaagtcaggggccactccgcacccctgacagcatatggccacttcaagtcacacaggtagataaaaacaggtccttttaggggccaaaggagaggttatcacagcagcagtttggttctcagcagaaatgcccagggcccctgttccacatcaaagctacaagcactgttgtcagggcatggagagtgacgggaccagagccctcctcgtctcagggcagcctgcctggcttgaaggtggagatcacagcgtcctctggggtcataggttcccccactgttccacaggagggaactggtccacc

SEQ ID NO: 443733 - DNA, 1665 bp, Homo Sapiens
aagcaatttaactttttatttaaaagagatggggtctctctgttgcccagattggtctagaactcctgagctcaagtgattctcctgactccctaagtgttgggattacaagcatgagccaccacgcccagctgcaatttaattttaaatcagagttcaaaacaatagaatttatgccactgtgtgtgcctgccaaacgaactgaacagacagtaactgctctaatagttcagaggagggaaagatcacctcaggctgggggcgagggatgggcttaaggaggggcactatttgagctgagtctggaaaaacagccagaattacaggaagcagagaggctaccagaaagtgggtgtagaccagactgaaaggaggcagcattctcctccttgggccctgggagctcctggggagtaagacttgagtctcccccatctctgcaaccccactgcaggtacatagtagtggcagtttgtgacatgaacgggcaaacagccagggcagatgcagctaacgggtagcccccagtgctttttgcacctctccaagattgggtgactaccagtcccctgaccccttcacctacccaatcctttcctgtcctcggttcttttgccactgtctccaccctgggaagtggcatcaacacaggagggcattgtgctccttcaatgtggtctattcatacacatatagcccctttccactgctcagtgtcggtgatgtgactcagaagggccacattttcgctgggtcccatctaaaggcctgacactgcagtgcaagaggcgatgctacagtctaggcacacggtcctggcacgcaggaaggagacagagcctctcccagtgcacacatccccttctctgatttctggaagaagactaagaaaggagtgggaaatcgcagggaggtccaggcccagggctaataggtggatggatctcctgggttcagttccttctctgagctggctcccactcctcttctgggatggtgaggcccaggagactacatgggccaccatgcccctgcgcgccaatgctggagcatcagagagagagttggggctgggttttgttggagatgattcagcatgttcaagccagcaggccctccatggaggattcatgtccaaggagggaggtcatcctactgacatcttgctctagaggtccaatgtcctgctgtccgtctacagcttgctccagagctgggatcacacagtccacctctcacttcgggcctccacagtctgcaccaggccttcacccagcacagcaaagtcctccaggattgcttcaacattgggcaccattactagctccccacctcgagacatcaccatgcgcccctttgtgctggaggccttgaagggctgcggctggaagctggtgggcttccagaggacaccaatcacctctccaccatgctggtcatagaagaaaagggccagatccccaaaggcctccctgagctgcgtcagatagagctgaggaggatcatagcccagcacgggcagcagggatgagggccccggctggctgagcaggccccggcagaaggaggcagctggcgagtccacagcctggcggtgccgcgggatatggcgaggagacaggcgaatcagcacgtcgtaaatgtccaagggcggccgaaaccgct

SEQ ID NO: 443734 - DNA, 1132 bp, Homo Sapiens
cctcatcatcattaaatatttattgagtgcttactgtatgcaaggcactggggatacaaagaggtataattcatggctctgcccttaaggagctcacaatctagttggaaaaacaagacatatatatttttttccatacaaaaatcagtaacaacacagaggcctgaacaattgccaagtggacaacagtacagataataaagaagcaagaaacgagggttcactaaaggctatagtggggaagggagtgcttcactgagagagtgggacttgaactggtattaaaaacaagagcatcccgggcaaagggaacaacactcacagctcagaggcaggaagacactctgcgggtctaagaaatgaagagttaaatgtggctagattggaggtttggtgcagggctaagagagtaatactcgcttagccaggaaaggatgcatttgttttacgcattttgtgcgtctgaggggctggcaggccttgcacgtggcagtgtctatcctgtcagatttgggaggtcagctattaattagatcagctattaatcagactgttctcctaacactttaacttcatggatgtaccttccttcctttcctaatgccaactctgttttcccgggtaggtgtttcactgcctgaatgaaatcctagatctctgtcacagtttttgttcgctggtcagtcagaacctaggcccactggatgagcgtggagccgcccagctgagcattctcgtgaaggtgcgtctgcctggaagtatgcagccttgccgaaaggacagaggtggttttgccaatggagaattcatgatctttcctctgagtcagtaaagcatttcctcaatacacacacgtacagagataagatacaaagataaaaatgttggtatcagttgattttgaagcaggtaatactgtgccacctcacagtgctcaaaaatagttcagtcctgaatagtttattcagcccatcaaataagcattgggttgttctaacttcctcacatcctcccccctccttacttccttgaactaacccccatctcactgagataattatctgcttgtaatcaaacgggttctcccgaacgcgtggtcgacgatatcccggaattccggaccgtaccagcc

SEQ ID NO: 443735 - DNA, 354 bp, Homo Sapiens
  misc_feature (117)..(131): n is a, c, g, or t
  misc_feature (339)..(339): n is a, c, g, or t
ccatcatcattaaatatttattgagtgcttactgtatgcaaggcactggggatacaaagaggtataattcatggctctgccttaaggagctcacaatctagttggaaaaacaagacnnnnnnnnnnnnnnncatacaaaaatcagtaacaacacagaggcctgaacaattgccaagtgggacaacagtacagataataaagaagcaagaaacgagggttcactaaaggtctatagtggggaagggagtgcttcactgagagagtggggacttgaactgggtattaaaaacaagagtcatcccggggcaaaggggaacaacacttcacagcttcggggcngggaaggacactctg

SEQ ID NO: 443736 - DNA, 865 bp, Homo Sapiens
  misc_feature (178)..(194): n is a, c, g, or t
  misc_feature (207)..(319): n is a, c, g, or t
  misc_feature (348)..(463): n is a, c, g, or t
ctatagaacctcacctgtcctgagaataaaactcctggaatcatgatcaagtccagtgttaacgtggcccaacctgtctgtacttctggggagagaccaggaacatcactggactcctcatccccgtaattatttagagaagatgcaagcagcagatagtctccatgcggctggtacnnnnnnnnnnnnnnnnngagacagggtctnnnnnnnnnnnnnnnnnnnnnnnnnnnnnnnnnnnnnnnnnnnnnnnnnnnnnnnnnnnnnnnnnnnnnnnnnnnnnnnnnnnnnnnnnnnnnnnnnnnnnnnnnnnnnnnnngcacccaccaccaccatgcttggctaacnnnnnnnnnnnnnnnnnnnnnnnnnnnnnnnnnnnnnnnnnnnnnnnnnnnnnnnnnnnnnnnnnnnnnnnnnnnnnnnnnnnnnnnnnnnnnnnnnnnnnnnnnnnnnnnnnnnntgcgccccagccttggggcctgtctttgaatgggaatgagactgtgcaaaccgtggactaccctgtgtcacccacagctcagtggcctgcctgccggccctcaggggctgctgaccgggagaccagccagagcacgagggggtcagggctgtgtgggttttggcctgattctgcatttggttgtttctgggggccatgtagcctgcctgcattaggaaagcgctgtgccatctgatcatgagcccctctgcaccccctggtaaggtgaccttgcagcaggagctgtgccctgcctgggtaggcacccactaggtaggaccggagcaatcctggcagccgccacctgcacccgtgcacttgtttctcctcacagtttcaagtaaatccgtttttgaaggctaa

SEQ ID NO: 443737 - DNA, 384 bp, Homo Sapiens
ttttttttccgaggctcactacagccttgacctcccaggctcaagtgaccctcccacctcagcctctcgactagttgggactataggcgtgcaccaccacattggctaatttttgtattttttaatctttcttaacctggcctattatttgatttgtgtctaacttatttgtccaccaagcacatgaacagagatggagccaaactttcacaggcataggactcatatgcccactatgacgtatggcaggcaagttaatcacgggccagggtacaacagagaagtacacttcaaacacttcaccctccccacttcttccaattcccttcagagggtttctctcacttctactcacttttaccaaagggctcaaagatgccccgg

SEQ ID NO: 443738 - DNA, 1051 bp, Homo Sapiens
  misc_feature (564)..(573): n is a, c, g, or t
  misc_feature (973)..(987): n is a, c, g, or t
caagcaactactcccctaccggcgttccgtccttgtcctcactgccaaatccactccaaagccgaggatggtgagactgtgaagttgcaaagaaacacagagcccacccccttaaagaattacgatatatttaaagtttgcctctttcaggtttctctccttggctcctgcccctttcccctcccggctccttgtccttgactgaacctcatgggacagagaacctcctgtcccccacgaggcaaggcgcgaacccgcagagatctggggtgccctttggttccctgcgctgccctggaggcgtccatagaggcctttgccgccaaggacagcaattgttttattttcgatggttgctcgccaggcctgcgggtcgcgggcccacccagccgtcgaactttccagtcgttatcagcgctgctcctaacttaatggaataatgcaaattatagcctgcccagctgacacgtccctgcgaatgcgccggggctgagctctggccagccgctctctcgacgtcctggacggccggagggaatgaagctctgaattgtgacaaaagtnnnnnnnnnncaccccaaattctcaaagcaatgtccttattcctatcttatctcttaagcaattgagccttaccaaatgtcggggccgcacggaagccttgcatattttaaagtgtaacctgagccttcgcggtttcagcttcacttaaaacatgcaaattcttgaaattgaaaaatctgaaaaacttccgaagagttctatctgaataaatccaaatccattgggagtcgctttgaggagacaaaaccacagcgatttggggtgagggatatttgtggggaggcaggacgtgctggattgggtttccagggtcaaggtgtctctgggccttcgacgatagccttagcgcagagcagggaagtggcaccgctaggcagcaagctcagttgctctacttttgtgacccatnnnnnnnnnnnnnnnaccgccacccttgcctccgggccactgcccctctctgcaagctttgtccgctggagaccgttga

SEQ ID NO: 443739 - DNA, 465 bp, Homo Sapiens
  misc_feature (109)..(124): n is a, c, g, or t
  misc_feature (271)..(306): n is a, c, g, or t
  misc_feature (404)..(404): n is a, c, g, or t
  misc_feature (415)..(415): n is a, c, g, or t
  misc_feature (427)..(427): n is a, c, g, or t
  misc_feature (432)..(432): n is a, c, g, or t
  misc_feature (441)..(441): n is a, c, g, or t
ctttttgcaagggctttgaatagatatgcttttgcaagggctgaatgggaaaaggtaaagatgaagctatgcaaatgagccggggaactttttatatatattctttaannnnnnnnnnnnnnnntgcggggggaagagtgctgcctcgggatgtttatagaagcaataattgccattattagcattgtctgcggcagatagaaattgaacaggttgggataatatagggtagcagtaattattcttctaattaatggtcctttgctacttnnnnnnnnnnnnnnnnnnnnnnnnnnnnnnnnnnnnttatggcaggaagttatgtttccttgtgtccctttggcccagcgctgggattctgtgggagcagggagcctgggccatttccaaggtacggcggtggntcttccaaacnttccccgggggnccatncctgagggnctggctttcagggcccagttttcc

SEQ ID NO: 443740 - DNA, 350 bp, Homo Sapiens
  misc_feature (12)..(12): n is a, c, g, or t
  misc_feature (80)..(80): n is a, c, g, or t
  misc_feature (310)..(310): n is a, c, g, or t
ttttttttactntctctagtagtattatactgatttccatattatctctcctaagtagatcataatttgtcaaaggtcantggtccaaaatctatttcattttaataacttccagatcccttgcacctaggaaccatttgagcaatatatgttgaactgagagataaagaagatctaaggatcagagggaagggaagactaagtcacctccaaagtttatttagacaatagaatcctctgattcggttcatgcattcattcatttactcaacaaaatggtgtgggtggtaacaatgtgttatgcaatagnctgctgttgggggatgaattataaaagcaggcagtctctg

SEQ ID NO: 443741 - DNA, 1067 bp, Homo Sapiens
  misc_feature (147)..(159): n is a, c, g, or t
  misc_feature (807)..(807): n is a, c, g, or t
  misc_feature (903)..(903): n is a, c, g, or t
  misc_feature (996)..(1012): n is a, c, g, or t
ttcgacatataaccaaatgttatttaatatcttaaaaagtaacacaatccaaaatggatatttcacacaacactacataaacaacatgaacacagtatcaccatagggagggactttcaaatatagacttacaaaaatccctgtccnnnnnnnnnnnnnaagttattatactaagcatgacaagtaatcatcatttacagtatggtacactgacacgataaaaaccatgttacaaatgtgctgttataaatcagtaacattagggaagacatttcatgaactgtaattatttcatatgaaatactatacaatataaacagaacatccatcttgggatgacctttacagcaaccagagaccaagtaatttaaaattttttttcagtgcaaacacattttattcaaggcagtcttggctgcaaaactcctttctaacatacagtaaatcccacttgcacgtcttaattcatttaccctaatgcaatagtcacattcagtcactcagagaaagatacctgcagaattatgatccctttaaacttgacgtttaaatttaattctcttctagaacgtagtatctgtgtcaactgcctctaagggactttaatttttagctgtcaatacttgcatgaaggtgacccctagggccgcctctattcctaacccagccaagtgtgcacgatactgcacagtgttctgcccttccaatgtggaaaccatggcggtgtgtcagtatcttaggtgggagaatggaaaggaggacctcggaggaaaggaagtggaggagctgctgcattgtgtacttcantgattagtttcccggaactgcagaggacagatattggaggagatctcaggtctcacatttggtacctcttcttggtgggagcaagggaacaagttnactaagaccagccaagcttctaaccttacatttccaaccttccagaatcatcgctgcctgacttgaaacaccccattccctccttggcatgannnnnnnnnnnnnnnnnccacatttgaagccaacaattaatgattacagccctataactgatcatgtacaat

SEQ ID NO: 443742 - DNA, 275 bp, Homo Sapiens
  misc_feature (258)..(258): n is a, c, g, or t
cagcaagtgggaactcagcattcaagttaacttgtagagctacccagctgctaagagcagtgtgatctttggtgctcttaggatcactttggtatctgctcattttcctttttgtctaccctataaagcacaaaatcgagtgggtaaaaagtatgaaaccagcactgtttctactttcttagaggtctggtatctagtgagcaggctgaggcctcaggactagttcagtgttaaggatttcatgttgaaactcatttncctcgtgccaagcttga

SEQ ID NO: 443743 - DNA, 467 bp, Homo Sapiens
tttttaaaagaaaacgcagttggctttattctctactagaaggagttacaactctatctttcagaaagcccttactgaagatgaaacaaagaaaaataaagaattggagtccaacacgtgcagcttcaagttgaaagagaaacagttgtgttgggattaaaagccttactttaaaaagtctcttgcccgggtttggattcaaaattctctgcagtatgtttgttctggaacttgttccctttgccttaactgctcctctagatattacagagttgaaaactctgaaggggttggcactgcatgatatcctgacagagatacacttgtttgtgcatagaggtaacttacattatcccccagctgagaagctgtggagaaggtagcctgctttggggttaaggatggttaggacaggaggcttcattcttgaagcaaagaaactaatgaattgtaaatcagacccttct

SEQ ID NO: 443744 - DNA, 1632 bp, Homo Sapiens
  misc_feature (1618)..(1618): n is a, c, g, or t
ttttttttagaatcataaatgtaattttggagataatgtttaccttgagtaggaagacacttggaccatattaaatttgaaagtcttctgttccagaccaaaatggggtaggctaattccctgtcatccaagcaactaaaaggtaaaaaccttataactttaaaataaaaaaggttatttttttcccctataaaagacaggcagtatgagttaatacattaaaattattttgtacatccctgctccaaacaaccacaaaaatggtactttttaaatgcctgcccatcctctcctggaagggggtttttccaagattcggggtgactgattcatcccacagccccaggcagcagtttatcctggaactgtcctctgttctcccatcactgctgagccctgagaattgtgaatggccctcagagcatctaggcctctgcaacaatcaggtctctggtgacttgaaatgcagcaatgagggagctcagctggatcttctcgttggtgccaacagaaagcctgtactcaatgtctgccattttggtcaataaatgtattcgaactgaagatggaaagtcaactctatgcacaaacaagtgtatctctgtcaggatatcatgcagtgcccaaccccttccagagttttcaactctgtaatatttctgtaggctgtggtgaaatcttgattcaacatccagtcccaggatgttggcaatgtctgacttgagcgggtgcccggtgcaggtgtagacagtctcctctgtcaccttcccaaaggccatattggtgctctgcaaaatgttcagagccctacgcatgtctccactggaaagagtgactagtgctttcattccatcttcacttatatcaactttctcttcttccacgacatgttccaggcggggaaccatgagttcaggagtcaggggaccgaaccgaaacctcgtgcagcgggactgcaaggcagggatgatctttgacagatagttacagatgaggcagaatctggtattttctgtgaatttctcaattactcttctcaaggcattctgggcgtcctgagtcatggcgtctgcttcatccaagatcactagcttaaagcctttcttaaatattgtccttgtgctagcaaagctcaggatcggtcctcgaatgatgtctattcctcggtcatctgaagcattcagctccaagaccatggagccaaattctttgtctttatatagctgtttcgcacaggctaggatggtagatgtcttgcctgtccctgggggaccgtagagaagcaagtgtggcagtcggtcttcattgataaacttctgaatggtactcagaatgtcctgatgagaaatgagatcattcagggtctgtggccggtatttttcaacccagggcaggttcctgatcttggtcgccgcgggctgctcctgctgcttgagtgctgaggtctccatggcggggagacgaaggtgaccagatccgctgagatcgtcgcgtcacccaagcgcctgcacagtgaccagccgcgacctgaccctgagaccctggcacttacagcctcgtgccgaattcgccacccaggcctcgctacttagacggtgtgcgggcccttgtcaccgcntctcttctagtttc

SEQ ID NO: 443745 - DNA, 382 bp, Homo Sapiens
  misc_feature (233)..(233): n is a, c, g, or t
  misc_feature (348)..(348): n is a, c, g, or t
  misc_feature (353)..(353): n is a, c, g, or t
acgaaatgcttctcttctatagccaggggtcagagggcagaagacaaggtgcaggactccagagaaggccaaatttccagcccagggaagtcccttctccaaagtcagggccccaaagggaagggtggggtccctgatatctgagatggactatctgaggagacactcttgagacattgaacccccagattctcctgtacctcctggcctgcagaagtgacccattgcctctnttggaagacagaggtcctcttttgcttaaagaccatgcagaaactaagggaagggaccttacaagataaggagttcctctctccagcatctgtccccacctcccctcctgaccancaggntcaaagctggatcattatcttcagcatga

SEQ ID NO: 443746 - DNA, 452 bp, Homo Sapiens
  misc_feature (373)..(373): n is a, c, g, or t
  misc_feature (380)..(380): n is a, c, g, or t
  misc_feature (410)..(410): n is a, c, g, or t
tttttgtgtgtgggtgtgtgtcaagttttaatacacgctagaacaagccacaagagggtgctgctaggccagaactacactcaccccaagcccaccccaggaaccccaaagcagaggtcaggaactgagtccacagctcctggggaggcccaggcacccctgaacgcttctgtcacctctgacctcccatcttgccctcagcctagactcgtcccttccctaccagtcccttccctagacaaaggcccctcccctccctgggtcccaggacttcctccctcaagggacagaggaagcagccagagagcgacggttcagggccctgagggtccgggctctccaggagaagctgggggctctggaaccaggtgtngggtaancgttggcaggaaggggctggttcaggacanctcaggcgcccacacactccacgtagttgggcagggtacagg

SEQ ID NO: 443747 - DNA, 433 bp, Homo Sapiens
ttttttttgaaggtagcagtgcttttatttactttttattgtcatcaagcagttttctaggaattttcagcaaaataccaattcagctataagtctaatatgaaacacaggaactgtgaatataagcttttggtgcttgctatggaaaaatcaaatcaatagctttaatgtcttcttacaatctcattttgtttcactatagctctgttttagttagatctgcacatctgttttgctccaggtagttaattttgccagttcagtttctctgtagatttttgccataggtaggaaaagggattttaaatattaataggccccttaaaatattttattaccattttacttaaatgaacgataggataatgtacatgctttcttttttgtggcaaataccccagggcaatctggacttggaaggacagctttaggg

SEQ ID NO: 443748 - DNA, 746 bp, Homo Sapiens
  misc_feature (731)..(731): n is a, c, g, or t
gctttgatgagctgatctatttagtacatgaaaataaattcagaagcatattaagatgaaacagtgttcactcacaaatctcccagttgccgttgtgttccccaggcttcacagacagcctggaaaaactcctctagggcttgcagacttagctggaaactaatcctgagcaggaagcttggcttgaagggataagaggggaccctccaggttggcaatcacaccgtttattcgcacttggcagcaagacaatggatgatgtgggaggtgccaggcccctgggttggcactaatttggagtatggttgagacagggctggagagaggcatcttagaggtggcccccaaatccgcaatcgggagaaaaaggcaagaatcgactagagattgtcaggataaagggaggcactgcccacccctgctatgtctgtctgcccccacaggggcttctttaatacctggggttccctgggtgatgaatgtcctcctaccctggcaaggggccatacctgtcgccgtggccccataggcaaccctgatgaaagagtatcatttccaagggggctttggtttctgggtggccccacctcgtcgtggggtagatggcactgaaatgctaactgagcgagccctggaagtcaccagggggctccggaaggtcacccctgacgtggaaggcctgagatcctgaggcccatttgtgtggggggcactggtggctggatgaccantgctggggacattca

SEQ ID NO: 443749 - DNA, 417 bp, Homo Sapiens
  misc_feature (218)..(218): n is a, c, g, or t
  misc_feature (312)..(313): n is a, c, g, or t
  misc_feature (327)..(327): n is a, c, g, or t
  misc_feature (342)..(342): n is a, c, g, or t
  misc_feature (353)..(354): n is a, c, g, or t
  misc_feature (377)..(378): n is a, c, g, or t
gtgggtacataatagctgcatatatttatggggtacatgagatgttttgatacaggtatgcaatgtgaaataagcacatcatggagaatggggtatccattccctcaagcatttatcctttgagttacaaaccattcaattacactatttttaaatgtgcattattgactatagtccccctattgtgctatcaaatagtaggtcttattcttctaaanatttttttaccgattaaacatccccaccttcccttcagccccccactaccattcctagcctctggtaaccattcttctactctttatgtccatnntagttcaattgttnttgaaattttcaagnggctcccacannaataagtgagaaaacatgccatnngtttgccttttctggtgccctggccttaatttcatttaa

SEQ ID NO: 443750 - DNA, 485 bp, Homo Sapiens
  misc_feature (11)..(11): n is a, c, g, or t
  misc_feature (21)..(21): n is a, c, g, or t
  misc_feature (33)..(33): n is a, c, g, or t
  misc_feature (43)..(43): n is a, c, g, or t
  misc_feature (50)..(50): n is a, c, g, or t
  misc_feature (60)..(60): n is a, c, g, or t
  misc_feature (93)..(93): n is a, c, g, or t
  misc_feature (129)..(129): n is a, c, g, or t
  misc_feature (171)..(171): n is a, c, g, or t
  misc_feature (399)..(407): n is a, c, g, or t
gggaaacccgnccccaaaccnggttaaggggtnaaaaaagggnccataanccaaacacanatattaccatacggatatccataataacaacangccaacagctcacccttttccacctacctgttagcntttcctgtgtccaacacatttcctgccctcattccttttttnagccagttgtaataatttatcctaatacatatccatatttaagaatattttacatgtcctttcctaactatcacatgcagtgctgctgaggacatgttcaggttctgtgtaactagtgaggtcatatcgcaaaataaactttcagaagtaggatttggggacaaaacttatgtgcagccccagtgccgcgggttattgctaaattggcttctgttgctgttgtttagnnnnnnnnntggggacttgagagttcaggcagattaagagctgctcatctgcctgcatcagaacaagttcactgaggacatgtgaga

SEQ ID NO: 443751 - DNA, 833 bp, Homo Sapiens
  misc_feature (40)..(40): n is a, c, g, or t
  misc_feature (46)..(46): n is a, c, g, or t
cattgttcattttgcttagttactctgagaaagatttttnctaagnaattaagttgctgatgaaacgtctaagaccaattaataccttccatttcatgaatttaagcttcaaatgaatccattctgctgtgtagtccatcttctgagtgtttcagtttcataatcaaatttttaatttccagaaactctaaatatttttttcatggcatcctattctttatgaacacagtatctttatgaattgctgaagattttgattcattaatttaaaaatttcatgtttctcctagtaactatcttcttgaacaggttaattttaatttcatgcctccttttatgttactggttttcttcaaatttgatgattcttggttgtccatatttataaatgagggcctaagattaaagttggaagtgttattttttcatccaaatgggaattctggttcacttttaatgaacacaaatgattacaggcacttatgtggtgattataaacggaagtggcaggtcatcatagttagagagatcatgtgggcagcttaacttcagttcctcttcggagccattttggataattcccttattctccgatcccagcatttcttgggtcagagctcccacttcagatagctgctttcttagcctggtggcaaactccagaatcagatgctccaaagatgagtggaatggcttagctgttccatcctttaattaactggtacttaaatcatctgcttcttatcttccagaaatttcactgttcaaatttctggttttccaactctgctatattttattttaatatttctccagtcatttcaatgggattc

SEQ ID NO: 443752 - DNA, 1095 bp, Homo Sapiens
attttttcatagacctacttttaatttggttcattaaccaaagaactatgtttccctagtttctttgcttttctggttttcaggacagtcagatcagagaatgcaggtcctttccaggctgttgcttatcagagtgtctgtcggtatatcccctgttttggtcttattctctgaagaagatctgctatttctggaccactcctcttcttttctttgacttccagttccagaagctcgcatctggctgacaggagaacacattctagcaatgaatccttcaaaagactcctgccgctgctcagtagctgggactcctacgttgttgctcggaatgttcctgaagcccgtcgtggatgtacgacaacgtggcgcaccaggatacaggcagtcgacgatgcgcaaaggaattctagcatcacctgtaattttctgaaacttcattactgttccttcattgtaatgctgactgcatacaaatagaaacctggatattttgcatttgccctagggcattctgcttcggttctggtttttcatcttcaagcgccttcttttcttctttcagcgtggattactaacagttagaagtcatcctggggatgacctagtcattgaacacatctgactgatctatcccagtccattgtggcaagctgcccaagcccagcatctttaaggagatccaagaaagcatgaaacttctgaaaagaattctcaatgctgccccaaaacaccttcatcactccaggatcatatttgtcaatgactgtgccatgaagggcttcagacaaagagaaatttatatttcttaactgggcattttcatgttccagctgtaatgcttcttgttctatactagttttctcaggcacttcatgaacactctctgaagaatcatcaacctcttcaacttcagaggatgaaggactctctactgtcacagtcacaggaaaacctggttgcttaaaaaaagaggacaagattgtataataatataaaccgaataccaaatactaaaggacatctaatcaaagtgatctttctgaagtgttaagtcattctctataaatgtctatcactactccttagtctaac

SEQ ID NO: 443753 - DNA, 679 bp, Homo Sapiens
  misc_feature (66)..(78): n is a, c, g, or t
  misc_feature (271)..(338): n is a, c, g, or t
cggtgggtgaagcgacaaccgatcgcacgccaggcggagcatagacagatatcattgttaagaaannnnnnnnnnnnnaactccactactggatgggccaagtggtgcatctttgggccgaagggagaggtgattcggaagtagacttattctggggggtggtgacaggcaagaggccatgcatgaacctgtcgggtatccagggtgggtttaaaggaagttttcgctgaaaggcatatagataacagtaattgttgtttgtttatatagnnnnnnnnnnnnnnnnnnnnnnnnnnnnnnnnnnnnnnnnnnnnnnnnnnnnnnnnnnnnnnnnnnnncaagttaaatgtccaatttatttttataacttgaaaccagaacaaacttggttttgaacaagcgtacaaatgaaatggcagacacatgctgaactcaacattgtgacattaaggaaaaaaagaggcccaaaatcttgtacagagaataaaggaacaataaatattttactaagccatattgaaatgacctcctgtcatctcaacattttatccataataaaaaaaagtgcctgtttcttaaacagagcacaaataccaagcaataataaatagttccaaacttgtagtaaaagacaaaacctccaagtaaacaacaaaagctcatacaataagtaatagcc

SEQ ID NO: 443754 - DNA, 759 bp, Homo Sapiens
  misc_feature (77)..(77): n is a, c, g, or t
  misc_feature (113)..(113): n is a, c, g, or t
  misc_feature (126)..(126): n is a, c, g, or t
  misc_feature (134)..(134): n is a, c, g, or t
  misc_feature (189)..(271): n is a, c, g, or t
aaaactcctgcattggtaggattgccccaaaggatgcctggttaaactttccataccctgaaatatggttccttacnttcctgaaataaaaaatggcttcctgatattggtantttattttaaaantgccttantcccctcatcccaaaagacccacccactttatcttaaagcctacttggctttacnnnnnnnnnnnnnnnnnnnnnnnnnnnnnnnnnnnnnnnnnnnnnnnnnnnnnnnnnnnnnnnnnnnnnnnnnnnnnnnnnnngaccaatggaggatgaaggatggagaggaaacgcaggggaaggagagagaacgagatatggaaaggcaccaaattcatcccaggccctcgcattcggaaactgacggaatgtaggtttcagagagcaaagcagcaaagcagggaagaaagacaagaggccaacactctccatggcacgaaaggtcctggctgtgatggagtctccttcctgaaatccaatttgtaccggtctcaacagcaggtcacttcacctggacccagctgaatcaccagctccttttatgatatttgtgtttgtttcacaatttctcaaggactaaagcagctcagtttgcattgctttctgctggtaagggcgggagaggtggtggtggtgaccgccacaggagtgatggtagagaaggaagatgttctctcgctctctctcctctacatctgacatcttagagatggcctcttagagaaagggaggacgatgtggaatgtta

SEQ ID NO: 443755 - DNA, 746 bp, Homo Sapiens
acgggtcacagcaccttttattcatcatcatacaacctgatgtgacaggaaatacagccaacatctccaaacagtcttaatgcctttcacaatccaatgggaaagcccaagacgccgcctctagtggggaagccatgagccttccgcctttggatgccacaaatgggaacgatagaggtacaggaggtctgccttccacgccggaccctccagcgcagtcccatgccggacacagcgaggcggcacttggcacagaacgttttcctgtggcctccccgcaagactcacaccagtggatggcactcgagtccacagctgcacggagccatgggtccaaaacgaattctccactgagatgggtccacagagcctggtggccacaatggctggatctaatgtcttcctttatgaatacatctgtgcacctttggaattgaagtttaaacagaaggaaaatatgaattttcccccgtttcttccactcgggattctggctgggcttcagccagaatggatacatttggattgcagagaatcctgagacaacccggaggagcccctgggggcagcagggaggctcactcctcacacacagccgcgcgaccctctgcatctgggcagctgtgaagggtggacagggacagatggtcctacagtgcacatgactttatcatgttaacataaaactaaaacacaatattggccataacagtcttggacacataatgtatgtttgaaataaagtt

SEQ ID NO: 443756 - DNA, 153 bp, Homo Sapiens
gatttctggttttaaaaaacataaaattatagaatccagataattcgctggagtcattctgatccaccatgtagatctgtatttagtatcatttggatttggagaagtgttgattacattatggctgtgtaataaaatttttattaaaactgc

SEQ ID NO: 443757 - DNA, 1952 bp, Homo Sapiens
  misc_feature (417)..(464): n is a, c, g, or t
  misc_feature (1071)..(1088): n is a, c, g, or t
  misc_feature (1091)..(1119): n is a, c, g, or t
  misc_feature (1138)..(1148): n is a, c, g, or t
accctgtcacataatatagggcgcgcggaatcttatatgtatttggaagaaaacctctttttcttccataacccctctaatatatttattatttttttagatggggtggaaggactttatactcccagatataatggttgcacaccccgcacagatatcttgtggtagttagatccacatttagtgcccattctatattcttttggggtatctgctgaggcgaagcagatccgttatcgggagccggttaacaccaataagtattgtcccaatagtgtggtaattatgctcacgcttggttgatttgaatgcgcccccctcctccatgaaggttaatagcctggggtggatttaaacagaggggccatatggcgcctcacacaatcctcagtatgtccccgagggactataaaaagnnnnnnnnnnnnnnnnnnnnnnnnnnnnnnnnnnnnnnnnnnnnnnnnacgcggtgttttaggtacaaaattgggttccttcaaacttccctttaacttccaggtgatttccaccccgccttaaggccttcttcaaaagtgctggggattacagggcgtgatgctacttgcacccgggcgtaacttaaatctttttgtgtttgctctccacattcatattcagaaatttctcttaaaaacaaaatgtagttcttgccaaagcagcaaaacagaatcaccaggaagaggctggtatactgggtgagaaaaagaagttctacgttcagccaagaagctgtgggctgtacccatgggaagagcaagacattcactgccctccctggtacctggccatgggcttccctcccacacctgccaggacacagcctgcaggtcagggggctaaactggggagttttctccaaagttgggaaaggatgggaagagtaggtgggaatggggaagttacacagctacagcagtcaggcctgtttagtaagaagaatcacatttaatgagtttctttcttgcagtttcagatgctcaagtacagctgaaaaaaatctgaaacagctatagacccatgacagactgatacaaagagtactgcattttnnnnnnnnnnnnnnnnnntcnnnnnnnnnnnnnnnnnnnnnnnnnnnnntctcgctctcaaattagannnnnnnnnnnacaaatgtacactttttggaaactaaactggttttgaaaccccttcttccaaaaagaagggcggaagagaaagattgaagagaggaaagaggatcgcaggtgcccaatccccgctccccccacaaggtcacgtgccgaatgttcaatgggtgggccaaggcagtctgtagaggagaccgcctggtgctgctgctattgccccagggggctccaagcaagattcccagctccatggtaatactgaatgcgtgcagagtggccaatgaactgcgcggttaaaaaaacaaaaggcaaacacaaatctaaagacatggataaagcccaagagagcccaggcccacactgggtggggccctgggggaggtgaggctggtgggagatggtgtgcagacaaaggaggtctatacagcaaatggtttatattacagatgactggcagtttagagtctcttcccagttcaacagctgctccagcccaaagaggctaaatcaaaggaaaggaggaaaggtgggacgctgcgatggggcatgcagggtcagaagcagcaggctgggtgtgctcaaataagccctcgtcgttttttgtagtcttccaagttcagagatctccttggagccccatccttggctggcggagccttggaggtgatggctaaagcctttgactctgagctgggaacttgtaagtcaatcttcacatcaaaatcgtgtactttgaacagatcttctgagaggtcactggctgacttagaattcaaatctttatctttgccttgaccatggaatgtgaagaggaaagccgct

SEQ ID NO: 443758 - DNA, 430 bp, Homo Sapiens
gggttttgtcagttcacatttatagcatcagtttaataattcagaagctgcattcactatgcatagaattatttacagactaatatgagcaactctacatggacatacggtaagctctatctggtcagttgccagtcattgtaaactggctaatgggtccctttgcctatcacctgcaccctccttttcatgactcacagcttgtggccgtgtcctccgctttagccataggaccacaggactggtcaatgtgacatgggactgggaaacgtaatgactcttaattatctcaggttgaaggtgcgttacagaaagatgggcaggcttccaaagaaacatcttcctccactgggctacatgtcagcacatttggaaccaacagtattacaaatgccttctataccctatggaaatattttttacagttctt

SEQ ID NO: 443759 - DNA, 325 bp, Homo Sapiens
  misc_feature (150)..(150): n is a, c, g, or t
ggagaatgtgggaaatcctttagtcaaaagagcagcctcattcaacatcagcgatttcacactggagaaaaaccttatgggtgtgaagaatgtgggaaatcttttagttcagaaggacatcttaggagccatcaacgagttcacgccggnagaaagacctttcaagtgtggagaatgtgtgaaatctttcagtcataagcgcagctttgttcaccgtcagcgagttcacagtggagaaagaccttatcagtgtggagaatgtgggaaatctttcagtcaaaagggcaacctcgttccacaccagcgagttcacactggagcaaga

SEQ ID NO: 443760 - DNA, 929 bp, Homo Sapiens
ttttttgattgacagtaagtttattgttaatggttcttacagagtatctttaaaagtgccttaggggaaccctgtccctcctaacaagtgtatctcgattaataacctgccagtcccagatcacacatcatcatcgaagtcttccccagttataaagaggtcacatagtcgtgtgggtcgaggattctgtgcctccaggaccaggggcccaccctctgcccagggagtccttgcgtcccatgaggtcttcccgcaaggcctctcagacccagatgtgacggggtgtgtggcccgaggaagctggacagcggcagtgggcctgctgaggccttctcttgaggcctgtgctctgggggtcccttgcttagcctgtgctggaccagctggcctggggtccctctgaagagaccttggctgctcactgtccacatgtgaactttttctaggtggcaggacaaatcgcgcccatttagaggatgtggctgtaacctgctggatgggactccatagctccttcccaggacccctcagctccccggcactgcagtctgcagagttctcctggaggcaggggctgctgccttgtttcaccttccatgtcaggccagcctgtccctgaaagagaagatggccatgccctccatttgtaagaacaatgccagggcccaggaggaccgcctgccctgcctgggccttggctgggcctctggttctgacactttctgctggaagctgtcaggctgggacaggctttgattttgagggttagcaagacaaagcaaataaatgccttccacctcaccgcaaaccttctgctaaattgcatgaccaggctttccaaaaacaagacattctcatgtcatcaggtgaacataacctggggaccttagaatcaggttaccgatcccgggaattccggaccggtccac

SEQ ID NO: 443761 - DNA, 1026 bp, Homo Sapiens
attttccggatgcgtcgcttcagcgttctcgtgtgctacgctgctgcagctgccgcctcttccaggcgcaccaggtaaaaaagagtgtcaagtggacatgcaaagcttgtggagagaagcagtcctttttgcaggtctctagaagaaactgtcagtgccagtgaagaagaaaacgtgggacaccagcaggctgggaatgtgaagcagcaggaaaaatcgcagccctcagagagtcgctggctgaagtatctagaaaaggactcccaagaactggagctggaaggaacaggagtgtgtttcagcaaacagccttcatccaaaatggaggagccaggcccccgcttcagtcaagacctgcctagaaaaaggaagtggagcgggagcaccgtccagcctccgtgcagccgtggcgtgcaggactcgggtggctctgaggtcgcctggggaccccagaagggacaggctggcctgacatggaaggtgaaacaaggcagcagcccctgcctccaggagaactctgcagactgcagtgccggggagctgaggggtcctgggaaggagctatggagtcccatccagcaggttacagccacatcctctaaatgggcgcaatttgtcctgccacctagaaaaagttcacatgtggacagtgagcagccaaggtctcttcagagggaccccaggccagctggtccagcacaagctaaacaagggacccccagagcacaggcctcaagagaaggcctcagcaggcccactgccgctgtcccgcttcctcgggccacacacccccgtcacatctggggtctgaaaggccttgcgggaaagacctcatggggacgccaaggacttccctggggcagagggtggggcccctgggtcctggagggaaccaaatttctcgaacccccccgactatgtggacctctttaaaacctgggggaggacttccaaggaggatgggggggatctgggactggggcgggttattaatccagaaacccctttgttaggaagggaaccggg

SEQ ID NO: 443762 - DNA, 655 bp, Homo Sapiens
ttttctttgatcttaacttttgatttaattgatcacagtggatttcttacttgcctcagaaacaaagtaaaacaaaatagaaaaagaacatgaacacagtctaattatttgtgggctcaatgttttctaggtatatatatttctatctccatgcagtcatataaattacatttccacatatcaccagaatataacaccaatgacagtacaatatcactgatatcccagaattgctaagatctataaacagtagagtttcattctgttgttaggagacatatcttggctgtttttttccctcttaaagtctttcaatcaaaggaactacaagcactctgcttacagtccgtgatggtgtcctcgatgaaaatggtagttttatttggttctccaagcactgcacccataggcatctgaagaagtaattcaaacttctctgggccttccaaggtaggctgtcccaggtcatcaaggatggtcacttggaatgtctgcatgcgcacgcctggagcaaagtccaggtttcggctgataccaacataatctgttccagcttctgctgactcctgctctgactttctggagcgcacggcgatggatgatggttgggaaagatcagtgcctcttatccaaacaccaaacctccacgtagcga

SEQ ID NO: 443763 - DNA, 423 bp, Homo Sapiens
  misc_feature (120)..(120): n is a, c, g, or t
  misc_feature (360)..(360): n is a, c, g, or t
gtgggctcaatgttttctaggtatatatatttctatctccatgcagtcatataaattacatttccacatatcaccagaatataacaccaatgacagtacaatatcactgatatcccaganttgctaagatctataaacagtagagtttcattctgttgttaggagacatatcttggctgtttttttccctcttaaagtctttcaatcaaaggaactacaagcactctgcttacagtccgtgatggtgtcctcgatgaaaatggtagttttatttggttctccaaggcactgcacccatagggcatctgaagaagtaattcaaacttctctggggccttccaaggtagggctgtcccgggntcatccaagggatgggttcacttgggaatgttctgcatggcgcacgcctgggggcaaagtccc

SEQ ID NO: 443764 - DNA, 525 bp, Homo Sapiens
aagttttgctttttaaagaaaaatgttagttcagttccaagtcatgtgggtaccaggcagaggcaagggggcgtcaccaggggaaggaacaggctcctgcaggaactgctccaactcctgatgggtgttagggccggggggtccctgtcaaggctgccttgggttttgacaacccaagaggcagtcaggatagaaatgctggggagcccccaggaccatccaaatcccacatgacagtagaaatcttgcttttgacctgagaatgggccccgctccgtccaccctctggagcctgccagacactggctactgttccgagtgagctggctgggtaacccgggccgctgcaggcttggaagcctggccttcactgaggaggccagggcctccatctgggggtggtggggcagccgccaggccggcgcagggagccgtggcctctatggtcttcgcctccgtcgtcttcccctccatcaggccgcacccctgaagtggcagcacggagagctgggtctcctcacacgg

SEQ ID NO: 443765 - DNA, 596 bp, Homo Sapiens
  misc_feature (41)..(41): n is a, c, g, or t
  misc_feature (64)..(64): n is a, c, g, or t
  misc_feature (82)..(82): n is a, c, g, or t
  misc_feature (90)..(90): n is a, c, g, or t
  misc_feature (108)..(108): n is a, c, g, or t
  misc_feature (153)..(153): n is a, c, g, or t
  misc_feature (320)..(320): n is a, c, g, or t
  misc_feature (325)..(325): n is a, c, g, or t
caacaacttcacctcaataaattcaatgggttcaactgctnaatttttagaagaaaaggttccnagcaacagaatgggccgnttaaagangtcttgcttgctgggcgntaaaaacacttaaaccgccctcgtgctggcccagccggggccaangctccccacagcagctgcaaggaggaactgccccaggactcgcactgaacagtgggggttggggcaggggctgcaggttagagaaggaggcccacgatgtgaggacccagtggaagctctatctttctaccttccacctgtgaccccgacccccaaaatcctgaacnagccnctactgcctctggccaagggcatgtgcttatgaaagcagcaccttcctaggaattagaaaaagaagccctttcctccaagtagactcagccctgacagcctcagggccgggcaccctgcacagcgcacaaccagaacaagtgtgcatggtggttctgctctgataccctgagtgagtgcctgtggttttgtgctccacacccaggcctcaccttcacccagggtgctagctagggtgggcacagaggctgagctggccccccttggtgtgt

SEQ ID NO: 443766 - DNA, 1216 bp, Homo Sapiens
  misc_feature (1138)..(1174): n is a, c, g, or t
gcgggggaacccaggtaattggggcttccctacgtcttgcccgggcgcggggggaaactgtaggcacttgtccggggccccagggggcccctgggtggcttttagcccttgccagggggggcttgggttccttaaaaagcgagggaaaaaccctaggctaaaaaacccttttcctaaaaagtcccctgaaggagtgagccggctgactgaaggccctctggggcacaggcacttgggggtgtggttttgcccagccccccgccaggctatgaggctccttagctgtgtgtcagctgcacaggatggaacaggtgaaagagaggggctggcagttccaggaggctcatgggaaagtccagggcagaggggagggccctctctgtcccccttcccacgctaaccgccgctcagtacacagggggcggctggtagccctcggtggtctccgcgttctgggtgaagggtggctgttggtagttgtccacagatgcacctgggtaggaggcgtaggcagtgttggggtccggagtggggtcaacgtaattctggatgaagtcgtccacgccagccttgtagcgctggtaggccagggaggccagcacaccccaggagaagatggaaaagaagctgaaggtgatggctgccctcacagagtcggcccccaccagcacgtccttcgggttggtgactgcccactggttggtgaggaagcagaaaccaacaaaccacaggaaggtccagagagctgagaagagcaggtcaccaatgaccaggtacttgcggtcagtggcgttgctgatctgggggaaatacgcgtcgaccaccaagaagaaggccgaggccaggaaggccagcaccccgatggcactgccatagcggcaggcatcctcgttgcggttgaacacgcagtacatctgcttagactcgtgggcattgctgtagccctcaccatagatgcaggagaacacgatcaaggcgaagaccaagcacacggcgcgcgccaccacctgcggctgcgtcaggaagcgccgcaggtcgaaggagccgcccgccttggccgcgccgtaggccccgctctccatgtcgccgtcgccgccccgctctcgacgaattcgagctcggccgatttggcctgatnnnnnnnnnnnnnnnnnnnnnnnnnnnnnnnnnnnnncgccgccccgcggtaagctgcattcccctatagtgattatcc

SEQ ID NO: 443767 - DNA, 1296 bp, Homo Sapiens
cccccctttctcgtccctaccatcgtcccccccctctctctccgctggcaccggcccggaatttttcggatggcgacatggagagcggggcttaccgcgcggccaaggcgggcggctccttcgacctgcggcgcttcgtgacgcagccgcaggtggtggcgcgcgccgtgtgcttggtcttcgccttgatcgtgttctcctgcatctatggtgaggggtacagcaatgcccacgagtctaagcagatgtactgcgtgttcaaccgcaacgaggatgcctgccgctatggcagtgccatcggggtgctggccttcctggcctcggccttcttcttggtggtcgacgcgtatttcccccagatcagcaacgccactgaccgcaagtacctggtcattggtgacctgctcttctcagctctctggaccttcctgtggtttgttggtttctgcttcctcaccaaccagtgggcagtcaccaacccgaaggacgtgctggtgggggccgactctgtgagggcagccatcaccttcagcttcttttccatcttctcctggggtgtgctggcctccctggcctaccagcgctacaaggctggcgtggacgacttcatccagaattacgttgaccccactccggaccccaacactgcctacgcctcctacccaggtgcatctgtggaccactaccaacagccacccttcacccagaacgccggagaccaccgaggggttaccagccgcccccctgtgtactgacgcggcggtttaccgttgggaatggggacagagaggggccctccccctctgccctgggcttttcccgtgagccttcctgggaacttgccacgccccttctcttttcaccctgtttccattcctggtgcagtctgaactcccagcttaagggagccctcataagcccttggccgggggcttggtaaccaaccacacttccccgagtggtcctggttgtccaaaaaagggggctttaactagatggcgcctccatttccttcgttgtggcaattttttatggggaacgagggcttattcccccctagatcgtccttgtcacatcgtgtatgaaaaaattggatgccctgatattccaccggctccacccctatcctattgaatatctgtcaacggcgggtagcccatagtggtgacatgcggtccacctatcacattacatgtcgtttctaccctaggcacatctgtaggattaagacactcccttttccaatggcgcacagagatactcagtgtccacttgtgcgcctcgcgagcacacacc

SEQ ID NO: 443768 - DNA, 1714 bp, Homo Sapiens
atattgggggagagaaatgccccaggccccttagttccatggggcccagggagtttttcccttaggggaaaaccacggcttatggaccccaaggtttccacctttcgcgttacttggggggccccggcggggcccaaaacgaaaattgggttctagaaaaggcttctttcgaggggcccgagggcgggccgaccaatgttcccggctgctggggggccctttccgttttttgaatgagaaaacatttattccgtctccaaacagcatcccaggccgggcatctcccccacgattttataatacactcggcacagacagagtctgggagccatggggcacccctgccctccccaggcttcctaagtaacaactgcagaatatttacataaagctgggtgttgtcaggcaaagcccttccctgctgccaggggtgggagcaaggaggaagtgccatgagcaccagccccgccctcacaccacgggaggcagcccagaggccaccggcacagggtggtggcccccagatcatacagcagtgggcacaggggaagcaaacctgagtgaggacacaagagcctggtccggctccgctgcacagggcaggtgtgatggcccccacgagtctttggcagagaacgcagataatagcggctcccacggcctgacccgggccggggggaagctgaggcacttgtcagtagcacatgggcacctgctggcttctagccactgcaggcggggctgaggtcattaaaagcgaggaaaaacactagctaaaaaccctttcctaaaagtgccctggaggagtgagcggctgactgaagccctctgggcacaggcacttggggtgtggctctgccagcccccgccaggctatgaggctccttagctgtgtgtcagctgcacaggatggaacaggtgaaagagaggggctggcagttccaggaggctcatggaaaagtccagggcagaggggagggccctctctgtaccccttcccacgctaaccgccgctcagtacacagggggcggctggtagccctcggtggtctccgcgttctgggtgaagggtggctgctggtagttgtccacagatgcacctgggtaggagtccagggcagaggggagggccctctcgtgtccccctatcccacgctaaccgccgctcagtacacatggggcggctggtagccctcggtggtctccgcgttctgggtgaagggtggctgttggtagttgtccacagatgcacctgggtaggaggcgtaggcagtgttggggtccggagtggggtcaacgtaattctggatgaagtcgtccacgccagccttgtagcgctggtaggccagggaggccagcacaccctgagaagagcaggtcaccaatgaccaggtacttgcggtcagtggcgttgctgatctgggggaaatacgcgtcgaccaccaagaagaaggccgaggccaggaaggccagcaccccgatggcactgccatagcggcaggcatcctcgttgcggttgaacacgcagtacatctgcttagactcgtgggcattgctgtagccctcaccatagatgcaggagaacacgatcaaggcgaagaccaagcacacggcgcgcgccaccacctgcggctgcgtcaggaagcgccgcaggtcgaaggagccgcccgccttggccgcgccgtaggccccgctctccatgtcgccgtcgccg

SEQ ID NO: 443769 - DNA, 865 bp, Homo Sapiens
tgacggctggcagttccagagcttcatggaaatcagggcagaggggaggcctctctgtccccttcccacgctaaccgccgctcagtaacacaggggcggctggtagcctcggtggtctccgcgttctgggtgaagggtgcctgttggttagttgtccacagatgcacctggtaggaggcgtaggcagtttttggggtccggagtgggctcaacgtaattctggatgaagtcgtccacgccagccttgtagcgctggtaggccagggaggccagcacaccctgcagggggagcacagcagggtacaggtgggtgggggaccccaccctccaccacccttgacccaagaaccggcccctggccatcctacccaggagaagatggaaaagaagctgaaggtgatggctgccctcacagagtcggcccccaccagcacgtccttcgggttggtgactgcccactggttggtgaggaagcagaaaccaacaaaccacaggaaggtccagagagctgagaagagcaggtcaccaatgaccaggtacttgcggtcagtggcgttgctgatctggtggaaatacgcgtcgaccaccaagaagaaggccgaggccaggaaggccagcaccccgatggcactgccatagcggcaggcatcctcgttgcggttgaacacgcagtacatctgcttagactcgtgggcattgctgtagccctcaccatagatgcaggagaacacgatcaaggcgaagaccaagcacacggcgcgcgccaccacctgcggctgcgtcaggaagcgccgcaggtcgaaggagccgcccgccttggccgcgctgtaggccccgctctccatgtcgccgtcgccgccccgct

SEQ ID NO: 443770 - DNA, 604 bp, Homo Sapiens
aatgattgaaatttgttggatttatttctttctaaagtttgtacatttacatgtatcatatacatattttaaatccttcactattttgcgtgatttctattacataaaaaccatttaaatgcaataaattttgttgccgtaaaacaacaaaatatccccaacttataaaaacacaggaacaattatattcataaacatttacacaataaatgtactctatatatcacagcttctatacatatcagatgactcacttgtctacaaggtttagatttacttgaacaacagtgaaatagggtaatatttatatacaactattttaataaaaaataaagcaattgtaaaatgtaaacttaattgtcaaaatattctttaaacactttaacaatatccacacaaattactgttcctttcaaaagaagaccaccacaaacgccatcgttttctagaagacggcatttccagaatctggtaggtggtgatgaggaacaggtttccagtacgtgttatagtaccgccagcttacccaaaactgctaatgccgacagtttcgccattgaaaagagaggctgctattttgtcactaatacttcacattagcggg

SEQ ID NO: 443771 - DNA, 621 bp, Homo Sapiens
ttttcagagacaaggcttttattcactgtatgccttggcatctcctctcacaccagaaagtttaaaagaaaaaacacagcgacaaggattcacttgggccattttggaacccatttatattgtgggtgttactctgggcttcatctagccccatactagcctctgagactgcctcagaccgtctgaacattcatggcttccttgggccaagtgtagctgtccagtgtaaaggagtcatagtctggagtgtagaccagggatcttacaaaagcctccttgtccttaggctctgggtagtaggaagccaggttgtgtttgtacgcgtagtcgagaactttgatggcaattctcaaagacacgtctcggatggtgctgagtggtgggtagagtctcccctgggacagatgctgctcagagacttcctgggcaatttgctctgctgtcaggaggaagatctcatctggggatgtgccggatcccgccggcgatgactcccagtgccaccccggggaacacgtaagcattgtttccctgcccaggaatgaaggtcttgccatctgacagaggcacactcataataggacttacactggcaaagatgcatcggtcctcagtgacccg

SEQ ID NO: 443772 - DNA, 754 bp, Homo Sapiens
  misc_feature (647)..(647): n is a, c, g, or t
  misc_feature (690)..(690): n is a, c, g, or t
  misc_feature (732)..(732): n is a, c, g, or t
gcacgaggcattttcgggctatgtgctggcccatgggctgtgccggccagaggtggccgagtccctggaaaactttcttgggctggagacagacttgcaggacctggagctaaagtacctgctgcagaagcaggatagccgcattgaggtacactccatcttcatcagcaatgacatgcggctgggcagctggtttgacccttcctggaggaagcgcatgctgctcaccctgaagagcaacaagtacaagcctgggctggtgcacgtgatgttggccttgtccttgcagatctgtctcaccaagaacagcaccctggagcctgtcatggccatctacgtcaacccctttgggggcagccactctgagagctggttcatgcctgtgaatgagggcagctttcctgactgggaaaggactaacgtggatgcagctgcccagtgccaaaactggactatcaccttggggaataggtggaagactttcttttgagacagttcatgtttacctacggagccgaatcaagtccctggatgacagctccaatgagacaaatctactatgagcccctgggggatgactggatccctctaaggaatttggggttacatgaaaattaacaccttggcaggtctttggctacagctgnccctttgacccagattgctatccgggacttaattctccagttnggactacccatatactcaaggtttcccaggggctctgtcacnttttgcaggttcatttgaggtt

SEQ ID NO: 443773 - DNA, 571 bp, Homo Sapiens
aggattcgttcgacggaagcaagtgagcgaccagtgtgctaaactccaggtgggcaggaccccaactcccaggtgaggtgggcaggaccctaactcccaggccagcctgcttagagtgtggtggtctgtgcccaggagatgcctcagcgggggtagaaactctggtgggatggagctgggcagaaggaaaaaagggctctgtgaggaagccgggatcacaccaccagaaggaaggattgtttccttcgaccaaccttttggttgctaccatttcttgtccttgagaaaggtgctcctagtgcttgtagagggaaacgctacgtccgtgcagtatggctctccctttccacaggagcgatcctccagccctaccccaaactgcaggtttccaattggttatgatgtgccagagaccaggaaatgccagagggatgtttgtaacaaagctgccaaactctaagccttcttgttctaccccctaatgagaaaaaagatgtgtaagagattagcccatggaccccagctccacctgaacatcaactataccgtgaggacattccagagtccctgc

SEQ ID NO: 443774 - DNA, 1024 bp, Homo Sapiens
  misc_feature (1014)..(1014): n is a, c, g, or t
ccatgtttgtggccagagatgtggtttatatgagaatttacccacccggtttatttgcgcaatgagggttgcccagggcggcgggggcctaaattttgtaatattgagagccttcgcctggggacctcgctgtttggattggttccccagtaattggcccttcaggaagattcccatatgtggattttggtctaagacaccgtttcgggttgtcccgcccgggggggttttttattttgggggagagatcccaaagccaatagtccattggcccagggatcttcttaggggaaacaggttatgggccatggttcacttacccttagggggcccggggggcccaaaggaaaggtttaggaaagttttttgagggccggaggcggccgacaaggttgagtttttgtgtttggggggtttttactttgcagttagctctccttcccttgtaaacagttttattcatttttaagaatcatgcagcaatccataaatattgcattcttgatgtccccactgtagtgtgaccacaagtgtactccagggagaggggtacacagatggcacaagcagtatacacatgcacacaccaggtgtgcagaccaaagcaaagtgagcgaccagcgtgctaaactccaggtgggcaggaccccaactcccaggtgaggtgggcaggaccctaactcccaggccagccggcttagagtgtggtggtctgtgcccaggagatgcctcagcgggggtagaaactctggtgggatggagctgggcagaaggaaaaaagggctctgtgaggaagccgggatcacaccacctgaaggcaatagggagagcacaggcctagtgcagcaggaaggagccctgggtctccatagttaggctgtgccctgtgggagaagccaggccccacctcttctctttgggtgaactgttgacgtgactatgtgactgtctccagatgaaggactggggcaaaagggttggccactgacctgtcctcatcaggctgactgaggnccagctcctt

SEQ ID NO: 443775 - DNA, 461 bp, Homo Sapiens
gcggccgccgtggcacctgctcgccctagcccactgtaggagtcgggaggccgagacaggtcagggagggtgcctggctggctggggagggccgcgtggttgtgcatgaggctggtgctgcctgcgaggccgtcctcggggtggctgcctccaaccaggcctgcgtgccgcccgcccagtgacatggggccggtgaaacctgaggccagcgccccgtggccaggcagcagcgtgtgcatgtcgccggctgtgcccacggcgtggctgcggagcacgtggatggcctcgtccaggtggtcttctatcttactctgcaggccgtggagacccccgtcgtagctgggcgataaggcaccgggggctcctgctcgaggccactgtgacgttcctgccaggccctggggggagcccacggtggttgaagggcttgactagaagtctttgcttgtgtgatcccgcga

SEQ ID NO: 443776 - DNA, 716 bp, Homo Sapiens
gcaaagaagattgctttgtattttatttacaacagaatgtaagaaaaagtaagttattaacaataataaataactaggaagaaaaacacagaacagccacaaaatgacacagaaggatggcatatgtaaggatcaacttttgtttgctttgcttatagtctgtaatgctgtgtattccaacacctggtccttcagcagtggcagtggtatgtggattaatttaaccaatcaagatcccagcttgaatgtaaacactacaaattacacttgagctacatgtgagtggtacaggtacaacaccaactcagagaccctctcctggggtgatatatagaaactgaagggagacttgccaatttgacagacatgctttccaatttaaagcaaaaacatcaagaggcttatcctaaagtccttgttaatttaacaacaaaattacaattattaatggcatctgaaaatttcccaacatattcacattctcttattacactaactcctaaaaagcttaaacacttatatttcaaatgcaaacagattgttttgaaggtagaacacaaaagaacccaatgttttgcctcagcatgccaacagtgtgctattgtgtacacttcagtttcagcaagaatgaatagttaaaatagtttattcataatcagattgcagtcactggacagactttttaaatctcaagaatctatggctcagattaagat

SEQ ID NO: 443777 - DNA, 781 bp, Homo Sapiens
taagtagagtcagctatacactggccttcttaagagtaaattcctatcgacgtaaccagccaatgacctattactttgtgtcgctgagccatgaagagatgccaaagaaagtagaatttaaaaatacacataaaatacattagccctgaaacttttgcagagaatgatttatcgagatgtatcagaatctattctcttagttcactgtttattacagtgtcttgaaagaaaaccacagttacttttgcaggtattgtggtaagtgtctgcataatatacccacaactgtgcctacttagagatttcttttccaggaccaacaacatggcctaataaatacttcccaaataaattaaaattttcctcacacacagatgcaaaaccgtaacagaagccttgataaatcagttcaccaacaaacccatattgtttgagttacaacggtggcaactaaaaatgtcacggcctccttcattgtgttccttttcctttgctttgtcttgcaacaacccaaagtgagaaaatgaaatgatcttcagaggtgatttctaacaaagcttatgtgttaaatacaccaagatcttctcatcccaggaaagcacagctaaagcaagaatgccgtgctatggccaagaaaatgcacaggggcacttcacatttgaaatcttcccagagttatgaaatgtacagtcattttgatggtctccactaacttcagagatgaagatggagtgaacgtatgtgatattctatggattatttatttaagtttggctaccag

SEQ ID NO: 443778 - DNA, 853 bp, Homo Sapiens
  misc_feature (620)..(620): n is a, c, g, or t
cacgcgactctggtgggaggcactccgttcaggactgttcagctaaatcaatgccttctattgtggaccatgtaaggactctggaccgtgtggttcagggtgaccttttgaacatgcttgagcagacgattgattataataaatattacaaatatgaaaacttgtgataaaatactgtgtgtattccctgcttaccaagcgccagtcactgtagcaagtgttgtatattaacgagctaattcagtcctcacagtgacgcccatccaggctctctttctccatattagagctgaagaaaaaggagtagagaggttgcgacttgcccaaagtcacatacctagaaagtggtggggtgggttagaactcaggtctaattgattcccgaggcttcctgcccaagcactgtctgtctcaaccctacctggtcaagccaagcagtgaggctccagggaacttgaggtgccttaggtcaggtaggagccccaggtatgcctgggatccagaccatagtgtactggctgccagcgcaggccatctccccttgataggtgggtgggcaggctgccctgagtcagcaacctcttgagcccaggagctcagcatggaactcagctgtgctnggtggtgtcccagctgccagggtgtttcaaaatagaagctacgcctgggaaagttttactgcccactgcgagactgttgtggaagaatggagggagagaacagctgcattggctactcacacaggctacaagtacacacatcaatccgcattcgaccctcagttacgtacgagcgaacccagcagagccagtctcctgtggaaaagtgatcatgacgcgttcgccccatcaat

SEQ ID NO: 443779 - DNA, 505 bp, Homo Sapiens
tttgaataaaaatccgtgtttaattacaagaagacacatttatgttgtagcgtttattgggtgcccaccgctggctgggcaccgagctgggcgtttgcaggacacgcagtcacacaacacctcacaacagccctgtgaggtagggatgagtcccatggaacggtccagaaaacgcaggctcccaggcgccctgcctgctcccacagctaggcaggcggtacagcggggactgaagcagttctttttgactccaggttccatccagctcttggtcccattgttttagagattacagaaggtttggtcccagagtccactgagcccattcacaacgtttacaggttttgtttcctatcccccacgttcatcgtcctttttgaagttttggaaaaatacaatttaaaaatgaatatgagtgtacagtttggagttcggaaaattagcacacgttctgtttggttcagggtccctctccacctgggtcactggcgcagcagtaagagtt

SEQ ID NO: 443780 - DNA, 682 bp, Homo Sapiens
  misc_feature (464)..(617): n is a, c, g, or t
ttgttattaactaaattatttattgggtccagtaacgtattccataaatattgtacacataaaaattgtgttatttttattcctgtatgctcagctgcccaataacagtctgaggattaacatatttgttaaatgcacaaatacattctttcacaaatattagtttaataattttatgttaaactccctctatacttacaatatgaattagataattcagaataaacattccattgggaaaaagctacacaatttgttataaaacatccttaaaagcatcagaaaattaatacagcaatgaagaattacaggaccaaattaagaatggtatgaaagcctgtttgtgacgcttatgtttgggttatctctttatttgagtgactataaatctcaaaagagaactaaagggagaaataaccgtatctactaacatgctaagggtacttaaacatctcttagtaatnnnnnnnnnnnnnnnnnnnnnnnnnnnnnnnnnnnnnnnnnnnnnnnnnnnnnnnnnnnnnnnnnnnnnnnnnnnnnnnnnnnnnnnnnnnnnnnnnnnnnnnnnnnnnnnnnnnnnnnnnnnnnnnnnnnnnnnnnnnnnnnnnnnnnnnnnntggtaaactttttaacaacataatttatccttctagaatatgaatgttggtctatttgatgatgt

SEQ ID NO: 443781 - DNA, 410 bp, Homo Sapiens
  misc_feature (395)..(395): n is a, c, g, or t
aaaggggctgtaattatatttattagattaacaaggcagatgtgaattttctcttctataatccagtaagtctgtgtattcgttgactcagacagacaagaagccacaaggaaacaaagaagtaatcatttgttgagagacgttattaactatgatcttccctgaagctaccgggatgggaaaggtcagtgtcttcctttgaaccctgagacaattaggggctcttgaggcctgctgtgcccctgctgccaaggcagcctcaagttcaaggagcagctaatcacccactcctgcattcagtctgtcttgcctgatgagggctacgcaggctgcctcccattggtgtgcactgtttcctttttcagctgctaaatggctgaacaccatcggcctgnggtatccctttttgg

SEQ ID NO: 443782 - DNA, 375 bp, Homo Sapiens
  misc_feature (287)..(287): n is a, c, g, or t
  misc_feature (339)..(339): n is a, c, g, or t
  misc_feature (364)..(364): n is a, c, g, or t
gaaagaatgagggaagtgtttattgagactgaaatggaacactcttctcttttatgagttaacagcagtgtgttaagaggctggtttcaaactgactccaaaatgataactagcagctcatgaacagctctgccaactagtgccactaattggggcaacctagtaaggggtagaaccatttagcccaaggataaatttactggattcaatttcatttatatttaggtttatttcctataaacaataggcaattatttgcattttaaaattcacattggaattcattntttactatttatggatgttttacataaccaattcaggtatccattatggttntagggttttcaggatgttagggggncggtccaatta

SEQ ID NO: 443783 - DNA, 279 bp, Homo Sapiens
cactaatggccaagtgtacatttgatttgatatacagacctccagattattttctatatttggattcacagcctttgcgctctgggttttgggatttgggtgtggggtaagttgaagggaaatcaatttaaaggaaagttctattatctgggttttagaaattctataagagacaaagtttggaagtacataaagtaataactgttagaattaggtaatggatatgaaagagaaaatgctttctcatgcatagacaagtgttttgggtttttaaaaaaa

SEQ ID NO: 443784 - DNA, 571 bp, Homo Sapiens
gtggttccaaatgtcgcctttactgctgagacaatggtggtgcaggaaggggagcctgcagtctgggcggggggccaaggaaggggagcgtgtgcttggcccagtgccgccaccactggggagtgggaggctcaggcagacctagggccctgggaccgtggcccttggctttgttctagggagggcacaagacagcctgcaggtctttgggcagggagccgatgaccgtctcgatgtacagctgtgcccgctgcagcgtagcctccttcacagggagctggtggccctgagcccgcaccagcttctcacgaagtttcaggaccaggtccacgacctccacctcggacttgtctttcatccaggtctcgatgttcgcctcacagatagcctccaggtgcagggcctccagcttcagggccatttctttgtgccgttgccggtaccagccatcaaaatggggggacttgaaaaaccgcctgtagagacccagccagtcgcccttgaggatgcaggtgagctggggcccagcatgctccaggctacgcaggaagtcatcctggctgaagggctg

SEQ ID NO: 443785 - DNA, 469 bp, Homo Sapiens
acaatgatgctctattttattttctaaattaagaaagatttgctcagaggtttagatattcaactttctccaacttttagtacaaatacatccatttagtttttgatgggccttggatacagcattataaagtgagcattttttcagattacactgagatggcctctctttgtataagtggctagaagtaagaactttttcccccagtagctcatattcccacctatcacaccatgccatgtacagtataccactttaactccatacactccgatggaagaaaccagactcttgattatgtagaagaatgcacaggtctcatgcatttggattttcccttaaagcagagaaaactggtaggtctgtagaggaaagcaggagatatcattatctcccaggagtcaagatgcagataatggtattgttccagtcttgaaccatttcatttcatcttcctgatgttcacgag

SEQ ID NO: 443786 - DNA, 414 bp, Homo Sapiens
  misc_feature (39)..(39): n is a, c, g, or t
  misc_feature (76)..(76): n is a, c, g, or t
  misc_feature (98)..(98): n is a, c, g, or t
ccctgccccagggccttctctttgtcttatgacccaggnaaggttcacaggcgggaagggaccccaggtcaggctnaagctgctgccccaccggaaanagacccagcagccttgccctaagaccccaggtgggtcccaggtttttctattggggcagagagagtgggccaggatgggggcgtctctcagctctgcaagctggagaattaactccgggacttgagctcggggtccccgctgggcgcaggcgtgggctccagcgggaaggaagcccctcgttgggttctcagcatggacagctggatggcatcactggattccctcacctggatccggagacaaaaggggagaaaatgatgaggcagcgcccaggctgcggggttgagtcagccgtaataacagcctgttggccct

SEQ ID NO: 443787 - DNA, 413 bp, Homo Sapiens
ggagtcacagagtcagtaaaagagacccccaaggaggaggacccttggcttctgcaggtcacgtgacatttctgtgactcaaagttgtgtagagatggaggcggccatgtgcagctggagctggcctgctctgcagtgtcgtgacgtcgttttgaggcaggagtagtctgtggctgcaggcagtgacaaacccaggcttcctcaagcagtggctcctagcattgggtgacagtgtgtctgtgggcagagccagaggagacagagtcgctgggctgcctcacaggagcctggtctagccggacccggccgccgtcggccaagggaccttgggaatgagccctgcgcctctggactctatatcggatgggcgagacgaccactccacgtctttaccccaacatggacatgtgctg

SEQ ID NO: 443788 - DNA, 474 bp, Homo Sapiens
ttttttttaatgtgcagtcaagtttctctctttttttcttctaggaatgataccatgccagtaaatccctacagaacatttccagtttggcaacaagcagtcagtcgatcattcacatttgtactcaagacagcaggcctgggcaaaactcgcctgaatttcaccctgaaaagtgctccccatcatctgaagaagcagcacctggtaacaggcatggccattcagagggtacttagcattttcatttcacctggggtcttgaagcacttcctgaaaactgattgtgccttgacatttacctgtaaaaagaagtgtaattctacccctttggcagatgtgtaaactaagacggtgcaaggcccacagaagtaaggagagggaccagggaagctgacagtgaatctcctgctttgtccatcaggtcctaaaagtgtctctcacttgtaattccacagaagtgaataaagcataact

SEQ ID NO: 443789 - DNA, 469 bp, Homo Sapiens
  misc_feature (227)..(227): n is a, c, g, or t
  misc_feature (370)..(370): n is a, c, g, or t
  misc_feature (406)..(406): n is a, c, g, or t
  misc_feature (411)..(411): n is a, c, g, or t
  misc_feature (430)..(430): n is a, c, g, or t
  misc_feature (437)..(437): n is a, c, g, or t
  misc_feature (447)..(447): n is a, c, g, or t
tttttaatgtgcagtcaagtttctctctttttttcttctaggaatgataccatgccagtaaatccctacagaacatttccagtttggcaacaagcagtcagtcgatcattcacatttgtactcaagacagcaggcctgggcaaaactcgcctgaatttcaccctgaaaagtgctccccatcatctgaaggaaggcagcacctgggtaacaggcatggccatttcagnagggtacttaggcattttcatttcacctgggggtcttgaaggcacttcctgaaaactgattgtgccttggacatttacctgttaaaaaggaagtgttaatttcttacccctttgggcaggatgtgttaaactaaggacgggtngcaagggcccacaggaagttaaggggagagggaccnggggnaagcttgacagtggaattntcctggnttttgttccntcagggtccctaaaagtgtttt

SEQ ID NO: 443790 - DNA, 470 bp, Homo Sapiens
cataatgagtttattttccataatttatagcataggtaacagaatcattttgcaaagacacggactagagaagaataaaagaggcaattatgatcattagaggtggcttcggaggaccacgagacagcactatggacaaacaaaatgcactacacaacatactcctcctggggggcagtcaaaacacagaaatgtagatcgctcagtcactgaaacggattgacttggctgttctaacttccacaccgaaaggaagacagggtggtgatggggggagagtgattactcctcaaacagagagtgatttaacaccaccactggctatgtgacagataaactaatttgcccaaatcactaagcttggggtttttccacccacattaatttggttgcttgcacatggacaacagcatcatttatttgggtgacagggtttcaaagacctggggcattgcagttaggcagggagg

SEQ ID NO: 443791 - DNA, 145 bp, Homo Sapiens
gtcagtttaccctcgatgcccttatttgtgagttaaagagaaaatatcataaatggtatactcttaagtatagaggttttgtatctagaggatctcagttcaactcctgtctctccatataccagcagtgtaactgtgaataaca

SEQ ID NO: 443792 - DNA, 1190 bp, Homo Sapiens
  misc_feature (212)..(245): n is a, c, g, or t
cacacaaatcatcggcatttatttcctgggtcctaggtgtcacttatcctggtggacagggcagaggtggtcagatcgttttgagccaaaatcccttccctaaaaatggatctgtggagctccatgagggaacctcagagatgcacaatgacagtttagctaaaatggcttaaaaaatgtgaattgattgtcagctctctccatatctgctnnnnnnnnnnnnnnnnnnnnnnnnnnnnnnnnnngtgttttctaaaaaagggacaagcaggtctggacccagaagattgggctggagaggaggtgttggtgttgggacagggtccctgcccgggccgctcgcgagaggagcgttcctgtgtgggctgctcactgtagggcaggccccgcccaagtcccggcgccagctcaataaataacatcttgtggttacagtgtcttgaaagtgtacctgggcacggtgcgaaggtggtgggaatgtgaagcctgtgggtgtgggcagagggctttcccggagtggaggccacagaggcctctggggagccttctcagtctggcctggtttatctgggacatggagctcagagaagaggctgctgggccagtgccagggttccccctctgggaggggacagaaggtctctcgtccagccttcttggacaaggtcagattcaagacgaggtggtcccatcgctgctctggggctggttgccagcttccttgtctggggcgcttccctccacctgtccttctgccccctcgagtgccagctcgcccatgtctccagccagcttcctcacgctcacagcctctgagtctccctggatgtcagggaccgcattccgacggcctgtccggtcacaggagatgaagtccgagtaggaggactcgacctccatcatgcctgtcgcatcgctcctcaggcctggtttaatttctttttcctgcttgcatctcttcagattttccactgttgactaatcagtacgggaattctgcggtctcgccgcctctccgtgcctgggccgccggtccgcagcgcctccccggggcagcctagcgcccgcagcccgcaacccgcagcggagcccgttgccttggcgacctgggctgccgaactcccgcggcactcgcgctacggcggctcggatgggaccaggaccctcgtgccgaattcgccacccaggcc

SEQ ID NO: 443793 - DNA, 579 bp, Homo Sapiens
  misc_feature (71)..(71): n is a, c, g, or t
  misc_feature (109)..(109): n is a, c, g, or t
atgatggaggcgaagtcctcctactcggacttcatctcctgtgaccggacaggccgtcggaatgcggtccntgacatcaagggagactcagaggctgtgagcgtgaggnagctggctggagacatgggcgagctggcactcgagggggcaggttagagccagcaggtccttggcactactgcatgccagaggccctctgccgggccccgggctagcctccaagtcctagactgcccatactttcttagagaagaaaccacatttaagtcaggcctgccccatggtcagtggcagagtccagcaatctctaggttggaagatgtttgagtctcaggccccaaggactcctctggacaggcatccgggactcttcctgtccccctgccccctagcccaggtccctccacttctcgctatccccacagctatacctggctctggccactcacagctctcacctggctgactttagcggccggcttccctgggctccctacacccatctccgcccttcctgttcagctctatgcagcagccagcagaccccatttaaaccattctgtccatcatgcttctgcc

SEQ ID NO: 443794 - DNA, 1170 bp, Homo Sapiens
  misc_feature (213)..(253): n is a, c, g, or t
cacacaaatcatcggcatttatttcctgggtcctaggtgtcacttatcctggtggacagggcagaggtggtcagatcgttttgagccaaaatcccttccctaaaaatggatctgtggagctccatgagggaacctcagagatgcacaatgacagtttagctaaaatggcttaaaaaatgtgaattgattgtcagctctctccatatctgctgnnnnnnnnnnnnnnnnnnnnnnnnnnnnnnnnnnnnnnnnnctaaaaaagggacaagcagttctggacccagaagattgggctggagaggatgtgttggtgttgggacagggtccctgcccgggccgctcgcgagaggagcgttcctgtgtgggctgctcactgtagggcaggccccgccccaagtcccggcgccagctcaataaataacatcttgtggttacagtgtctttgaaagtgtacctgggcacggtgcgaagttggtgggaatgtgaagcctgtggttgtgggcagagggctttcccggagtggaggccacagaggcctctggggagccttctcagtctggcctggtttatctgggacatggagctcagagaagaggctgctgggccagtgccagggttccccctctgggaggggacagaaggtctctcgtccagccttcttggacaaggtcagattcaagacgaggtggtcccatcgctgctctggggctggttgccagcttccttgtctggggcgcttccctccacctgtccttctgccccctcgagtgccagctcgcccatgtctccagccagcttcctcacgctcacagcctctgagtctccctggatgtcagggaccgcattccgacggcctgtccggtcacaggagatgaagtccgagtaggaggactcgacctccatcatgcctgtcgcatcgctcctcaggcctggtttaatttctttttcctgcttgcatctcttcagattttccactgttgactaatcagtacgggaattaagaccaaagtttcctcaaaatccagtggtcctcagtcagaagcggaggcagaatttaagaaaccaggattcaaggttagcagtccagacctgtggtgcgggcaggattctcactttaccctcctctctgtctcttccccgtgtctcctgcggtctcgccgcctctccgtg

SEQ ID NO: 443795 - DNA, 342 bp, Homo Sapiens
  misc_feature (41)..(64): n is a, c, g, or t
  misc_feature (96)..(119): n is a, c, g, or t
  misc_feature (249)..(269): n is a, c, g, or t
  misc_feature (279)..(279): n is a, c, g, or t
  misc_feature (293)..(293): n is a, c, g, or t
  misc_feature (301)..(301): n is a, c, g, or t
  misc_feature (319)..(319): n is a, c, g, or t
tttttaagagtcgaagcatagcttgtttaatttttatacannnnnnnnnnnnnnnnnnnnnnnngtcttttattgaatcttttatggaatcccccnnnnnnnnnnnnnnnnnnnnnnnngcatagggaacaaataaacaaaataatgacagccagagtcactttctgtaaatggtacttaggtaggcgcgtccgcgaaaaccaaaatgactgcgtaatatacaaggttatgattggagtatgatgtgannnnnnnnnnnnnnnnnnnnnagagccggcnggtctgcccaggtntccccttntccccctcctgtcctcgntgtcaagaggagaagtaggagga

SEQ ID NO: 443796 - DNA, 687 bp, Homo Sapiens
  misc_feature (129)..(149): n is a, c, g, or t
  misc_feature (369)..(466): n is a, c, g, or t
  misc_feature (496)..(555): n is a, c, g, or t
gcatagggaacaaataaacaaaataatgacagccagagtcactttctgtaaatggtacttaggtaggcgcgtccggaaaaccaaaatgactgcgtaatatacaaggttatgattggggtatgatgtgannnnnnnnnnnnnnnnnnnnnagagccggcgggtctgcccaggtgtccccttgtccccctcctgtcctcgctgtcaagaggagaagtaggaggaggaggggagggtgggggacctgctggaaccttctccggattgggttcatgagcatttttgtgggtgtgtatgtgtgtgttatccagtgtgcggtaagcagaaagctagaaggagagtaaactatcctggtgatatcagtaaaatacnnnnnnnnnnnnnnnnnnnnnnnnnnnnnnnnnnnnnnnnnnnnnnnnnnnnnnnnnnnnnnnnnnnnnnnnnnnnnnnnnnnnnnnnnnnnnnnnnncccaaaggaaaatgttttgttttgtccctnnnnnnnnnnnnnnnnnnnnnnnnnnnnnnnnnnnnnnnnnnnnnnnnnnnnnnnnnnnnagcccttgcttgttctttctctgtgtgagaatgctcggggctgggtgggcaggaagctgggggcacaggctgggaccccagggctgagcgacgcgtgggtcgacgatatcccggaattccggaccgtaccag

SEQ ID NO: 443797 - DNA, 1061 bp, Homo Sapiens
atattttatcaattttattgaaatattccaaggatcccaaccccatttaaaaataaaaattgtaaagcactccattcaataaaagcacataagtccccctcaataattagtatgacaattcacgatacagctcttactctgggagagtttattttaccctttattccaaaaggcacaaagtcatctgaggcctcagatattaaccccactgcatgttaatgacacaccactgaggtgcagctcaatgtaattattaaagcttataacacacttccccaagaatttatagattctttctataaataataatttaaaaaatactgcaccttaagaccaatacaggcttaacaaaagacctgaaatttctgcaagggcagttttgtttcttgatagaagtacaacttttgaaagtctattcccagcaaaagaaacactagacccagcttggccaaagaaacataataaaacaagtgatttctaacacgctaaaagagtacattttcatcagctccaaagaaagcagtcctggtcattcagaaggctcctatgatcccaccagtctgcagtcattagaaatatatgctttacaggccacaggctgctctggatttggtttcagacaccagtgaccagaagaagccagttttgcgtgtgaggggtgtgggcccccgctgccttgggcctgctcaccggggtggatggacccgcgccgggtcacagccttttgtcacgtctggactgttggcctcttctgcatctgggctgttgggctctcctgctctctgtccctcagtcacgtcattgtctggctgtccggtgctggctgcactctcatttgtgaggataaccccttccttcttcttttctcccaatacctccagccccatcatcctgagataatgaagccgttcattcttgggccacacacagttcgaatggaggcctttccccgcacatccgcataagacgatgggacactgcagagcgtctggattcgcagaatctggttcatacttcagcacgatgcttccctttgccaggtcctttgcttgactgtaggt

SEQ ID NO: 443798 - DNA, 667 bp, Homo Sapiens
agggattctcagagggatctgtgactcaaaaaaagttgaggatcattgcttagccgggctctcatctcctgaatcagggatccagcacagcacaggaaatagaagtcagaaatagagaaagattgtatgggggaaggaaatgtgaagtgctgagatggtgccacagcatctttgggtccagagttctctctcagcttaggtaagaccatgtctgagatggaagagagaggggtagaaggagagcaggatggaatgtcctcagaaaggttctgtcaagcaggggtaggcagaaggtaggcagagtcaaattcttctccaatctgaagtagctcacagatttttccaccaatctgtgcaacctctctctaacctaggaggttgttgaggttagaacccagaaaagaactaggaaatgtgaagcctccatttcagagaatcctttgctggaagccaggcatttcactgaagtccatttactccctggaatttctgctcctttctatcagtccctgaggcagaggctgtaaggacattgtgagaggggactgagaagaaagagtaaaaacaaagaaaaaccccaacaccctgaaacaggtgcattagagttaatgaagaatgtaaggaccaataacttagcccagtccccactgaagttcagagaggatgc

SEQ ID NO: 443799 - DNA, 358 bp, Homo Sapiens
  misc_feature (274)..(274): n is a, c, g, or t
ttcacattctttctactctgtcattattcattagtcaagtttctccacagacaactcactgagccacaacatatgaagcagcatggtaatgccactagactggtcatgatcagaagatgtggccccagggaagagaaagcaagagagctggagatagcagagaaagcaccaaggaagggcttggccgtgcagctctagcagggaggtccttcctttcagcccccaagtgtccctctgtgtctcatcttaaaagcaaaaaaagaggagaactagngcttatggttgaaggcgtgagaatgaggtgtcttttccctctatctctgtaatatacaagtataaatactatatatacatatgt

SEQ ID NO: 443800 - DNA, 404 bp, Homo Sapiens
  misc_feature (391)..(391): n is a, c, g, or t
caactgcaaagccggtatacgagcagtaatcgctacgcctgacaaacctgctgctgtgcacatctgtactcttcaatcaacaaaacctgatgcaaaaaacaaaagggggagatgtaggagatcagtcagggtggtgggaaaagttataaggagagacgcaaaccttcttggaagtccaggaggttttgcaaagcttcgggagagaataaaggctgaaggcagctaaattctcttaccctgacgctaagggcaagaagtaggtaacaaaggagtgtaaaggaatttatctagacgagttttatttacttttgcagacctttgatcatcctattgcgcgcaggactgctcccaaggcggtgggggtgacaattacctacagattgtgttggcnccaggcctttgtc

SEQ ID NO: 443801 - DNA, 230 bp, Homo Sapiens
gccaaaggtttacttccagcatctgagctctggctctcacccctgaagctcagttatagtgcactgatgaactgagaggatgcgtgtggatgtgtgtgcatgcctgagtgcgttttttggggaggggtgtttatttttagtaccccattttggggtttttttatgcagtgtggatgtgaagatatggtaccttttcaagtgtagctctttcaaatatagtcaatgctggg

SEQ ID NO: 443802 - DNA, 1082 bp, Homo Sapiens
  misc_feature (17)..(17): n is a, c, g, or t
  misc_feature (40)..(40): n is a, c, g, or t
  misc_feature (64)..(64): n is a, c, g, or t
  misc_feature (480)..(493): n is a, c, g, or t
acaaccccaccctcacntggtttaattttaataaaaaggnaaccatattcctgtagtgatgggncagtccattaaaaaaaaccccctaatgaaaagggttactcccttaaattagataatttccccaataataaaggagaaaataaacatttcctatttcctagcaatagttaggacctagctagtgcctcccattcctccctcttcagcataaaaacttagctctcttcaattccttggaactgttctgagagcatctgtaagctgaagacatgttggatctacatcacactggtccagcttggtaatagcaagcatggctaaaaggtccttggatatggtttttctcctttaggcagtaaatgctaattgaaacctactaaaacagaaattcactagaactgcaaaacctcacataggacttaggatgcttgctagagttgtttatagcttttgaagcatccttttgcctctctcttnnnnnnnnnnnnnnttccctccgtagccccctcacacacgcagatgcttcccagcaaggaaaaagttcagagaaggtgaaagttgtcacaaagcccagctagcaccaaggacttcagtgagatggctgaagaagtgatgatcaaagtaatgcaggaggtttgaaaacatcaggaaaaggtaaggccttgacacatagttgcagagtaacaagaagtcagaagggaaagctgggaggaagccagcatatgtgaagaagctggtataagagaccttggcgaggcagaaaggatggtcactggttcaagccagttatcacagcccaaacatgacccccaaagtctcaatacccttctccatataatatagcacctaaccagggcaggagatgagacctattcttaacagatcttcagggaaaaggaatttctaagtttcctcagtcatgtgatataatttgtccatgtgggcacgagtgtgtgtttaaaattatatttgagggatgaaataccacctattgggtacaatgtacactatttcggtgatgggtacactaaaagcccagatttcaacactaagcaatatatccatgtaacacaactgtc

SEQ ID NO: 443803 - DNA, 414 bp, Homo Sapiens
  misc_feature (86)..(86): n is a, c, g, or t
  misc_feature (103)..(103): n is a, c, g, or t
  misc_feature (388)..(388): n is a, c, g, or t
  misc_feature (400)..(400): n is a, c, g, or t
ctccagatcaccgacccccacgagcgccggccctgcctgcccgctattttggttccatctcttctgcatatttatgcttgcctgtnacattccctggcctctnagtgtcctttggcagtttccaaagcatttgggcaagaaggagcttgggcagcttcacaacaggtggggacgcgcaggggaggggccgcggccggaccggcagagtttcaagggctggcgcgccggcggactttccacactgtctttcgggactggggttaggagacagcccttggccaccactgtgtccttactttgtcgctttacttggggctggacctcccctttccagctctggcgtgtgaccccgcaacgagcgtggtgtcgagaccaccaccagctgggncggtggggagcnaagttgccccaagg

SEQ ID NO: 443804 - DNA, 1019 bp, Homo Sapiens
  misc_feature (998)..(998): n is a, c, g, or t
tggaatccaaagatcaaaaggtcggatattgttcaatgttcagtaggctcgtttgacacaggcaccaaatagagatttcatgaggatggtcacagattggcctagaaaaagtaatcctgtgagctggcccgtgtcataataataaggttccggacgctgcaccgaatgttcctcctttcaacgaaggtttggcccgagttgggctcccacctgcctgggacattttttagtccaatcttgggactctcacctctgccttccggctcaactgtcagaatgccagcggctcctgcagcccaaagcccacttccgttttaaacttgctcgttttgcaatcacgtaacccgctactgacgacaggaccctcaaggcccattttatatgcggttctcaagtttaggtctagggaagtttccaggaagcttagtgttcggggaggaattcgttttgcttttgctaatcaaagagacacaaaagcacagctgagtcccgaagctggcacacgggaaatcgaggtaccactgtcccctcaccggagcgcgcaacaatcacttggggagcggggaaaaggtttccaccttccccgagcctggggcaccttcgctcccaccgccccagctggtggtggtctcgacaccacgctcgttgcggggtcacacgccagagctggaaaggggaggtccagccccaagtaaagcgacaaagtaaggacacagtggtggccaagggctgtctcctaaccccagtcccgaaagacagtgtggaaagtccgccggcgcgccagcccttgaaactctgccggtccgccgcggcccctcccctgcgcgtccccacctgttgtgaagctgcccaagctccttcttgcccaaatgctttggaaactgccaaaggacactcagaggccagggaatgtaacaggcaagcataaatatgcagaagagatggaaccaaaatagcgggcagcctcgtgccgaattcgccacccggcctcgctaccntaacccgaggtactggccagt

SEQ ID NO: 443805 - DNA, 635 bp, Homo Sapiens
  misc_feature (82)..(147): n is a, c, g, or t
gggggggccccccccggaaaaccttgtttcggtctggtgtggtactgtgtttgtggtggttttcatgcttgttattcttggnnnnnnnnnnnnnnnnnnnnnnnnnnnnnnnnnnnnnnnnnnnnnnnnnnnnnnnnnnnnnnnnnnaccagccaatatagaagaattttaatattccagccatctgcgggatgcagccctgcacacaccccacactattccgtttcttccctgggggagcatcctggccctcaagtagcaggcagtgcctgccaaacccagaccaagtggaagagacagtgggcacatgggccaggcagccaacacctgtgggttagagagccccaccctggcagagtcagagccctgaggccagggagaccacatattccaactttcacagtgggtgcgacaggtgaggtgggaggaaggtgggagggaggtggggttcagccctgaaacccccctacacacagtcactgaggaaagtcctgactccaggatgtgggttccggagcccacccccgagacccctgtcttcaacatctgctgatttttgttggcgtttctcttttttgttattttgctttgcacactttaaataattaatacaatattcgggagaattccggacc

SEQ ID NO: 443806 - DNA, 350 bp, Homo Sapiens
ttttttttgcaacagcataatacatctgtttatttagttaatattacaatggtaacaagttaagagcactaaatttgtatcctcttagaaggataatgattaagattttgatttgtaaatttcacagttcttaaccattaaaaatctattttccaaaggagtagtaatatatatttttattaagggacagatctaaactttctgatttatgacccaaagcatatttgttcattagtttaaggcaaaacattaggggatatcttaactcttgggttactgctttcagggaaaggcacaaagttgttgaagcaaatatacacaaaacgtatttttcaatagtgattttaacc

SEQ ID NO: 443807 - DNA, 493 bp, Homo Sapiens
gcataaaaaaaatcatgccattaatgtgtggaagcagcgaacacacacacacttctcggtgaatttttacttcctgctgacatttcttccacgaatttctcaatactggcagtaaaaacttatgatccttgactgaccgttcgctgttacgagtggctcttcttttccacatgccggatttctttcttcgttttcaccttaaaaccttctcccttttgctcagacccactggacccctcttcttcatggaggctaagccttggcttgccatctgctggagaagtcctactcatctttttcatactgacaggcacacagggtttagtctcttctattataagcttgctggtttcttctagagattttctgatatgctgctagtggtgatgctggttcttcaacatgaccagaaccatgtatttttggtttcagagtttccttggtactctgttttcctacatcattttgggattctggaaagtaagattttgtc

SEQ ID NO: 443808 - DNA, 489 bp, Homo Sapiens
tctgggtgcaaggaacattttattccataactgtctccaccgaagccgcagaagcaaagccaggagcagaatccattctgccagcgctgggctctggggagacatctgtgccctcaccatggaggacagaaggcaggggcctcccgactccttggtcctgcctggggtgctcctgtccctctttcttgctgggggacctaccccaccctccccctcccacctcagccacagaggaacaagggagacaaactgagggctctgcagtccccgttcaaggccaacataatagtcgtgtggccccagcccagctaggcgcatcctctgcggcatggcagcggtgaccaagcacagccaacgtcagctccgctccctgccgtctgagagctgaccacaggcagatgagatgcccactccctgttgccataacacaggaaaggcgttgcgaacgcgtgggtcgacgatatcccggaattccggaccggtaccagc

SEQ ID NO: 443809 - DNA, 401 bp, Homo Sapiens
ttttttttaaaccacttcaattgcttctttcagcatgttttttgtattgaattttactctgtgaaactttgtttgtagcattattttccatattttggaattaattttgtaatttctcttgatcatatctgactttgtccatcaggacttcatataactcactccactccagttgcatgtcagttctgtggtttaatttcctttctcacctggcaaacagtgcttatttaggcaaggtaacagcattcccatctggctttgttccaaaaggggtgagagtactggggggaggtgggcagggaatgagggacacactgagtatgagggtgatgaaagactaagatcagtaaacaggatgccctttaggagcctgagggtgaggcagagcccatgttgggggt

SEQ ID NO: 443810 - DNA, 457 bp, Homo Sapiens
  misc_feature (15)..(15): n is a, c, g, or t
  misc_feature (65)..(119): n is a, c, g, or t
aaaggtccctccaanctggtcattccttggagaacttctggatgcctctcctgaccttttggggnnnnnnnnnnnnnnnnnnnnnnnnnnnnnnnnnnnnnnnnnnnnnnnnnnnnnnncaaatgacccatttcttttttcaaaaatttgttcctagggcttcctctttttatcctacatgttctctctgggctatttctacagctttaatctctatctccataccttcccagatccctgacctgtgtctctgtccatttttctatttcttttagctccttaataacatatatttaactacctgctttgtgtaaatctgatatatacatttgaaataacttacacttgattattacattctacttatgagacttataagcaccaccctcaggacccaaatgccatttttctgtcccatatcttcctgtgatctgccatcagtggctcttttttcctg

SEQ ID NO: 443811 - DNA, 713 bp, Homo Sapiens
cactgagcctgcattagctgacaaaaacattttaatatgttaccttagaccttggagagatgcccagcagaggtacagagccaaaggcactagcagatcactgccttcttgggagatcacttataagccctcccttttgtaatgatcagatgccctcttccctcagagttgattagagaagcagtaagaatttgtagtcataagtactagcctggtgcacaggtcagcagtcctcttggccagtggtcattttctcccaccaccatggtacaagcctgggttctgtgccctgaacctgaattctggaaagggagagactacagcatttcacagagaacagccagacccaagagctttcagtgtaggatgggcctgaagtgacagttcaatagccaaacctggggaagccccatcactgactgaactaggtcatttgaccatggagggggggcagtgtaaaggcaacgtgtaggtacagctcttttattattaaatggtgtaaggtgatcagctgattaacaggctccgagactgtccatttcagtctcccatccagtgcttcttcctcagtaaccttcaggccgttatttctgcccactctctgacacacaggataaaccaagactcccagagttatgttaccaaaggcaaaaaggcaactgggtggccttggctctgctttattgacctcagagcaccctatgagtgcagtt

SEQ ID NO: 443812 - DNA, 429 bp, Homo Sapiens
  misc_feature (55)..(55): n is a, c, g, or t
tgtcctgggggggctgtcctccatggctctgcctgttgttccaaggtggcctaanaacctacatcaatgggtctttccatgaactggtttgttgcctgctcttctattttcccttcccagatcttttctgttccagtgtactttgggcagccatgctgacggcctcagtggcaaaggctccatgggtagagatggtgatgcggagatcaacagcgagttcttggatgaccggatcagggtatgtgttggataccttctccaacagaggcaacaactgcttcagaacagcaaaatcacttgacttcaactgaacagctcctcctagcatgacagccaccagccccatggacatgctcagcgtctgtgattccacggtgctctctgcctgatgggccaggcttgcacaggctctctgcaatgttgctgcta

SEQ ID NO: 443813 - DNA, 423 bp, Homo Sapiens
  misc_feature (52)..(52): n is a, c, g, or t
  misc_feature (84)..(84): n is a, c, g, or t
ggacccccaaaggcagcctgtgggtgctcccccagacagagcccccgtctgnagaaaagatggacatttggggaggggtgcagnagctcctggagtcctctaacaccttcccccccaccccaggcccaagcactggacaccttcttggatccaaccctgattaagaacagaaaggcagagggagaggcctgggaggggtatgccgtccccatcccagcccaagtccccacctcctaagcagaaaccaggagcatggggggagcctcggctgacctcccaggaagagccagagctgagtggtgcctggaccagggaagatggcacacacgttgactcggtagcaagtggaggtatctgggggtcgcaagggcagggaccccccacgagattcatgcagcattcaaagtgagtgtttgggggtga

SEQ ID NO: 443814 - DNA, 438 bp, Homo Sapiens
  misc_feature (314)..(314): n is a, c, g, or t
  misc_feature (325)..(334): n is a, c, g, or t
  misc_feature (381)..(381): n is a, c, g, or t
ttttttttgcaacatttaatacagtttttatttgtttaatttggtaaatgtagaatgtaatggtttcaaggcaaaccctggactacttcagtcacaacccaatagttaacatgattctgaagaacagtcttatctgcaatatctacccacttctaaacaaacacatctatagaaatccatgtacatatatattagttttcaacaagtcaggattttcaacaactctaaaatttcaattttatattctgaacacacttcaaaattatccacttgatgcaggatataaccatagggagataaaaattcatgcaatngatactcaggnnnnnnnnnnaaagggtaaatccaatatttggatcattcaatggctaccataaaggngcattggaatatccgaaaataaaaccaggcgccaattttaatcattaatttaataac

SEQ ID NO: 443815 - DNA, 271 bp, Homo Sapiens
  misc_feature (32)..(32): n is a, c, g, or t
  misc_feature (54)..(77): n is a, c, g, or t
ctgagatccatgctactgcactgcgccctggncgacgagcgactctctgtcttnnnnnnnnnnnnnnnnnnnnnnnncctcagcaggccatactgcatcttgagaagtctttttgaagctactttagtttgactttagtgttaaagtagctaaaaatttttgactcccgcccacatattcagataccctcactttgtgcataggatttgtccattacacctcagtcatctaatttgttggtataaaagataccctcggctcggcgtgaatg

SEQ ID NO: 443816 - DNA, 419 bp, Homo Sapiens
  misc_feature (32)..(32): n is a, c, g, or t
  misc_feature (37)..(37): n is a, c, g, or t
  misc_feature (43)..(43): n is a, c, g, or t
  misc_feature (57)..(57): n is a, c, g, or t
tgttggtttttaaccaggaaaagaacggaacnagggnctgggngttaacaggcccanctgggcccaccaagccccgtcagcaggaaatttgacatagacggagttctgcagcatgttctcgagtttggcaaagagcacagccatgaaggggccagtgaagggctggcttggcagctggttgagagtccgcaaagggctgctgaggaaggggccagggggctcagggggacaggtgaagctctcgtaggcctcctcctccttaaggggcagtggaggttctaagggggactctgagccagttcccccattgctcaatgccacctctagctcccggagctcctgcccaaagccctctagtcctgccatgccctcggagatgctcctctagcagttccccagctccctcctttggcaccaga

SEQ ID NO: 443817 - DNA, 560 bp, Homo Sapiens
  misc_feature (269)..(285): n is a, c, g, or t
cgtgcggttgactctagaggttgaaccatttcagttcaaagtacttaatatgattcttttgcgtttccacatagacaatcacataatctgtaaataatgactcttacttttccactttagtcgttaggttacacctatatatatattttcttgctttactggactaatttcaacctccagcacaccaccaatgaatagcagtaataccagcataattgtctgcagttctgctgagatacgtgctctattttattggcttggctgtaggnnnnnnnnnnnnnnnnngaagaggctaatctcttacaggaaaggtttctttttatatccagtttttacatgatgaatgatttcccagtatttcataattcatgaggctgaattcctcttgaatttattaaatgcttcctgtgcatcctctgtgatgatcatgtttatttactgataaaactcaatacctagaactgcacctagctcatgatggtacctaataaatacttcaatgaaatgatgtggtgatgcatgcctatagttttagctacttgggagggtggcctgagccc

SEQ ID NO: 443818 - DNA, 536 bp, Homo Sapiens
  misc_feature (46)..(46): n is a, c, g, or t
  misc_feature (65)..(65): n is a, c, g, or t
  misc_feature (69)..(186): n is a, c, g, or t
  misc_feature (192)..(192): n is a, c, g, or t
aagcaattctcccaccttagcctcccgtgtagctgggactacaggntcccgccaacacgcccagntaannnnnnnnnnnnnnnnnnnnnnnnnnnnnnnnnnnnnnnnnnnnnnnnnnnnnnnnnnnnnnnnnnnnnnnnnnnnnnnnnnnnnnnnnnnnnnnnnnnnnnnnnnnnnnnnnnnnnnatgagncactgcgcccggcctgatttcctgatttcaaagatgtttttcccagtccattgtgaagcacaacccaagaaggtcacctgtctgttgttgctcttccactgcacagctgagagagaatgaagctgacagacactcagctggggaaggcctggggctccaaatcggctcctgggtaactgggagggggagctgggaggggccgaatttcctgcagcgggtcaccgccctgagggttctctctacaagcctctgcacaccgaggaacccaaaaaggaaaaaataaggtaacccaaaccaaaggaaatggggacctaggttaggtgccttaatgccctggggggttt

SEQ ID NO: 443819 - DNA, 450 bp, Homo Sapiens
  misc_feature (52)..(52): n is a, c, g, or t
  misc_feature (58)..(58): n is a, c, g, or t
  misc_feature (60)..(60): n is a, c, g, or t
  misc_feature (69)..(186): n is a, c, g, or t
aagcaattctcccaccttagcctcccgtgtagctgggactacaggctcccgncaacangnccagctaannnnnnnnnnnnnnnnnnnnnnnnnnnnnnnnnnnnnnnnnnnnnnnnnnnnnnnnnnnnnnnnnnnnnnnnnnnnnnnnnnnnnnnnnnnnnnnnnnnnnnnnnnnnnnnnnnnnnnatgagccactgcgcccggcctgatttcctgatttcaaagatgtttttcccagtccattgtgaagcacaacccaagaaggtcacctgtctgttgttgctcttccactgcacagctgagagagaatgaagctgacagacactcagctgggaaggcctgggctccaaatcggctcctgggtaactgggaggggagctggagggccgaattcctgcagcggtcaccgccctgaggctctctctaacagcctctgcacaccgagaaccc

SEQ ID NO: 443820 - DNA, 437 bp, Homo Sapiens
  misc_feature (40)..(40): n is a, c, g, or t
  misc_feature (357)..(357): n is a, c, g, or t
  misc_feature (408)..(408): n is a, c, g, or t
cacggagaacttgttttgttttatttaataaatatttttntcagaatcaccactccttgcttggcgtcctcttgcctccccctcgtaattagttctgtttccctcctagggcactgtctgtgtgcgtggaggtgtgggcagaggaccacgatgaaggccacagtccctccaaagccagcactcctgtgccaaagcccctgcaggtgcagtttggtggcctgtctgaagtttaaaggctcacatagaaaagcagacccctgggggcccctaggctctcccaggccacattcgagcccgtctacccccagctgagtcggaggcccctcagccctgcccttgtctgggccgtgcacacanacattcccacggctcctttccacctgtgcagcagcacctgttagaaaactnaagcttcagacccagtttagcagagtttt

SEQ ID NO: 443821 - DNA, 444 bp, Homo Sapiens
ttttttgtctgaaaatgtttttatttttacttaagcacaaaaattgagacgtaacatatacatttgtacatagaggggaaaaaataccagaaaggagttcataaaaccccagccgctgccagtatcattcagtggctggggcctgcggctgtctcgggcccagagccggaggctagttttgtgggaaggcccccgagtccacacacccactcggcagcctcgagggacagggtgctggttttaagggtggactcctacgtgtcccatcacagtgacacaccccccagggtgtgaaccagactccactgggtattagggggccctccgagagatggcttatcagtccctgctgagggatgcggttctggactggctggtcctgcccttcctgaaagtctggatgctgctgatggggagcatgggcggggcaggtggcctcgtgcc

SEQ ID NO: 443822 - DNA, 956 bp, Homo Sapiens
atggtttcatgttagtatttactaaagttttaaatataatcacgtagaaaacaaacatttcaaaaatgcaaaatattagaaatctaatcagtgctattaatctttccatgcaaacaatctcttttgctgagataagtgatactagttctgcagctgggaatatgtacaaaatgatgctgtaccagagtttaaaaatagggttggtctagagattgcacatgatacaaatgaagcagcgcaaataatatatgactaaatacaggatttcaatcaagcttatcatcctgggggaatatacagctataataccatgaatagacaagatataaagctctttcacagttacccacccctcaccactaggaaagaaacatttcttaaatacaaagagtgggtttatctgggctatccaggggctatgctgtccatctttggttatagggactccctctgcttatcctttggtttactcttaaatagcacctattctgccaataggaagagtaaacataaatttgaagaccacaacttggcaaaagcttccccttaatatacagtgaatacttaattctcaataactcagagtttatatacctttaaaaaaataaagtattccatatatctgaaacttagtggcatacttagcactagactataagcagatgacaaagaaaggccaggcctgacctataccccaaccttacctctacaatctccatggtgacagtaattacccttcattttccttttctttccagaaagggataaagaccactgctgtctaaggaatggcttcagtaaatattaaatgtcagtggctttgaataccataacatttataaaaaaaatttataaacaataaaccacagctcgcctgcctttgccactctataaacagaggcctgtggaatctgagagcaagtataaaggattatcataaagagaactacaaagcc

SEQ ID NO: 443823 - DNA, 956 bp, Homo Sapiens
agaattccagaacttctttattgtacataaaaatctgaatttcttaatatggaaaccaaaggtctgcaaaatgtactctcctagctcaggatcattatttattcctcttatttttggaatctattcttcttttattcaaggaccaactcaaaggtcagcttttagttaactcttatatccccatacacatatcctaaaggcagagttaactgctatatccaagctacttcttggcatatccttgtcagcctaaataacagagagggagactctctgaaagaaaatgatgtttattcaggagtaggcattgcaataagaatacaagtgccacagtaaactatgtgcatatacagggaggtcaaggaagacaacggtttttaaagcaaaaatgattgttttgagagaattatccttggctacaaggatcaataacaaggatgttgccagttggacattggacagggagttgctgggcaaatgtcctcatagaagtattttttgtgtgtgtcaggttgtgatggcctttgtgcaaggtgtggttttgtgcagtcttttaatgatagtcctcattatcagacatctgtgcatgaaaatcgtcctttcacggccttccccagctctatttgttaggatttttaacacaatgaccagaacttgattttgacaactttcacatcctattagtgggctcacactgttagttgctaatctcaaaagatagagttctttaggggcaggaacctgcacctcaccttgtgctcctcagagtacatggcccaatatcccaaggcccttaacacatttgtcattatttcagatttatactatgtggtgtgttaattactgcaccccatgaaacttgctgtccagcagctcactctgttcttagggttcatgttatgcaacataaagtacacagcatcacagatgaagtcatatttttttaaaaaatctaa

SEQ ID NO: 443824 - DNA, 319 bp, Homo Sapiens
ttttttttaaatctttttattaactcaatcctcttaataacttaaaaagtaggtgctattattatctgcattttgtagatgaggtaactgaagcatacagaagttagttagataacttgtctgaggtgacaagtggcagaacaaggattggaactagacagtctggctgccctaggcccaaccaagaggagctgagagcaagccatgggacataaggatgttgttcaggctggttttcttttcagttaacctgaagcatagggctgtaatgttaattttagggacattagtgagacagccttccaaagccggaggtttt

SEQ ID NO: 443825 - DNA, 415 bp, Homo Sapiens
  misc_feature (22)..(22): n is a, c, g, or t
  misc_feature (40)..(40): n is a, c, g, or t
  misc_feature (285)..(285): n is a, c, g, or t
  misc_feature (343)..(343): n is a, c, g, or t
  misc_feature (350)..(350): n is a, c, g, or t
  misc_feature (404)..(404): n is a, c, g, or t
caaattgttactaatgctttcngttccagaatcctatttngtttgatactaaagctgcatcatttgtttctagttaatgtatactggcatatctttatcactctcctttataaaaactttcaacctttttgtaccttcatattttaaatatatagattaaaacagctggattttattaattcaatctaactgggtaactttagtccatttacatttgttgtgactgatttatataggacttggcttctatcacctttacaacttctatttctctcactttctagntgtaattctaatatctcctccggggggttccactagggccatattttagggacctcantctggancctcttccccacccaacccccacccaacttctgggccccatccatcccatcccncaggggctctc

SEQ ID NO: 443826 - DNA, 1403 bp, Homo Sapiens
ggacctcctgtcttgtactccttcaggtcgcggaggaaaaggtcccggaaagccttcatggtgctgaacgtgtcctccagggacagctgctgggcgtcctcacacaggtagtcggtcagctgccgttgcttctgctcgatggcctcaaacagctcgtccagtgcccggaaggccgagatgctggcctgtaggcgctcggtgtactgctcctggacctcggccacggaggcagacaccttccgctcggtctccagaagcttcttcaggttggagctggcctctgagcggatgatctccaggttgatccctgctgcttgcgagggctgttccaggtcccggggcagctgcaggaggtcggggtggctcttttccgcttcctccagcacgtggtgcagcagcgtcacgcggttctgctgggacttggtctccgtgagcttcagcaatgtgctgatcttgaagccgtcggcgtcaccggtgtggctgccgtagttgaggaagttcccaattctcaggatcagctggcagaagatgggcagctggcggctggtgagcaggctttcgcaggcagccagcaccagctgggccttgggccgcaccatgtccagcacggcggccgcgccctcacacagcagcatgcactcgattcgcagctggtagcagggaatggccagcaggaggaggtagaagtggtcggcgctggccagcttggctcgctcctctgtgaatgcccgcaggttttcaatctcgtgcttctcgggaaggagcttaaggagttgtttgagaacctccacatcaaacttggtggtatctccagcccggatcatagcagcgacctcctcgttggagcacttaaattgcttcaggaagatgttgaggttcaggctcttcttggcatcgaggaaagtgatctccttgggctccttcctggcccggggggccaccatggtgggctccttgggcttggctgcagggaaggagaatagtcgctcgatgctggagaagtcgggctccacagcctcggcgtcggggctgctcagggacgcccacatacgagttgtgctcacgtgccacgttggatggcagcttctgccagttcagcttcttcatgcgcagtgtgggtgggttcacccgccgatggctggggacccatgctgagctcaagccatggtccacctgggccacgatgacctcctccatgcctcccgccacggcggggctgccggtgcagggcagctagctggaaggctggcgggctgcgagcgaggccacccagactcctataccaagggctcaacaggccgctgcaagcctggcccatgtaacccccccaactctccacacatctcaacaacactgacaccccactcccacgacaccgcacaacatgcctcctcctacctcct

SEQ ID NO: 443827 - DNA, 907 bp, Homo Sapiens
gtagattggacagtggagtcctgttttgcaatggtgataacacgatgagtggcttcagcttccagctccctctgggacggctggatctcgattccttctgggcctgtgatcccccagatccagtgccctccttagcacctctgggccacaaagctcccccattgttcagcatggaacgcgggcgatttgccccaatgtccttgcaagcgtgcaacacttggtacagctcactgtctcgaagcatgtacaggtccttgtaggtcatgaacatctggaacgagttgacacccttctccctcaccagtgtctccatttctgctttcaccttgggtgcccaccaggtgatccccacgtggagggcgtaatcacagcagaccttggggtcggccagacctcggcacttctcataagcgtccacaagggaggtctccttgtcgggcaggacgtggccgatgatcatggtggtgcctccgacgagtgctgccttggtcccatggtagaagtcgtccacgcacgtggcattcatgaaggtctggtggaagtgggtgctggtgtcgatgccaccagggatcaccagttttcctgtggcatcaatcaccttggccccgccagggatcatgagctcgcggcccacctgctggatgatgccattctcgatgtagacgtcagcctcgtgggtgcagtcatcgttcaccaccttgcctcccttgatgaggatcctcacgctggctgagttggcaagcatgttctcctccgagatgctgcggccgcgggggcccgtggctcggtccgtctccgtctcgccgcggcgccggagctgcgggtgctcggggcggcggcggctgcacgcgcgctcgctcgggggccgcctcagcgcgcccagcgcgggagtccagagtggggcggg

SEQ ID NO: 443828 - DNA, 655 bp, Homo Sapiens
  misc_feature (159)..(169): n is a, c, g, or t
tttttttaaataaaagttttattggagaaaaatagaaccaccacgtacacagggaaaagagcacaaaaattcaactgatacagaacaacaactgaaagtcacaattatccaatgtagtttgcaattacttttcagtttcttaaacagctcccctcaacnnnnnnnnnnnaacagtcttgctaatttttcagctgaaacagcatcaagttttcaaagaattaagagcctcggggaggggacccgctttcaagatactgaaggtgacatcaagagtctcctcctaacaggaccaactctatctaaaagttgcttacgagtaacttgaatcttgtgtaatagtctacatctcacagaccatcagggatgagttagaacactgttgttgatggtccggtatgaagagagggtaaacaaaatagctgcatttgcttgtcagctgagctcatataaagaaatcagtgaggagctgagaaaatataggcaatggctgctcaataagaattacaagttccgaataccacatatagttagacaccagtgtgcaagttgatgcaactagaaagaaatagacgactttttaaaatacctggccacaggtctttgagaactcaagcaaacaatcaacagtagacacaagagtcaaaaatcttctcag

SEQ ID NO: 443829 - DNA, 385 bp, Homo Sapiens
  misc_feature (263)..(263): n is a, c, g, or t
  misc_feature (285)..(301): n is a, c, g, or t
  misc_feature (354)..(354): n is a, c, g, or t
ggcaatggttggtatttggtatttaaggttttaaaattgcatttttgtttctacccacctgtaagctacaaaaattaaatgggtttctttcgccatctgcagctatcacttgttcaagtgaaaactagacacacttactttaataagcccagttgaagccacattctctactcatctatttattgcttaaggctattgagaggtggttttccagccagggctaaagaaagccactttgggagttcggtttcagacgaggaagnaaatatgcactcaaaggcattnnnnnnnnnnnnnnnnnccccccagaaacaacaacaaaaaaatatcagtgagaagctgctttttgcagtncatattaaaagccagaccctgcttccctaaa

SEQ ID NO: 443830 - DNA, 473 bp, Homo Sapiens
  misc_feature (399)..(399): n is a, c, g, or t
  misc_feature (448)..(448): n is a, c, g, or t
  misc_feature (456)..(456): n is a, c, g, or t
ttttttttaactcttaaggcccttttatggctgtttcttagcgaaacctcacaacatgcctatggggtgggaattgatgttccattccacagctgactccactgaagcccatgaggaagaaattggcccaaatcacagtcccctctgattacagaacagaaaaagtcagctaaaatctcaggatcacttttttcaggtgatgggaggatttcagaagttctgtggacacctgaaattgggcacaaaatcaggtgtttcatgccagtgggcattttccaggtagagggatcatatttctctcgagagtctaaaagtgtgttgaacaagcccactctttacagatggggagactgagcctggggacaggggagtggcctgcttcagaaaagacttcagaantttaaattccagttccagtgggtttgatatttacccaaattttccagcngggggagnttgatgcacccaaggag

SEQ ID NO: 443831 - DNA, 1608 bp, Homo Sapiens
ttaacagttctctgttttattgcaatacagcaaagtctggttaatattaagtgatatcaacataaagtattggtgaggagtcttttgtgacattttttaccatcccaccttaaatatttctgtgcaaaagaatccacatcattgtttggtagcagaggatctcttataaagttccctaagacactgagggcataaaaccaaacaaaataaaataaggagtgataggctaaagcagtatcttcccctccatccacatttgtcagcattatattctaaccaaaaaatgatcacaccaggccatgcaaaactgtacaatattacgagaaaaaccctaaaaaatttataaaatgaatgatattacactatcaaataaaaagacaagtcattttgttttcatgagatttcaaggttgatttgagtcagcttcccccggaactgcacggtgtcctgtgtggggagggcccagcgtgctgccagtgctggggggcagggcttacactccttatctagcagaagtgcacagagaactctggacttgagtaacaaagtcataaggaaagaggttttaaaatgggctccatgaaatgcagctcatctagttcagggctgggccagagagacgggggagtggagtgcccaattcattccctgttgtgctcaccagacatgggctacggcaaagtctgctctgagcgcccctctgtctagattggatggggagccttaggcttggcaaggcctacctgctgggagactgcagtggttgtgatcccggccaaaggcggcaaatggccctgctgcgtctgtggttttgacctctgctcacccctgctctggcttttccttaatgatacctgagatgccacataaatgtaaccagtctttctcagaaatagacgtggccactaagtaacaaaatgacataattctaacctatggaaggagagagaggctgagagctagccaggaatgatagattgttgctgtaaacatgacaggaatttcagattctcccctgaaatgtgagtacaataattggctggaaaaccaaatagatgggctccttttagttgtatctcatagccttaaagctgtgctccctaggaaataacagaaatcactaagtgtgttgggggtgtgtataaatatatacataataacaaaaaatgtaagatctactttagcaatcatttgacaagaagcaagacttttgtttttggcaaaaagaatatatatgtatgtaattttaaatacccaaagcacaaacatgattagtcagaatttgagggtagataacttggctggacatagatagcaccaaatactaacacagatagactatcccagaaatgcctctgaatgtattttttctattgagaaacaagtttctgctgccacatacgtttttaaaatgtcctgcatgaaaacaaaagaaaacttcagatagtaataaaatactttatctgtgagctttgctactgactcctctaaatggtcattatgttttctttgcctagaacccactccctgtcttttcacatcattcttctcagaagcttctggaggtaacaggcttattaagggtgggataacccagacactgcatac

SEQ ID NO: 443832 - DNA, 749 bp, Homo Sapiens
  misc_feature (21)..(21): n is a, c, g, or t
  misc_feature (74)..(74): n is a, c, g, or t
  misc_feature (113)..(113): n is a, c, g, or t
  misc_feature (263)..(298): n is a, c, g, or t
cgggccacagagaaaaaatgntgtggctcctctcaccccaaaaaggcaggttaccgaactcggggtaacacccnagcattgccctaaacacagtgtgcccatccccatcaccnaatcccatttaccctccccagatgccccactgcatggcagacccccacactaggtgctgggggcacagctgggaccatgtacatagagtcctgtcttaaggagcagacactctagaactttctttgatgatggacatgttccctaccatnnnnnnnnnnnnnnnnnnnnnnnnnnnnnnnnnnnntccgagcactggaaatatagctagtggcactgagggactgaatgtgttattttctttcattgtaataatggctactgtattagacacagaggtgtagagaggagatacaggaaacaaaaacagaaacaagggatgtaaacaccaggcagaggattgaaacagggcgacagggcagagccattggaggattcccgggtcttcaggcctccctctacttcctggaaggatagggaggcaggcgtgaggctgccgggtgacaaggcggaggtggccacaccaagacctgagccaaggcccaggagacagggcatgcaaaggccctgtgacaggaatgagctcatccagtccgccgagcagagtgaagccagtgcacctggggcacagaaggcagactccagatggtcagaagaggggatgggtcagggccaggactggggctcataattctggc

SEQ ID NO: 443833 - DNA, 419 bp, Homo Sapiens
  misc_feature (13)..(13): n is a, c, g, or t
  misc_feature (24)..(24): n is a, c, g, or t
ccccatggaaaantatgccaagtnagtttcccagggcactgtgtggcagcttcctatcacaatgctcagtatgggacagaaagacagcacagcagctcctgctaaggcctgggcaagctagtgaactctcccacctgggccagtctgagcactcactgccccaaacttccaggaacactcctagaactcagcactgcccccactatcccccacgagtcctggccaaaaggtggctctgtggggaaggtcctaatccttactcacatccactgagagaggggccattgaggaggagggtaggcagggggatggggcagggagtcatctcttctcgaggatcctggtattcaggcatccacttccccagccaccatccaggacaagccaccaggacagtcctcacctagagaactgaacga

SEQ ID NO: 443834 - DNA, 294 bp, Homo Sapiens
  misc_feature (248)..(248): n is a, c, g, or t
  misc_feature (254)..(254): n is a, c, g, or t
catattttgaacttttatttatgtttaatttttgaatttttacaagatgccgatagtagctggcttattaatgtacattattctttgatatttcaggaagccacagtgttcaactgtgaactacagagtcctgtaagtttaaaataactttgtttctcaactatgtgatatccaggattttttacaattactttgagatttttcctcatcagtaatgcaaagaaaattgcaatatgattatacaattnattttnatttttttagacaggttatcactctgtcgcccgggccgga

SEQ ID NO: 443835 - DNA, 692 bp, Homo Sapiens
ggacagtgctgagtcatctctgctgagtcatccctgttgaggggcagtgcggagtcatccctgttaaggggtagtgcttagtaagccctgctgaggggcagagtcatcaaagtcatctctgttgaggggtagtgctgagtcatcccgttcagggaagcctggggtgagcgctgccagcttcctcgccagggtgtccttattgaggctcttgtccagcttcagtgggcgcaggtggaccttaaagatggaggacctgcctttaatgtaagggggaccagtgtaaatctggcgatgaaaccggccaggccgcatgagggccgggtccaggacgtcagggcggttggtgccagccaacaccacgacgttggtggcagagttgaaccccttgctggcccaacgccaataaacatttccaggaactcagacccgttcacagtgatgaagggcacagtggcctcccctgcagttgctttggcaagaagggtcttgccggtaccaggaggaccagtgagcatggctccctttggaatttttgctcctaagtcctgatactgcttgggattcttcaggaaattcacaaattccataatttccaatttgattcttcgcacccagctacgtctgcaaataacacatcgatgttgctttttaagatcttggctgctgtctcaccaacaccgaagaggccccct

SEQ ID NO: 443836 - DNA, 440 bp, Homo Sapiens
caaacagtccttaattttccaaattatttttgaaaaaggcagaaaggttaattacatattgaacatgatttggatctgtgtcctcaccataatctcatgtcaaattgtaatccccagtgtttgaggtggggccaggtgggaggtgattggatcgtggaggtggatttctcatgcatggtttagcaccatcttcttggtgctattctcgtgatagtgagtaagttctcacgagatctggttgtttaaaggtgtgaagaacctcccctctgtctctcttgctcctgttcctgccatgtaagatatgctggctccccctttgccttctgccatgattgtaagtatccagaggcctctccagaagctgagcagatgtcagcaccatgcttcctgtacagcctgtggaaccatgagccaattaaacctcaaacctttacaaatta

SEQ ID NO: 443837 - DNA, 403 bp, Homo Sapiens
  misc_feature (331)..(331): n is a, c, g, or t
  misc_feature (362)..(362): n is a, c, g, or t
ccaattcagcagcatacactttatttctaaataggcatccagtgacacgactgttcatacatctattcctgactcccttaaagagtccaacgagatgacgcaggggctcctgcatggcagccacaggtcccccatctctgacccgccttcccctcccagcccaaagccccaccaagaagagcagcacatcactgctcaggaaacaggggcctaacaggggccttttgcagctcacttgggggagaaaaatgagtaagtctggccttcataatgcttcttaaaacaaaaacccagcactcgtcatttttacaaaggaaatgatgaaaaggantgtaaggattcacatccatcttgagggacanttcaagcttcgtcattttgagggacgatttcaagttttggc

SEQ ID NO: 443838 - DNA, 1428 bp, Homo Sapiens
  misc_feature (15)..(15): n is a, c, g, or t
  misc_feature (35)..(35): n is a, c, g, or t
  misc_feature (50)..(50): n is a, c, g, or t
  misc_feature (77)..(77): n is a, c, g, or t
  misc_feature (82)..(82): n is a, c, g, or t
  misc_feature (89)..(89): n is a, c, g, or t
  misc_feature (101)..(101): n is a, c, g, or t
  misc_feature (302)..(302): n is a, c, g, or t
  misc_feature (1352)..(1352): n is a, c, g, or t
ttctttcttccctanctttaaatcacagataaacnaatgaaaaaaatcanatccccattccgtctgcccccctcgtnacccngtgtganaacccccacccngtcaaaacctggcctcaaactttgaagctgaaaacttgaaaacgatgctgtggcggaaaagcatgtggggcttggtggaggggcccccaggatttgttgggggcaaagggggtggcgggaccgttcccaggaggtaccagcacctgcctcgatctcctctgagcctcttctgccccccgtcggcccaggtgaggtcagcancctgggagagtgcccccaagagatgagggcaccccgtgttccttggcaatcttggctcaccttggtaacaaaaggccatagaagtctgtttttctgggtcagttttttttgcctgagaataacaaattgctgctgtctacctttagcacacccaataattctatttggggcagtgaatgcatagaagatataaaaatacgcagcttaactatatcttcctgcgtgtgtatttattttcttctgggtctaggccatggtacaggagaactgtggcgtgtaggaggaatacttcaggatgagtgaaggctggagccagggagcgctggaggaaaccagccctttagccagcagcccctccaccacaggcactgctgtgtggaacgagttcttggaatgaatcccatgctttctgcagcctgtagttgttatgacccctcggaacaaccaccccgtggcttgtgtggggtctcgcagggaaaagggctggcttctaggtccccgagataagtgtgcagggggatgggccagggccaggctaagggtggctcagttccatcatctggaggtcagacacactgtccagaggcagaactgaaagccctctcggccccctaacccctaagccagccacccccctcttcacagggggagaagcttggcttggggctgggctggcaatgaaggccaagggggaaggccctgaaacgcccaaagtccccccagggttaaccccaacaggattccttttggggggccaatggaaatgcttgaaaaaaatgggttgaactggggggaaccctttctttaaaaaaccttttggggaaaagggggcccaatttggcaaggggcctttgggcccctcattgaaaggcccttccgggttcccggggtttccccccccaggggccgccaacatgggctttggaaaaaaattcctttcacacaagggggaaacccccgaggggcccacgggccccccttttttctgacacaaaaggaaagagggggccacaagccatatggggggttaaggcgcgaatttatgaggcncctttgggggggtgggctttataaggggcgtatgtggaacacctggactccggcccctagaaagatcaccatgtag

SEQ ID NO: 443839 - DNA, 610 bp, Homo Sapiens
  misc_feature (431)..(431): n is a, c, g, or t
  misc_feature (584)..(584): n is a, c, g, or t
ctgaggtttggcaaatgcatatagtgctatggaaataggaaacgttatcaccaccctagaaagtttccacactgccctttccagtcaattcctgtccctacttgaccctcaaaggcaaccactgttcctttttctaccataagatttttctgttctaaaactttatataaatagagtcacgcaacatgtacgcttttctacaaggcttcatttttttattgctgttcttttttattgctgagtagtattccactgtatgacaatattacagtttgttttcttaatttcctattattgatagatacctgggctgtttccaggattggccattataaataaagctgctatgaccattcttacgtaagtctttgtgaacataggttttcatttctttgcacgtaaattcccttggattagaattgctgggtcancaggggtagttttaaaagaaactggccatacctttttccagttcagttttattgtgccctgtattttgtattttgatgtgcataaaggtgtaaactatttttatgatccatattgaagtattagaggaagtgagtttgggaataacatgggcnttgttccagggtccagggtggacatt

SEQ ID NO: 443840 - DNA, 525 bp, Homo Sapiens
aagcctccgagatgtgtttacttattcttctgtgtccccaaaacccctttccaaaataacatttaaatgattgttctgtgctgtgtgttcaaatggagataatcagatgccagtggctttacaatgtgggttgcattccattttcccaggcgcccaggtcctgggtctctaggccaccgcccgccgtggccgcccctctgctcaccagggaggccagacaggaaccctgcagctgccagagcaagcacgtcccacagccttgggaggcctcccaaaatgtgtccagattcccacaggcagagagagagggactgaaaggctgaagtgaagtgaccgtgcctgcccagcctgggactgagagcctgaagaccagctttccagactctgtcccagaacccccttggccctcagcaaatcccctcctcctggcctgaaacagactccaggcttcttgcagagacgtcttctgtggagaaccagaaagattgagtccaccctgactgtcccgggacagagctgctgagc

SEQ ID NO: 443841 - DNA, 585 bp, Homo Sapiens
  misc_feature (30)..(30): n is a, c, g, or t
agactctccacttacgatgatggactgatntcgttcatctctggccatttgcttgtaagcttcttcagctactgcaaagatatgtggatccatatcacccatgttctgaccactgtatgcattaataatatcttctccataaataggcagctgttcatagggatttatagctactaggactataccacaatacgtataaataagtttggaatcaataaagcggactctgagattatggagcacagcaggctcatgaagatagctgagggctgtgaggtcattttcaccaacaagtatgtcaggatttcgtaagtgaggcagctccttggtctttggatctagatggtattccaaatcctttccttcctcgaggtgaagcaggaggactttatctcctggcttataatctttgagcagctctgctgacttccagacttcctctggatcaggtatccaaaccctggcaaactttgtgtagagctccgacgcagccatggcgggccccgcgcgcctacgccccccgcctgtgcggaggccgcacctcgcctgggcggccgcccgagcggactaggaagcgcccgcagc

SEQ ID NO: 443842 - DNA, 566 bp, Homo Sapiens
  misc_feature (508)..(508): n is a, c, g, or t
  misc_feature (533)..(533): n is a, c, g, or t
catctctaaataaaatcgatcgatcttcaattatgtctcattatacagtttacttaaccagatttttacaatggtgccatggtgtaggcaatcccggattaagaggtcccttttacaaataagggaatagactttaagatggctgccagtaagtggcagtgctgggacttaactcgggtctcatcattaatccagggcttctggaattccgggaatatggcactgtctgccataattttgttaatttactgcttgttttagaaatacatctgttataactagaaattcggggacagcttagtcaatttgttttccttacacgcgaaatgaagtgaaatgtagcagtctgctcattagtgctctggtgggatggtttacctgtgaaccttggagaaccatgtcctgctttcactatttaaccaggaggaatggctactcccgatatcttaaatatatgtaggacattaatggacacacttacattccaactcagtcattgccactctgnagaatcttactgctatttcaaatgnccaattacagcaattaaaatactgattactgtt

SEQ ID NO: 443843 - DNA, 474 bp, Homo Sapiens
  misc_feature (209)..(284): n is a, c, g, or t
  misc_feature (374)..(374): n is a, c, g, or t
  misc_feature (405)..(405): n is a, c, g, or t
  misc_feature (413)..(413): n is a, c, g, or t
  misc_feature (425)..(425): n is a, c, g, or t
  misc_feature (437)..(437): n is a, c, g, or t
  misc_feature (448)..(448): n is a, c, g, or t
  misc_feature (460)..(460): n is a, c, g, or t
ttttttttcatctatttttatattctttctagacatttctagacatgagtcaagagaagcaaatgccttaacgaaggcaattttgatgataatggtgacaacatcactagccaagttattccttgactttttggttaaatataaaatccatatgtagataagatcacatctacctatatgtttcacttttcaaaaatgtcgaagttggnnnnnnnnnnnnnnnnnnnnnnnnnnnnnnnnnnnnnnnnnnnnnnnnnnnnnnnnnnnnnnnnnnnnnnnnnnnngagaggctgaggagggagaagatcccttgagtccgggagttcaaggttacagtgaggctatgatccgcaccactgcgcttccagcctgtntggacaggggcaagctgctgttcttcaaaancaaaccancaaaagttcggngtaggggttgtnccgcctttttngaaaaagggggnaatttaagtttttc

SEQ ID NO: 443844 - DNA, 349 bp, Homo Sapiens
  misc_feature (61)..(61): n is a, c, g, or t
gacaatctataatataagatttattgcaaagaattggcttatgtggcctggctaggcaggntcagaaagagcaagctggaatctcaggcatgggctgaagcagctgtccataggtgcagtttttttcttcctcagagaagcctcatctctgctcctaaggcctttcagctgatagagtcaggcccacccaaactgtctaggaacaatctcccttcctcaaagtcaactgattatgggactttaatcacatctacgaaataccctcacatcaacacactgattagtgtttgattgaataactgggaactgtcacatagggtaagttgacacatcaaactgggccatccca

SEQ ID NO: 443845 - DNA, 1050 bp, Homo Sapiens
  misc_feature (116)..(190): n is a, c, g, or t
taaagtacccccacccaggttcttgttagccgaaatccggaagctgggattttaaccccatgcagtttagctcccagagcctgccttaggtaactcgtcaatggtctctgcaggcnnnnnnnnnnnnnnnnnnnnnnnnnnnnnnnnnnnnnnnnnnnnnnnnnnnnnnnnnnnnnnnnnnnnnnnnnnncttatggggcttctcatgatgacactaataaagacatcattgtatagctccctcctagagctgcgacagcctctggagggagagcacaggaagccgtgttatggggtgcctggtgcctgtctggtgctcagtgattaacagctgtgatcagaattgctcttcatcagggcacgacatggctgtgtttgccctccccgggggatgctggtgactgtgtccagtttcttccagtactgttggccagttttgtggggcacaagggcgggagagatggaaggccagagggacaggagtgcaattcttactttaacatcatttttccagtgagctatgtgataggggctgaagcagcaagaatgaggtgtgtgagccctgtccccagcatcctggaggggcggtctatgctgagagccccaccagcaggaggactgggaggagcagggccaggacctgtagtgctcggggaggggtggtggctgaagcactggtgaagggctgggtcatggatttcctgttgcagaggtacccctcacagcaggagccctggaggtcgatggctgtccaggggctggtggtgccctcggtggtgcaggagggccggtggcaggttctgatgtacacagggactgagaaattgccaactgtcattctgccattgccctggaagcaggcggtctggtcctggtgacactggactcgtcgggacctgccgatagcgcagtcatcctggtggaccccgatacaggcgtagcactcggcgccgctgagcgtcggcgggtcgggtgcttggctcaggttggggagggcgtcatgagtcatgaggtgggcgttgcattgtcaatcccgggaattccggaccg

SEQ ID NO: 443846 - DNA, 668 bp, Homo Sapiens
  misc_feature (47)..(47): n is a, c, g, or t
  misc_feature (50)..(50): n is a, c, g, or t
  misc_feature (64)..(64): n is a, c, g, or t
  misc_feature (66)..(66): n is a, c, g, or t
gcccgggcgggcgcgaatggcagcttcctggtccgagacagcgaganttnggcgagggccttcncnctctggtcctgtatcagaaagcatgtgcacacgtatcgcattctgcctgatggagaagatttctgggctgtgcagacctcgcagggtgtgcctgtgcgccgcttccagaccctgggtgagctcatcggcctgtacgcccagcccaaccagggccttgtgtgcgccctgcttcttcctgtagagggtgagcgagagccggacccaccggatgaccgggatgcctcagatggggaggatgagaagcccccgctgcccccgcgctctggctccaccagcatttctggcccccactgggcccagcagtctcccttgccagctcctgagactcccacagcatcacagctgctgagaggtgagtacccccatcaccatccactgaacaggagacccatttctcctctgagaactatttccctaccaaaggtggggaggccttctaagaccccaaccagggacaccccaccaccacctcagcccagaggcagataacctgatccatcccagcctaggttcccacaggtactatctcctctagggatggggcagaggtgctgggacaggtcagcaggacctctcgataacgcctcaggcttacgtacgcc

SEQ ID NO: 443847 - DNA, 416 bp, Homo Sapiens
ttttaataaaaatgtttttatttatgctgaggcaatgtattgtgtttaagtactttatagcaaagattagaatttctgatttttcattcaggaaagggaaaaacctttactactactaattttaaaaattggctttgaaagtccccacagactacaaaatagttacatattttagagaaaattatatgcagagcctcataagccaactggtattgaagcctttttttccccctagactgtaaagattttaattcgtaatgctcaacgtaaaacagaagtgagaggtacattacactagtcggacaagctggaatgtgaaaggtcttagtgaggcacggtgaccaaaagatgtttaatgtacacctcacttttccagaagagaagggtcaggtaacaaagaagttcatcactcttat

SEQ ID NO: 443848 - DNA, 761 bp, Homo Sapiens
  misc_feature (601)..(601): n is a, c, g, or t
ggctgtttggtgagttataattaagggcttggctgccttttctggagtactgcatagtttacaaagtgctttcacatacatgatctaatttggtttactgaacttagaaaggtagactttcaaggaaaaaacatcgatttccaccaatagtaaaagctactgcatcagacctgtcactcaacagcgctccttgaggcctagctcctgagatccctctggcgagcccttgcggctccacatcctcgggacggcacgctcccacaggactggagcaaaggtttcagagactcgggatacagccagatctcttcggtgaggagactcagtcttactcgagtgtatgtgatttttaaaaaagacattgaaacaactatggaagcagaggcaaaggcagcaaggctttgggtttgcgactgggaatccgtgcggcctccctttggtgaagacctgaccccgtggtgggggtgaacagggtttccttgaccccgtcccagggttcccttcaggacagatggatttcactaggggaagcgtgatgctggtagcctccactctcaggctgggcagggtaggctcccagggagggcagctcccagcgcancttctttccattcacttccggtctggagcttaggaagggagagaagtgagctgaggctcttaggaaagtgctggcactcctgcctttcttttttcccaagggtgctctttgacatccggagtgcagttcagcaggtcttttccgagtggggttgggttgc

SEQ ID NO: 443849 - DNA, 541 bp, Homo Sapiens
ggaaatactttgcagagtttatttggacaggttcaaaaatagtccttcgacaatacaatcagatcgaaccacgacaagtaaaatgcaattatgggttggttacatttttaaaaaatgtaaacaggtttgggaaaactaaaagcaaaactacatcgtcatctcctccattcccaacccctgcatttcttacaagcaggacttcaagacggcatctgcaatcttttgaaatggatgagaggatgacactcactaaaggagacagctcaacagtgtgttctgaggccatttctcagaacaaaggcatacttctgcataaggcaaatgcagcctgataaagcttcccctagtgggtacatggaatgccaaagtcattcacctaaatgagctcaaaatacatattgttctgggccaaattatacagtgtcaagctcagactgtatgtatttatgtatgttggcagagcaggccacttttggggcgccacagctttatcctagcatcctgtgccctgctgggttcccatcgctgtctccccaaaccc

SEQ ID NO: 443850 - DNA, 457 bp, Homo Sapiens
  misc_feature (329)..(329): n is a, c, g, or t
  misc_feature (434)..(434): n is a, c, g, or t
ggaaatactttgcagagtttatttggacaggttcaaaaatagtccttcgacaatacaatcagatcgaaccacgacaagtaaaatgcaattatgggttggttacatttttaaaaaatgtaaacaggtttgggaaaactaaaagcaaaactacatcgtcatctcctccattcccaacccctgcatttcttacaagcaggacttcaaggacggcatctgcaatcttttgaaatggatgagaggatgacactcactaaaggagacagctcaacagtgtgttctgagggccatttctcaggaacaaagggcatacttctggcattaagggcaantgcaggcctggataaaggtttcccctagtggggtacatggggttggccaagttcatttcaccttaaatgaggcttcaaaattacatatttgtttctggggccaantttttacagtgttcaaggttcag

SEQ ID NO: 443851 - DNA, 837 bp, Homo Sapiens
cggatggattgcaccgcctcgaggggcctcacctggcagggtgcctggtggccacgttggaagcggtcaatgcccaggcaccagaggctgaaagtccgtgactcccagagaggagacctccatgaagggcacggcacgacaaagagaacgtcacccagtagcctctgcttggtgatctcgttgaagatgacaatagggaggcagaaaaagaggaccagaaaatcccagagggccaggctggcaaggatggagttccaggcgctcttcaggtagtagctgtgccacacgatgcacatgaccgacaggttgcccacaatgcccaccgcaaacaccaccagcgccagaagcatgatggcataggcactgtaggagctctcggtcaccggatacagggggttctggatctgtagcctctgccctggtgcccctgtcagattgcccctcagttcctgcccactgtctggggtgcccccatccttgtcggggttagggctggtggccaccaagggcttggttggctgcaggccagcagggtgaatgggccgggggtactccgcccactcctcaggcacatactgctgcacgcccttggcctcctcatcctcggtgcccctcttggatcggctctgctgctcctgggtctcggctctgtgcctgcccaggtgcaggggggcacccccagagaccctgcttagccccacagccaaaatcacagcaagagagacagccaggggccacagccaccgcatggctggatgagcaggagcgacgcgtggtcgacgatatcccggaattccggaccgtaccagctgcttttaatcgacgtctatatgcata

SEQ ID NO: 443852 - DNA, 1032 bp, Homo Sapiens
  misc_feature (48)..(84): n is a, c, g, or t
tggatgactgatatataggcgcccgccggtttatcgcggtggcggcgnnnnnnnnnnnnnnnnnnnnnnnnnnnnnnnnnnnnnatcaggccaaatcggccgagctcgaattcgtcgagagcggagtcacctgctcttcctgggctggctgtctcctgctcatccagccatgcggtggctgtggcccctggctgtctctcttgctgtgattttggctgtggggctaagcagggtctctgggggtgcccccctgcacctgggcaggcacagagccgagacccaggagcagcagagccgatccaagaggggcaccgaggatgaggaggccaagggcgtgcagcagtatgtgcctgaggagtgggcggagtacccccggcccattcaccctgctggcctgcagccaaccaagcccttggtggccaccagccctaaccccgacaaggatgggggcaccccagacagtgggcaggaactgaggggcaatctgacaggggcaccagggcagaggctacagatccagaaccccctgtatccggtgaccgagagctcctacagtgcctatgccatcatgcttctggcgctggtggtgtttgcggtgggcattgtgggcaacctgtcggtcatgtgcatcgtgtggcacagctactacctgaagagcgcctggaactccatccttgccagcctggccctctgggattttctggtcctctttttctgcctccctattgtcatcttcaacgagatcaccaagcagaggctactgggtgacgtttcttgtcgtgccgtgcccttcatggaggtctcctctctgggagtcacgactttcagcctctgtgccctgggcattgacccgttccacgtggccaccagcaccctgcccaaaggtgaggcccatcgagcggtgccaatccatcctggcaagttggtgtcatctgggtgggctccatgaccgctggcttgtgcctgaagctctgcttgtggcatggcccagagccttgcccacatgggcacccttggactcttgcctcagca

SEQ ID NO: 443853 - DNA, 957 bp, Homo Sapiens
ggatgtcggatacattgaacaggaacgctatgtgccatgagttacccagctcgatttaccctttgctaagggccaaactgggtcctggccccccttcgaatgatctggcctatatgccggatttcagccttgagaggttttcgtgtctttgtattcggggtagtttctacctagtttattgtttctcaagaagggcctcctatgggaaagcacctaacaaggaggttgggacagggcaacccagggatcccaaagaaaggaggaggaaggagagagaaatcctctggaagaaaagaaggcaccagtaggaggaggcatccaggactgggacagatctggtccagagaagagtgtactggggctggcaaggatggagttccaggcgctcttcaggtagtagctgtgccacacgatgcacatgaccgacaggttgcccacaatgcccaccgcaaacaccaccagcgccagaagcatgatggcataggcactgtaggagctctcggtcaccggatacagggggttctggacctgtagcctctgcctggtgcccctgtcagattgcccctcagttcctgcccactgtctggggtgcccccatccttgttggggttagggctggtggccaccaagggcttggttggctgcaggccagcagggtgaatgggccgggggtactccgcccactcctcaggcacatactgctgcacgcccttggcctcctcatcctcggtgcccctcttggatcggctctgctgctcctgggtctcggctctgtgcctgcccaggtgcaggggggcacccccagagaccctgcttagccccacagccaaaatcacagcaagagagacagccaggggccacagccaccgcatggctggatgagcaggagacagccagcccaggaagagcaggcgagtccgctctcgacgaattcgagctcggccgatttggcctgat

SEQ ID NO: 443854 - DNA, 689 bp, Homo Sapiens
cggggacgcaggaaaaagagggacccagaaaagtccccagaggggcccaggctggccaaggatggagttccaggcgctcttcaggtagtagctgtgccacacgatgcacatgaccgacaaggttgcccacaatgcccaccgcaaacaccaccagcgccagaagcatagatggcataggcactgtcaggagctctcggtcaccggatacagggggttctggatctgtagcctctggccctggtgcaccctgtcagcttgcccctcgagttcctgcccactgtcttggggtgccccccatccttagtcgggtttaagagtctggtaggccacctaggcgcttggttggctatcaggcccagcagggtgatatgagccgggggtatctccgcgcactcctcaggcacatacctgggtgccacgcccttggcctcctcatcctcggtgcccctcttggatcggctctgctgctcctgggtctccggctctgtgcctgcccaggatgccggggggcacccccagagaccctgcttagccccacagccaaaatcacagcaagagagacagccaggggccacagccaccgcatggctggatgtatcaggagacagccagtccaggaagagcaggtgagtacagggggcccaagagctgggctcccgagaggcagctggaccggctggatccccgct

SEQ ID NO: 443855 - DNA, 601 bp, Homo Sapiens
gtcttcaatggtgtggagagccaaaacgtttagaaactgaagcttctactgggcaacagctgaactctctgaacttgtcttctccttttgatttgaattttccattgccaggagagaagggccctgcatgccttgtgaaggtttatgaagattgggattgtttcaaagtaaatgacattcttgagctatatggcatactgtctgtggatcctgtgctgagtatactgaataatgatgaaagggatgcctctgcactgctggatccgatggagtgcacagacacagcagaggagcagagagtacacagtcctcctgcttcattagtgccgagaattcatgtgatcttagcccagaagttgcaacacatcaacccattattgcctgcctgccttaacaaagaggagagcaaaacctgtaagtttgtttcaagtttcatgtccgaattgtctccagtcagagcagaacttcttgggttccttactcatgcccttctgggggatagtttggctgctgaataccttatattacatctcatctccacagtattattacaagaagagatgtccttccactagggaaaattttacagttaacttgtagt

SEQ ID NO: 443856 - DNA, 499 bp, Homo Sapiens
  misc_feature (454)..(454): n is a, c, g, or t
gcttgtgaaggtttatgaagattgggattgtttcaaagtaaatgacattcttgagctatatggcatactgtctgtggatcctgtgctgagtatactgaataatgatgaaagggatgcctctgcactgctggatccgatggagtgcacagacacagcagaggagcagagagtacacagtcctcctgcttcattagtgccgagaattcatgtgatcttagcccagaagttgcaacacatcaacccattattgcctgcctgccttaacaaagaggagagcaaaacctgtaagtttgtttcaagtttcatgtccgaattgtctccagtcagagcagaacttcttggggttccttactcatgcccttctggggggatagtttgggctggctggaattaccttatatttacatcttcatcttccacagtattattacaagagaggagatgttccttccanttggggaaattttacagtttaacttgagtggttggcccacgggat

SEQ ID NO: 443857 - DNA, 460 bp, Homo Sapiens
  misc_feature (423)..(423): n is a, c, g, or t
  misc_feature (429)..(429): n is a, c, g, or t
  misc_feature (439)..(439): n is a, c, g, or t
cctttaaaaaaattatttttattgtggtaaaacatatataacataaaatttaccattttaaagtacacaattcattggcattaagtacattcacaatgctgtataaccaccacaacggaacttttgttatagagcttttcttcatcgctataaaggagtaatccttttaaacataagtcacagcatgtcactaccctgcccgcaaacattcagtggcttcccatcttgctcagcaagggacaaagtcctgccgtggcccacagagcttttggctgtcctctctgaacgctctcttcactcatttcacccggtcattgggctttccttggctggtcccctttggacaaaggtggaccctggctttcttccttcaggggtctctggcatgtgtttttttcctttgctgggaatgctctttttccntggganatccatgtantccccatttcattcaggagct

SEQ ID NO: 443858 - DNA, 1332 bp, Homo Sapiens
  misc_feature (351)..(360): n is a, c, g, or t
gaagcggcggtgtcgctctcgatattggcacgctgaacgtggcgtgacgcgggcgaaaggtagaaagcggggagtgggggttggcgtcagcggggcgccgggcgatatggggggcagatgggacgctaaattgcgagacacacgataaaatggcgctgtctgcggcgaatgcgaaaatacggtggtggacggcgggagacgtgtgttgatgatggagggaagggaacggggcgggatgcgtatgtagaaaccgttcatgtagcttcgggcggggcgttgaaccggggtgggaagaggaaaagcgggggccgaaatggcgcggggggtgagaacagtggcgaaaagagaaannnnnnnnnnccattgcgccatagaggtaggagtcagacggttgaacgtagggacgggtcgtacgggggtcgacgttgctagcggcaggacgcgaggacggaggtgctgcggtgggggaagcactggtgggggcaggggtgcgggccggagtcggcgggttctttgtggatcgtggggtccattgttccatttgggtggggcgtgtctgggggtccgggttcagggccgcggcagggtccataggggaggctgggtgatgcatgacgctggaggacctgaaagtggggtctagctcgatgcagaagccaggccagccaggcagagtcctactataggcatgcagctcagcttgtcccctccaatggtcagccttataatcagttcgctatcttagcttcttccaaaggagaccatctgaccacaattttctactactgcagaagcattgctgtgaagttccctttcccagctgcctccactaatctgcaaaaagcactttctaaagcactggaaagccgagatgaggtgaaaaccaagtggggtgtttctgacttcatcaaggcctttattaaattccacggtcatgtgtacctgagtaagagcttggaaaagttgagcccctcttccgagagaaattggaagaacagtttaagaggctgctattccaaaaagctttcaactctcagcagttagttcatgtcactgtcattaacctgtttcaacttcatcaccttcgtgactttagcaatgaaaccgagcagcacacttatagccaagatgagcagctatgttggacacagttgctggccctctttatgtcttttcttggcatcctgtgcaagtgtcctctacagaatgagtctcaggaggagtcctacaatgcctatcctcttccagcagtcaaggtctccatggactggctaagactcagacccagggtctttcaggaggcagtggtggatgaaagacagtacatttggc

SEQ ID NO: 443859 - DNA, 943 bp, Homo Sapiens
  misc_feature (707)..(798): n is a, c, g, or t
ggcgagacattcggtcgacctgggttaagtcttctgcattaattacaataagtaatactcattgaaaactttccttatttacacacagttgaacagttattctaagaaaccattttcccaccctatttaatattgacagatttcttcagttagaaacaaaaactcaaaacacacgcaatcctaaagaactcatctatgtcccccttatctcccctcatcttatgtagtccctaaaacagggcttgctgccctttcttcttcttgccttttcagcagatgagtcaaggttgcagaggtggcagtcaaccatagagtcacagagtttgatttttttccatccatcaggtcgtagaagctgccactgagcctgacaagagttggtactcaaaaatgcagaatgaattagtttgaatgaggtgattaaggattaatgagtagtggttaaggaaacaaagaccattagtggatggggtaatattgctgtattactgatggaagcaggattctctaaaaaaactttctgcagccatttacttacatacattttaaagagttactacaagatattttaaaaatttaaacagttaatacaagaaaaatatgaagtgaatagttcatgacactaaactgaactgttcatgacacaaagtatcttagaaaacaaatctcggctgggccagcacttttgtgaggtccaggccagcaannnnnnnnnnnnnnnnnnnnnnnnnnnnnnnnnnnnnnnnnnnnnnnnnnnnnnnnnnnnnnnnnnnnnnnnnnnnnnnnnnnnnnnnnnnntggttgctgtatcccgctacggggaagggcagcagaaatcgcttaacccgaatggggtgcgcaaggggacttccctgatccagcgggaacaaatttttcaataaaaacccgagtgtcttgacgaacatttcttgaaagagggtca

SEQ ID NO: 443860 - DNA, 459 bp, Homo Sapiens
tttacttgtaaatttcatatttattgtaacaaaaattatgacatgtccatttgtgcattctgcttgagtataactctgggtatgtaaatggcctaatggggcactatacaaccatgctgattgtggcagcagtaaggaacacagttaaaagtgtctgtcaaagtgggaaggctgggacaggggaggaaaatgggttcagggcccttgggtgcaggttcttgtccagtggcctaagatccatttcctccggacagaaacactgcagctgctcagcctcctcattcagtgaagtgagggtgagttgtgaggcaggcaggctcctcagaggggagggggaggggaaacgtcagttacttgggctgtgtccttacgccaagactacaaaacatcgtaagcctcactatacaacactgagctatttacaatggaaattctcaatcagctgttctctcagagaaa

SEQ ID NO: 443861 - DNA, 936 bp, Homo Sapiens
  misc_feature (259)..(259): n is a, c, g, or t
  misc_feature (912)..(912): n is a, c, g, or t
  misc_feature (925)..(925): n is a, c, g, or t
tgagccaccgcacctggtccaagaacccaagttttagatctagagtgatgtcagcatgacattgatttcctgaggcccagggtcgaaggagctgaggacagcagaggggtgaaggaactcagctacagacagcagcagctgatgcacagggctcccagcgcctgaagtcacccggaattgggaagtgctcagaagcttacaaagctgcctcgaggaacagtaagaggaccttttgcatgaataatttgtttccacactngcagacagaagaatcccagacttcttagagaacccagtgactttttgcaccttaaatctgtgaaatcctcatgctttcttctgccgtatccatcgttcaaacaaacatgaggcaaagctagacacattcctgaaggaacccaagaaattcctctctttctctctctggaatgaaatgaattctctagaccaccagttctaaccttcaaaaaccaaacctgtttgtgagatctccttcaaatactactgtagaccccagtgtttattcattaaattttttaaatatttgttttatttggaatccatgtatttgtaattttagtgtttgtattaatataagggagaaatgtttaaatctgtctatgccatatttgtctttggcttattgcccaattaattgtagcctcaggtaaactttggtttctgtctttaatttttgtcagaagaaatataactgatctcaaaacatctgcttttattgtaggggctcgtgctgccatctccattcctctctcttttcttgcaatctggggtgggaagttctttaatatggaacatttcaaccaccttcattctacccatgtccactatcaggcacattcaaacttatcccagcccaggggtgttcatcttaggggcagggggattttttanggggatccattanggccgtggagc

SEQ ID NO: 443862 - DNA, 763 bp, Homo Sapiens
  misc_feature (649)..(649): n is a, c, g, or t
  misc_feature (734)..(734): n is a, c, g, or t
gtggagtctgaagttgtcatgcagtgactcatgcaagcttaggcagatttggtgatatatgacacagagatgcaaagaaatgttgtagctgacacacaccggctggctctgggagatgcagaaggagcacgtcacccaaaatagagccagacagacatccttaaggaaagagccaaggggctgcatcttaaagaatgaagaaaggatttgtcatgagagatgggacaggaagttcttgagaggcagagggagattgtgagaatgttgggaagggaggagagattctcgcacatctgggaagctgacaatccatcagcatgtccggaaggaaaataaggaggaggagcagaaatagatgaggctggatatagaagcagggctgaagctgtgttgattgtggtaaagagttgtgattctatccagaaggcaataggtagcattctaaacagagatcttttaaaacaagagtcagcaaatattttctgcaaggggctaaatgttaaatattttaagttttccaagccatatggtctctctcttaatgactcaggtcttccattataccatgaaagtaaccagagacgttttttaacacatgtattggctgtgtcccattacaactttacttacaaacgcagactgtgtcagncctggtccatgcatggtagtttgccacaccctgttttagaaagctcaggtttatgatgtgatggagaatgcctacaagagctctngtttttaaatggtagagtgaatatacact

SEQ ID NO: 443863 - DNA, 1253 bp, Homo Sapiens
  misc_feature (232)..(493): n is a, c, g, or t
  misc_feature (587)..(597): n is a, c, g, or t
  misc_feature (943)..(955): n is a, c, g, or t
caggtggcagaaagaattaaagaccctttcaggtggattctttaagaacagataagtgagcaattaaaaacagatggaacgaatccattccatataaccagaatctgaatggattgggacgaagatgtatcacacccaagtaaattcagagttttccacaacaagcaacgtcaacaccggcattttcttcgcttaaaaagccaactaagggccgggcgcggtggctcacgcnnnnnnnnnnnnnnnnnnnnnnnnnnnnnnnnnnnnnnnnnnnnnnnnnnnnnnnnnnnnnnnnnnnnnnnnnnnnnnnnnnnnnnnnnnnnnnnnnnnnnnnnnnnnnnnnnnnnnnnnnnnnnnnnnnnnnnnnnnnnnnnnnnnnnnnnnnnnnnnnnnnnnnnnnnnnnnnnnnnnnnnnnnnnnnnnnnnnnnnnnnnnnnnnnnnnnnnnnnnnnnnnnnnnnnnnnnnnnnnnnnnnnnnnnnnnnnnnnnnnnnaaaggaaccaaccaaactaggtgactttaatcggtgttcaccaagaagacccccaaagtgactggaaaaatgctagccttacatataccccccnnnnnnnnnnngagagagaaagaaattaacgatccccatctataactaggctaatcataggttttcccttatagagacagacacagaaaagtaactttttacaagcttagttttgaggtacaatgccttagagctctcaactggggtgtttcctgctcatgctcttttcactataaacaaatgtggtttatgaagtggaatacatacttgaaaaattccttaaaaaagaatcacaagtttcattttatatatacaacaaatttttaattatgtactgaaaataaattacaggaaataactttaaaatgcaacagaggacaaagtcacaataaacattcccattgaattcccttggtnnnnnnnnnnnnntgagattgcagtgctcaagataaatatcacaaatatatcaaaaacttcaaattgtctatgcattcacacactgacatgggccacaaacattcctttcacagggactgtacttatttggcctaccacaggaccagattttgccataaactacaaaacttttaatacaaaatcgtatttatatatttataggtcatatacatgccctatctgtgattttagaaaataaaagctacacactgtacagacactcttaactcatagctgtaggcaacatttttggatggaatttcttcccccc

SEQ ID NO: 443864 - DNA, 822 bp, Homo Sapiens
aagatgctcgaggatgctgtccaggtgggcggccgcgggcgcgatgcggcactgcaggtgtaattagcatggtcaatgcgggagcgatgagtggctctggaaacctgatggatttcctcgatgagccgttccctgatgtggggacgtatgaggacttccacaccatcgactggctaagggaaaagtcacgggacaccgacagacacaggaagatcaccagcaagagcaaggagtccatatgggagttcatcaagagcctgctggatgcctggtcgggatgggtggtgatgctgctcatcggcctgctggcgggcaccttggctggggtcatcgatctcgccgtggactggatgacggacctgaaggagggggtctgcctgtctgccttctggtatagccatgagcagtgttgctggacttctaacgagaccacttttgaggacagagacaagtgtcccctgtggcagaaatggtcggagctgctggtgaatcagtcagagggtgccagtgcttacattctgaattacttaatgtacatcctatgggcgctgctgtttgcatttttggctgtctccctggtgcgtgtatttgcaccatatgcctgtggctctggcataccagagataaagaccattttgagcggctttatcatcaggggctacttggggaagtggaccctgctaatcaagacagtcacgctggtgctggtagtgtcctacggtctgagccttgggaacggaagggcccgctaatgcacgtggctagtagctgtggcaacgtcttcagcaggctttctcccaagacagcaagatgagggcagag

SEQ ID NO: 443865 - DNA, 505 bp, Homo Sapiens
ttttgcattaatgctgttagtttaatgtggacagagacatcccacggcgtgactgttagttaggatgagtcagcttgggggagtttgtgcttcctgcttggtgtggccagccacatgccaaggtcccctgccttctagcccagaatgacgggactgggcagaacacccccaacttttagctgccacttggctcattacagcagtaccagtatgggggtgggaggggtgaggctgtggagtgaaggcggcgtatagggcagagactaagaggtcctgtgagattcttagaggagccatcctgctccaaggggcctgagctgagtgtggtctgtgagcatctgctgctcctctcagagagggagatctcactctctgccagtctgtctagccccaaagagcctggttttctcagtatcagtgtagctcctggggacttcataggcataaagtcagtccattttccatgaagataaggggattaggaaagaaggttctcctcccttgg

SEQ ID NO: 443866 - DNA, 363 bp, Homo Sapiens
  misc_feature (326)..(326): n is a, c, g, or t
ccccgactagcccgacaagcggtgggtaccagcaagtgaccaggtgcccatcgctgagggccctgccccccctgcgggggcctctctccctgtgactggcagctgtgaggccctggtcatcggccagggctccatcttcctgtctggggattcagtggcatgcctgggggcaaaggcttcccggtggccattgtagaccccctcttccacggccccggcctcctcggcagcagcatccagaccttcgagctcaagggcttcctcttcaaaggccggggctccctctgcagcccggttggcgtggcccagggctggggccccatctncctcaacaatggcctcgtccctgtggggaaacacacg

SEQ ID NO: 443867 - DNA, 519 bp, Homo Sapiens
  misc_feature (34)..(34): n is a, c, g, or t
  misc_feature (39)..(39): n is a, c, g, or t
  misc_feature (46)..(46): n is a, c, g, or t
  misc_feature (65)..(65): n is a, c, g, or t
  misc_feature (445)..(445): n is a, c, g, or t
ggtccgacatccagccgtgccaccatcctggtgnaactntcctgtnaggatggccaaggcctganctacctgccgggggagcaccttgggttttgcccaggcaaccagccggccctggtccaaggcatcctggagcgagtggtggatggccccacaccccaccagacagtgcgcctggaggccctggatgagagtggcagctactgggtcagtgacaagaggctgcccccctgctcactcagccaggccctcacctacttcctggacatcaccacacccccaacccagctgctgctccaaaagctggcccaggtggccacagaagagcctgagagacagaggctggaggccctgtgccagccctcagagtacagcaagtggaagttcaccaacagccccacattcctggaggtgctagaggagttcccgtccctgcgggtgtctnctggcttcctgctttcccagctccccattctgaagcccaggttctactccatcagctcctcccgggatcacacg

SEQ ID NO: 443868 - DNA, 426 bp, Homo Sapiens
ttttggtattttacaaatacattcatattcaaagacatgggtgcttatgggagaggatggtgtaaagaaagggaaaaaagccataaaaccagagaatctttgcatgggactgtattcctgagatcccaaaccaaagggatgaatgtgctgttatgccttaaatgtgtgcaccaggaaatgcaaactagaaagggtggctctgaagggtcctcaggtgaggaagacccccagggctgagaatccaccaccttcatccttcaaaagagtacctcagttgtctgcttacgcttcagccagcatgtgtgagcttggtcatttcctgcaagccaggcaaccacaccagtgtataagcctcaagcaaatgtcactcccaagccccaaatgggactaaggcctctgctgggctaggcgtggtgtaaatcccag

SEQ ID NO: 443869 - DNA, 1245 bp, Homo Sapiens
  misc_feature (35)..(35): n is a, c, g, or t
gcctggaaaaagcttttgtccccatccaaagaagnaaagggagagcttttcccgtccccgggccagttccccatggcctcctcatagtgggacatgagggtctttagaggggaatctcgagaccagtgagacttcccagtgtctggtgtttctcctttcccctgcaccccggagctggagctgttgggacgtctctgtggcctctggagaacttgttagtaccacacagtcaatgatgtcagccactccgagctttagggtcctgggagtggcagtaggtgatagctctgtctctccaaaaagcaaaaggatcctgcttggggacaccccaaggtgggtggccatgtggtccaccacactctgcaggggctccgacatcctgaggggcaatctgaccaggtcagcccggcaacggattttgagtgggaagagtcggggggtctctgggagggtgggcccttccaccaagaccacttcatcctcttggccctgttgctcttgaccctgaggtggcttggggctcagacaggaacggagatcctggaggcgcttgttcacctcacttaacttcttgagtgcccgagtatgcgttctgcttttggtccttggtgaaggtggggacagaggagagttgtccagatccagaaactctgtctttttcttctcttctttatccttagtcctcagctttgtcttccagggagagcctggtgatggggagccctcatggtagagaccactcgaatctgccagctctgcctcttcctcatcccctggagggtagagtttcaggagggatagatcatctgggataaggcgaaggctgcttttaaccttccccgagtacaccggaaccagcggcgcctcccccggatccagcaccagccgccgccgccgcctgaccggctcccgcggggttcctgcgggccgcctgtcctccccttcgctgtcactgttgctgttatcccgggacgcgaccggccccgggggctccgggggctccacctcaacctcgtccgcggcaccgcgagcggtggcgacctccagaatttcctcatcgctgtcggtgaccaagtccacagacactacgtccagcgtgccccgggatggagaccgctgggcccgaggacgccggccccgaccgccccagccgccccgaccccctcggccggcaccgctacctccggaccagcggccccgcttccccacaggctccgccatggcacactttcctccccacccgct

SEQ ID NO: 443870 - DNA, 886 bp, Homo Sapiens
gcagtacctactaaccggttcctaaggtagcgacggctgggtgggaattcggcacgagggtttatggtatatttcttttcgtctatatatacatatgtaacagtcaaatatcatttactcttcttcattagcttgggtgccattgccacaagatctagcctaatttaccaaggatgacattctttcaattcttcatgcgtgcccttttcatatacttattttatttttaccataatcttatagcactgcatcgttattaagcccttattgtttgtgtttcattggtctctatctcctgaatctaacacatttcatagcctacattttagtttctaaagccaagaagaatttattacaaatcagaacttggaggcaaatctttctgcatgaccaaagtgataaattcctgttgacttcccacacaatccctgtactctgacccatagcactcttgttggttggaaaatatttgtccaattgagtaacgctgcatgctgttcccccaggtgttgtaacacaactttattgacttgaatttttaagctacttattcatagttttatatccccctaaactacctttttgtttcccattccttaattgtattgttttcccaacgtgtcactatatcattgcgttcttatatcttcctaatacagggtggtccggtttgtctgaacctacagtgcttcgacttttctggacgtgataacttctgggttgacaacattatttctccttccgggacgacattgtacacgcaacgttcccttaactccttttctaaccctcatatcaagctaatcctgcccaaattgcgcgactactgatctacttcaccacgttagacagcacgcaccgggccaatctctaactacgtaacaca

SEQ ID NO: 443871 - DNA, 452 bp, Homo Sapiens
cccaggtcccaggaaaaatgcaaggtcacctaattccaacaggaaacaactgggtccgcatccggcccttccgcaccaactcctcccagctgggactacacccgcatctgcatccagagagagatggtcccccgccccatccgcgtcctgagagagatggtccccgaggcctggaggtgctttcccaacaggtgccgctgctgagcaacatcaggcctgatttctccaaggctcccctggcctacgtgaagcggtggctttggaccgcccgccacccccacagcctgtccgcagcctggtgaccgtgaaaatcgccccgccagagagcagaggaagcccgacgcccaggccatctgccttcaggtctgtgatgagaaacggagtggcctgttccgttgtgcccaggtctaggccgctgagcagagccctcactcccaggcagagttgtctga

SEQ ID NO: 443872 - DNA, 1178 bp, Homo Sapiens
  misc_feature (24)..(24): n is a, c, g, or t
  misc_feature (1025)..(1033): n is a, c, g, or t
cggggaccatctctctctggatgnagatgcggttgtaattcccagctgggaggagtgttgcggaggggccggatgcggacccagtgcttcctgtggaagtaggtgaccttgcagttctccctggacctgggagctgaggaaggcccctggactgcagaacccagtgcttttgggcggggcgcagctttctggcaagcggcttgggccttccagtagacactgggctgccagaagtttccgaaatctgcggtcaaggccagagatcaaatgtcagggctcagtgactagcgacggttagcatcaaaatgttggaaagtgcacaaggcgccgtgtgccaggtacggtctgtccaccaactgttgcatggggcaggaggccacggccaggccacagctttgccgcgcgcagctgcagaaggggcaagtagcgccccatgctgtctggaggaccaaggaggctcaagcctgtccttcccactcatggtcccagacacttagctctgggcagaggggcctggcagctgtctctgcttttgtacctgacctttaaaggcagaacatagaagaatttctgccaggtcctgaaaactgcagatacctgttgacagaagggtgctctctttgatcagtgtgaaaatgatcacaatacacttggaggctcttttaaggaaaaacaaatcatttgctcatattcgtctaggatgactgttaatatcactttttgcaattttgctcttaagaaaacggtgaaagccatcaggatttatgttttagtacctgtaatgctgattttatgttgaccctcataattttcagtgttcacacagccatatatacataatcttctctaaacactaatgccatttctgtcctttcatttctattggtaatcctggagtagagtgaggcacattttccactaatagctgaaaagatctaacttcaaaaacaaagaatccaaaggctgcttagtaactgtagtgcctaagtttagagtctgttcaaggtggtgtgaaaagttttttnnnnnnnnncatttccctcaaaagcacgtggagaaggaacctattgaccctctggaatgccagaatcgggaagagacaaaaaagtcgcaaccaattgaagattgggcaatagattggcccagactgaggcagatgatcccgggaattccggacc

SEQ ID NO: 443873 - DNA, 987 bp, Homo Sapiens
cttagctctgggcagaggggccctggcagctgtctctgcttttgtacctgacctttaaaagcagaacatagaagaatttctgccaggtcctgaaaactgcagatacctgatcatcatcaacctctactggctgcttcttaatgataaaggtgatggactcaagacagggctggaccagggagatactggacctacttgggtccagtaatcctagacaggtgggcacccaggcaggaagtgccaaacgacccaaattccataacagcgtcctggccaagagactgggtcactgagtcattatttagtagtgaaaaccactcaggaattggacgccgaggtgacggttctcagggagtatctggagatcagcagtggtccagaggagctccaggcccttctgggcagctacctgaagaattgctgcttaggatggaatcatgcccagcctttgtttctaaaattaactgtgtattttttatattctccagtgggaaaacagccaaaaccatttgatctctcaattctagtgaggttccagcaggtagtctcctctgagtattgctgggaggtattagacagtggccagtgcataaagaaggaggcttcacttcttcaagggagactgagaattttcccgaaatctttaaaaatactcctatcacagccaaaccattttcttccagtgctgcatcctcaaagttttcaaatttgactgcgttccaaatcactaagtgcagctgatttatctgtagaatcttcaaattccacgaggaaagagtacccattattccagacgtggaggcaggtggctgggtcataagagatggtcagtggttttaagccgggatcataaacactgtccctccaccgaatgttgatgggtgactgtcgatcgcccccaggaaccaggtccacgctctcccagagtggatgcactgagccagagcctcctcgttcgctcccggtacccgaggatcccacacggcg

SEQ ID NO: 443874 - DNA, 1178 bp, Homo Sapiens
  misc_feature (681)..(702): n is a, c, g, or t
  misc_feature (939)..(939): n is a, c, g, or t
  misc_feature (1003)..(1003): n is a, c, g, or t
caggcaagggcccatttcagggagcccaggaagggactaattggttttttatgcaaccatccctgcaggagaggaatagcttcatgtggttgtaaaccagggctttaaaaaatacagaagtcctttagggcaaatcattaaatcccctcgttcatgtccctgaaaagtcacctgtcacagggctgtcctcacagcctgaatcaccatgagatctcctgggggagttcttgtgtcatttataccccacccgcttttgaggaggatcccaggtatcttgcaaaggaaggagtaatgcacctaatcccgagctttcccccttgttcttcccaactctctcggtacatgaccgctaaaatcaaaatctgataaacgaatggtcacaagaatgaaacaataacgctgccggtaagaagctgaatattctgttcaaaagttcatctgcaaatatagccacgctcttcttcctcaaaggtagtccttttaattttaagctgatctatcactcagcccttattcatgcataattctcagtaaagatagggtgcatctaaggtctgcatgcccacaatcattttatatctccgagataacaacaaaaagccactcaatggacaatcttaaaacatgcacccaaaaccatggctgacagtatgggaaaatgtccttcagaccaaagaggcnnnnnnnnnnnnnnnnnnnnnnacaaaagcgcaaggtaaaagactcaagatgagacaaaaggactagaatggctccacaacagaacatctgtagttgggggaggaggggacaaagcagataaaactaaggaaagctctatggatctgggagcgcctctccaagtatttggttcatgctaaaaaatagagcacatttattagaaatatatttataaaccttgacatgaacagatacacatgtcaagccaatgaaaaaagnaaaataagttatctccccagtatcaaatagttagacacttttgatgaatgggatgcctgtcaanaggtgcgcctgtggtttttccactaaatagctcgtcaagtgaagatgaaacacttgtcctgggagacacacatctgagccatgtccgccctattcatcttttcaaatatgtgatatctgtcagcgatctggaataatgaatttctgcacccatccgactcaccgatggtgttcag

SEQ ID NO: 443875 - DNA, 460 bp, Homo Sapiens
tatttttgggtcagaggcagtttattttaaatgtgatttcatttacatttataagcagcttttcttgacaggaattttgattaaattgccttcagttctaaaacaaacctctgttgctttcagacttaatgtgctctgtccccaacaaaacatatgaaaatataatttaaagcacagttttcacagacacagtacaatacattcactatacacagtataacaaaatattcccatccttacctgtttagtaatactgtcacaatgaataagtaaatagaaattggaatttatctttgaaagcattgaaagaaatttaacatgcacaatgactattttatgactgtttatctgttgaactactgatccagcctgcagtttcttgcactagaaagagcgaagctaaataataatcgctggcctaaaaaattttttttggtcacttgtaggtagatatgaaata

SEQ ID NO: 443876 - DNA, 1004 bp, Homo Sapiens
  misc_feature (25)..(25): n is a, c, g, or t
  misc_feature (200)..(213): n is a, c, g, or t
cttgtttacaaatgaaatagtttcncttaaatgggactctagccaaggcagttaattagtcaaaagatccacagctgtcatatagtcacacattgtttattctatttgctatgtcgaccactgatgtgtatttaatattctgcatccttcacaggaaatgacaaatgccctgaattatttgcaaatagaattgctaatgnnnnnnnnnnnnnntgttgatgttaattaaatggtgattaaaaatttatctcctttaaatctaaaaagtgcagctttaataatcagttgtcatataaataagtaccttgtactgaaatcccttgcggtttaagacctaaataaacactaatttgagaactctaaataccttacagaggagctggatatattcgttaacattatgcacattcctgtactgtttctttgtgcatagctgttgtgcatgaatccttgaaaaggggacatgcgttgtttctgaaatggagcctgtttgtattaaccatggctatagtagacatgattggactcaaagaaaaagaagtttgagtaggtggaagctaaatgtgttgcttgatatttaatgagtgaagggttctatgtaaaggcaattttccttccaaaagtactgtttattttcactggagacaaaattagacctttccagataccccatctctttttggtgaaacagggttgaaaagtgctgtggggtctatacttgaaaagttctcccaatatgcagttactggtttcccattcaatccctatacattgtactgtgttcatatctaattgtatcagatgaggtcagcttgccacttgatatagatcagagatgatcaaatgcacttatcctgtgaatacaactgcttgtgtacacatgtatataatatacatgcttgatttctacaattcacacgtaagtgtattatccaaataaaattgtacatattgtaaagtttatgttaaaaattaaatggtgatgatggtattaacacatggaa

SEQ ID NO: 443877 - DNA, 1339 bp, Homo Sapiens
tcgtgggtgcgtcgtgtggtgcggtgtcgggggtgtttgtgcggtatcgtgcgtaccgggtttcgggtaatcgccccccattggggcccgcagatgtccgcttgtaccagaagcttggtcaggtaccgctttggccctgggcccgttcggtgccctgctgttctccgcagccccgggattagagtgcctcggaggtttctttttgtgttttttcaaggaaatcaaatcttcaatgaatgaaaaactcagtgccatctggggccagggggtcaccggaccaggtggaaagtcagccagtatatgatgaggggctggaaggctgcagctcccagagtcaggtagagctggagacgctgccgggggacggggccccccatgctgtcggggcccagggctgctgtccgcaaagagcgcacaatgaagtacatgagcgccgatgaggtccaggccagcgccacgtagtagccatcgctgccgaacagcagccccgtgagcacactgaggatcattcccacgtatttgtagccactgtaggccagcaggtgaaaggtgctcaggtcactgcgcacggtggccaggtagaggcccaggagcagggccagcacctccatcaccacccacaccagcgctgtgcttgcacacaggcccagcacctccggggagaaccttttctgaatgcccagtgccatcccagccaggagcacgtaagtaatgaaggccatcgtggggatatagaggtcaggggcgttgaggtcttgccgggggggcagaggagcatcacgactgtactgcacttcccagttctggtgtgtgtaggggaagaccagcagccctagcttcttggccacgtaggctgtgtccacagcaaaaaaatacttgagtttgctcacagacacaaaacggtgcagctccttgtgcaccatgtccttgcccatgggatgcgatggagctgccataggccatagccacattggccattgggtccccaagcaagtggttgacactgaaggccacgtctgctcctgtggctgggtatcccccgggctggctggaataaccaccgcttgtgtcatcgaagaggggagggggatccggggctgcccgggccctgtgcttggagccgtgggctccgtagcccgagtgataagccatggccgcgacgctcgctgtccccgagggcccgctgcgccgcctcgtgggtacgaatactaatgaggcagctgctccgcgcccagggtaccgaccgaggccacccggccgcgcgacacgtcccccaccccgccggtctcggccacccgacgcgtgggtcgacatatcccgaaacgccggaccgtaccag

SEQ ID NO: 443878 - DNA, 880 bp, Homo Sapiens
taaatatgggggaactcagacaagacccccgtgggaccccccccggagaaatcattctcccccggattattgggaaccacacggtaggcccacacggggaaagggtgatacaggtccacggcgccagcggggcacaaggaaggggccccaggagcagaggccaagcgcctgcgatcaccaacccacgccagcgctgtgttggcacacaggcccagcacctccggggagaaccttttctgaatgcccagtgccatcccagccaggagcacgtaagtaatgaaggccatcgtggggatatagaggtcaggggcgttgaggtcttgccgggggggcagaggagcatcacgactgtactgcacttcccagttctggtgtgtgtaggggaagaccagcagccctagcttcttggccacgtaggctgtgtccacagcaaaaaaatacttgagtttgctcacagacacaaaacggtgcagctccttgtgcaccatgtccttcccatgggatgcgatggagctgccataggccatagccacattggccattgggtccccaagcaagtggttgacactgaaggccacgtctgctcctgtggctgggtatcccccgggctggctggaataaccaccgcttgtgtcatcgaagaggggagggggatccggggctgcccgggccctgtgcttggagccgtgggctccgtagcccgagtgataagccatggccgcgacgctcgctgtccccgagggcccgctgcgccgcctcgtgggtacgaatactaatgaggcagctgctccgcgcccagggtaccgaccgaggccacccggccgcgcgacacgtcccccaccccgccggtctcggccaccatgtccgtggcgtcatcccc

SEQ ID NO: 443879 - DNA, 763 bp, Homo Sapiens
  misc_feature (436)..(436): n is a, c, g, or t
  misc_feature (535)..(612): n is a, c, g, or t
  misc_feature (737)..(737): n is a, c, g, or t
tggggatggggtgttaacttgcattctttggggttcaggtctcaaatggctcttgtagccctgggatctgaggagcgagaccaggactcagctatctccaccccggaagaaccttccctgctcttccacatccagcccaggcctcggcttcctcgtctgcaaaacgagggtgctgagaagatgggagcaggggtccagcgttttcatcagcagggctgttgagatgtaattcccatgccatagtgcccactggttgaaagtctatacagttcagtggtttctagtgtattttcagatatatgcagccatcactgtggtggactttagaacatctctgtcaccccaaagagcaaccctgtttccattggtgtcactcccggggctccgcattcccagcccagcagcctaggacaagttttctgcctctgcaggaggnccccaagtttcagatcttgatgtctcctttctgtggggagtccagcaggcatctccaccttagggacagcttagtggacagtgctgtgtcaccatcaannnnnnnnnnnnnnnnnnnnnnnnnnnnnnnnnnnnnnnnnnnnnnnnnnnnnnnnnnnnnnnnnnnnnnnnnnnnnnggtgaaaatgggatcatcgtgctgacctcaagggcagctgttaggattcgatgttcctcatgttcacggtctcttaaccgtgtgggcacattctggggtgcccatggttacgatgatggggtttnggggctggagggatcagtgactttct

SEQ ID NO: 443880 - DNA, 1258 bp, Homo Sapiens
tcttcttcaagcttctttttcagttcttctatttctttctggaactgacgcagcaaagcatccttggatcttcatttaattctagctttatttttaatattcttagcacgattggcataccgtaatgtactgatagtttcatcataattgtattctgctggcccaatatttgcacacatcatggtttttgaatttcctcctaaggaatcctgaagaagacgagtcagtttagagttacgataaggcacatgagtgctttttccatcaaccaaggcagaaattacattaccaagggtggaaagtgaaagattgatttttgtagcttcctttaggcgctgtccagtagctccagtttttgcctgtctttctgaaccagcaagatctacaagatggagcttccccatcctgacatgcatgttaccatcaatgcctttttcactgcattctatagtaattgtaaagatggcatgggaacgggaactatgttcgttcatattagttgcaccaacagaacgatttttgtggcctagcgtcataattctatccatatcatcagcattatttaccacataagctgataaatctttgatataaactcccacatcaggtctttctttaacctctaacctttgtgtctgatccttgcccaaaaggtcacgaacttcttcattatatatttccaaataagacactcgaaccaaaaaatcttgtatcaccctccgcttttgcaatatgaccaaatatgtgagcaaatgaattgggaattattcctctaagttcaggaatagctcgaacaccttccatggtaaaagttttgcctgttccggtttgtccatatgcaaaaatagtcccattgtagccttcaagtacagaatcaataataggtcttgcagttaagttataaacatcaagttgtttactctctggtccaaaaacagtatcaaaagtaaatgtctttggaggttcattggaagaatcagtcttatgtacagtgatagttcccctcatctcatccacactgacagcctgtttgtagcacattgatttctctctctcattgaggggccggcacctaacaacaaccttcacattatcgcagctttctggcttctctgatttattgatcggcatcttggccccctcccgtgcccggcggacgtccccgcccggggtgcagcccagcgacaccgggtgcgcagaaaggatggccagagactaccgaaacacctcgttgacgctctcgagactgcggcttctc

SEQ ID NO: 443881 - DNA, 247 bp, Homo Sapiens
taaaaatagtattgcaagttttggcttcttttgacataaaaatcacaatcgtgtacgatgctaacaatggaagcgactgatcggaatacgagccggtcgtccagtctgaatgcttgcgattctgcatgattttcctttccttttctttttccaaagaaacaaaacaaacaaacacgaaaaacctttgccattttagaaccatcttgtaccaaaccctaaatgctccggtggtgacgtgcacgcgcgt

SEQ ID NO: 443882 - DNA, 347 bp, Homo Sapiens
gtttaggtttgaactgactttattattttgtaaatgtgaattttacaaagcgctttacaattaatgatcacatccttttgtttgtcatggatttccactgtctgaaacggctctgagcacgcttgaagccctcggtttccctgttcgcttttgaatgtttcagttttagttattgatacaatgtcagccatggctaaaaagtaacagtcttgactctaccgagtaacagcacaaaaacagagtgagggctcaggaaaacaaaacaaacaaacacgaaaaacctttgccattttagaaccatcttgtaccaaaccctaaatgctccggtggtgacgtgcacgcgcgtg

SEQ ID NO: 443883 - DNA, 772 bp, Homo Sapiens
  misc_feature (744)..(744): n is a, c, g, or t
ggatgaaacttggaggcttacaggtatagacagctttcagctacagcacattctaattttttattttgtttagttcttttgtattcacttctggtctctttaagactgttttaaaagaaatcaatttagggaaccccagttatataatataaactttgtaatctgagagaaaaaatgtatagtaaatctaagtcttgatttttaactttctattgtaaaaaataataatatacagagtttaatagaaggtgatgttttggttttgttttcccagaggctgccatatggtctttgagtacggggatgtcccaaactggcccaccaatgagcatggcggctccggccaggaatgccagagttagcctcccaggcttgcgggtggacatgcctgctccctgccagcctccagtggcctggccaggccttcccgagcctgtctgccctccccaggggtggaggagtctctgggccccaggaggattccctcccggagactcgcacggtgctccctgctcacgcgttgtcacagttagtccggaaatgactgaaaccaggcattctcccggacctcagcgtgggggagcctccagggaggacgctgggtatggagctgtggtgtggtctgtcctgtatggtggccagtgctttctgccagcatttctggatggatattagggactatcattagtatcctaatacacggtgattttaaaacaaccattaaaatttgatttcagagtccantgacccttaacagatgttaggtataacc

SEQ ID NO: 443884 - DNA, 382 bp, Homo Sapiens
  misc_feature (229)..(229): n is a, c, g, or t
  misc_feature (322)..(322): n is a, c, g, or t
attgaagaattcaagttagttttattcaaaggtcttactgagaatcctagacccaggtcccagcccgggagcagccttagagagctcctgtttgactgcccggctcagtgtctcggcccactgcttggttacgggggccggggctcaggacctgcacagtcacatccatccagctggctccgaagttacattacagcagaatcacatcaaggtttggggcataaggagncacttctgggttacagattacagaaggcataatcgctaaccttgggccaacattttctcatgtggcacggaaaaggccaagggaccgggggtnctttcaccttttaaggggatttacagtggactcaggggcaacagacgcggggggccctgt

SEQ ID NO: 443885 - DNA, 1522 bp, Homo Sapiens
  misc_feature (1461)..(1461): n is a, c, g, or t
ccgtccggaattcccgggatctgcgcttgcgcgggtctccgccgcctgggctcctagggactgtggcctcggcggtatgtcccttgctttcccttgaagcgggagaagacccggcagaggcgctctgtccgctgcagccgcgcgggtggaggaggcagagtctgaggctttggggtggcctgccaccttggcgtccttacagacctgccgtgtgttggggtggccaagaaacttctgcaggtggatgggctggagaacaacgccctgcacaaggagaaggccctgaggagccacgaccgcagcaccaggcccctctacatctccgtgggccacaggatgagcctggaggccgctgtgcgcctgacttgctgctgctgcaggttccggatcccagagcccgtgcgccaggctgacatctgctcccgagagcacatccgcaagtcgctgggactccccgggccacccacaccgaggagcccgaaggcgcagaggccagtggcatgccccaaaggagactccggagagtcctcagcactttgttgaacgtggtggtgagagcacacgtcctcgtctcattcctgatcgaacgcggtggtgagagcacacgtcctcgtctcgttcctgatcgaacgcggtggtgagagcacacgtcctcgtctcgttcctgatcgaacgcggtggtgagagcacacgtcctcgtctcgttcctgatcgaacgcggtggtgagagcacacgtcctcgtctcgttcctgatcgaacgtggtggtgagagcacacgtccttgtcttgttcctgatcttaagggaacgtttgcagtctttcaccactagatgtgatgtgagctgttagattttcaaggatgctcttcatccagctgaagacggtcccttctagtcctaatttgttaagtgtttttatccttaaagggtactggattttgtcaaatgcttttctggcctctattgaaaagatcctgtgttcttctgttaatatgaggtgttacattgattgattttcatatgttgagccagtttccatttgtggaatacatctaactcggtcatggtgtataatccatttactctgctgctgaatgtgatttgcttgtattttggtgcggatttttacatctgtatttataagggatattggtctggtgttttcttatgatgtcttcctttggttttgatatcaggataatattagcctcatagattgggttaggaaatgttctctcctccgttttttttggaagagagagattggtgttaattcttgctagaacctttggtaggaatttgccagtaagcctatctggtcttggggtctttgggaggattttgattcgattcaatctatgtatttgttataggatcgttcggattgtccatccctgagtcagttgctagcttgtgtgtttcttggagtttttccgtttcgtccatgttatctcatctgtnggcataccgtcgttcacgggattttattgatgtgtgtgaggtctctgagaacgtccctgcc

SEQ ID NO: 443886 - DNA, 769 bp, Homo Sapiens
ttgggcatccactgcctctgcgccttcgggctcctcgtctggtgccccggggagtcccagcgacttgcggatgtgctctcggaccagatgtcagcctggcgcacgggctctgggatccggaacctgcagcagcagcaaagtcaggcgcacagcggcctccaggctcatcctgtggcccacggagatgtagaggggcctggtgctgcgtacgtggctcctcagggccattcccaggacagtcccagagtctcccagcagagggaatgagtctcctcgagtctgcaggagttcggatcttctccttgtgcagggcgcttgttcgtcgcagcccatcgcaccgtgctagatagtttcgtatggccaaccccgaagcactacggcaggtctgtaaggacgccaaggtggcaggccaccccgaagccatcggtgcgtggagtaccccgtttccatccacaagaaggacctcgagctcagggaagctgagcaccaccagggaagcacaagcgcggacactgtcccctttcacgaaggacacgtcaacgcccccgaccctctgcagacccgagaaggcggggtctcgctgccacgcctcggtgtcccggtctacgacgtgggccttcagccgagcttgctcccgtttccacagtgacagcgtttcctccggcggccctcccgccgcctccagggccatggcttcgtcccgggcaccccttccgcacgcgacgcgtgggtcgacgatatcccggaaattccggacctgtaccagccc

SEQ ID NO: 443887 - DNA, 804 bp, Homo Sapiens
catccgttaaaatctaacagctcacatcacatcttagtggtgaaagcctgcaaacggtcccttaagatcaggaacaagaacaaggaacgtgtgctctcaccaccacgttcgaatcaggaacgagacgaggacgtgtgctctcaccaccgcgttcgatcaggaacgagacgaggacgtgtgctctcaccaccgcgttcgatcaggaacgagacgaggacgtgtgctctcaccaccgcgttcgatcaggaacgagacgaggacgtgtgctctcaccaccgcgttcgatcaggaatgagacgaggacgtgtgctctcaccaccacgttcaacaaagtgctggcgcacgggctctgggatccggaacctgcagcagcagcaagtcaggcgcacagcggcctccaggctcatcctgtggcccacggagatgtagaggggcctggtgctgcggtcgtggctcctcagggccattcccaggacagtcccagagtctcccagcagagggaatgagtctcctcgagtctgcaggagtcggatcttctccttgtgcagggcgttgttctccagcccatccacctgcagaagtttcttggccaccccaacacacggcaggtctgtaaggacgccaaggtggcaggccaccccaaagcctcagactctgcctcctccacccgcgcggctgcagcggacagagcgcctctgccgggtcttctcccgcttcaagggaaagcaagggacataccgccgaggccacagtccctaggagcccaggcggcggagacccgcgcaagcgcaggccagacccgct

SEQ ID NO: 443888 - DNA, 1332 bp, Homo Sapiens
  misc_feature (121)..(146): n is a, c, g, or t
  misc_feature (298)..(298): n is a, c, g, or t
cgctttcacagagagatttatcgagaatgctaacaagcacaggatacagtacttcccaacaaaaggtgcaacgcgtcacttagaaaggcatgctgagtattctttgctttcacatgtattnnnnnnnnnnnnnnnnnnnnnnnnnnctgcgtgctgcccatcttttccaatagtaaaagaaccttatgaaaaaatcacttgatttttacaacaaaagacacaaacggacatttttatgtaaatttataaggcaaactctttatataataaataggttacagggattcagtgggggggntgtgtttttgaaacgtatacaggtacattcagacaggtttactgaaatggtacaaatttccttaataaattgccttttgtttttaaatatatcagtgctttcagtcatttggctatacacaaagaaccttttttctgaacactacaaaaaagcaatcaataatttttgtttttaaaacgacctacttattttctaaagtaattgtcccaaaacacaaaaactgaaggtgaatacgatacagggcttttagagacatctccagctaagtgtgtcccggcctctccctgtgccccaagtgcacctctcccaacctcagacaggtttccaggctggagccagctcccttctgcacagggtggcctgtgttactggcaatgctgtccatagctctcggcctctgggctggcacaggggaggatgacttcaactcaggagggggcagacaccctgcctagctcttccagatgctgcacccggcatgcaatggtcactacagtcagcactctccgcctctcagaggagggaggggctgtcaggtgttttgggagcccaaaaccatgcctaatgagggtaatggcttttctaaggagatgttttcgccatggaatgggaaggggttttctcacatctaagttttgctggcgatcgggtgacagccaagagagtgcaagccccctccatggtcattttattgccctgggaaggggagggtggggaatagagatgtcacagtgttgagccctggaggatggggtgggatgtgacggaagtgtcttaaacagtaatgcccacggggcacaccttggagagagaatgcccaccacctggcctgtccaggaagagctgcatctgccaacattagcctgacctgtgcccacagcagagcgtcccagcctcctgcttgggtgggcccagccccattctccccagctcttcagctctgcacacacacatcccctcctggctcccctcaaggaaacatcaatcttgcctttccttaaaagcacatccggagaatccggaccggtccagcc

SEQ ID NO: 443889 - DNA, 475 bp, Homo Sapiens
  misc_feature (60)..(69): n is a, c, g, or t
  misc_feature (414)..(414): n is a, c, g, or t
  misc_feature (423)..(423): n is a, c, g, or t
  misc_feature (459)..(459): n is a, c, g, or t
ttttttttaaatttataaggcaaactctttatataataaataggttacagggattcagtnnnnnnnnnntgtttttgaaacgtatacaggtacattcagacaggtttactgaaatggtacaaatttccttaataaattgccttttgtttttaaatatatcagtgctttcagtcatttggctatacacaaaggaaccttttttctgaacactacaaaaaaggcaatcaataatttttgtttttaaaacgacctacttattttctaaaggtaattgtcccaaaacacaaaaactggaagggtggaatacggtacaggggcttttaggaggacatctccaggctaagtgtgttcccgggcctctccctgtggccccaagtggcacctcttcccaaccttcggacgggtttccggggntgggagccngggttccctttttgcacaggggtgggcccgtgttanggggcattgttgttcc

SEQ ID NO: 443890 - DNA, 236 bp, Homo Sapiens
  misc_feature (126)..(126): n is a, c, g, or t
aatgagacaggttctcaatctgttacccaagctgcagtacagtggcatcatcatagctcactgcagccttaaactcctgggctgaagtgatcctccagccttagtagctgggattacgggcgccanctttcatgcctggcttcaattgctttctctgatctaactgtgttggctaatacctccaggaaaataaagtaatggagatcacaggcactggtcctgacttcagggggaat

SEQ ID NO: 443891 - DNA, 951 bp, Homo Sapiens
gtgcacatgccacaaagcaaaccaaacatagctcagttttcctactgataacatattttgtcttttaattttggcatgtggaagtcacagaaattcacagacttaatatgcacacccaaatattctaagtgcttatttagggagtatctttatttggaataaagaatttcgagttataaaactgatggcttatagaatgcagcttactaaattggtcttcgttcttacaaactggagtaatcttgtcctttgagagttgaaaatacatattcatctacatttctgcagcgagtggcccacagttaattttcatcactggtggggttggcagaatgttcactctcttctgctgctgtgctgtgtcttcgttgacttggaattgcaggaagcactcggtttgtccgcagaggttctccagatagaaatttttgatctggtaggggagctaggttgttccgagtgaaaggaagatccctgattttgtgtctgtttggggaaagatgctgaaaattttgtcctgatgatggattatgtagatggcgaaggtgtggtggcacggagacctcttggtgaccaggccggacactgagcaatctgtccagcagcttatcagaagaagacacagtccaaactttgtaggaaaatacctgattagaatcactcttccaggggttatctagtaacatctggcagccagttctgttatttaataaatcctgctcacttcgacttttctgagatcgctgggccatatgatgaggagcagagctcaggcctgcatgggaagtggccctatgggaggctgttaggaagttattgcccagggtgatgggtgggagactctgcgttctgattggtggaagccccttacgggccagcggtttcttttctggtaagagatattttgaattgtctgaggttttcttcttaaattcaaccatagccacctga

SEQ ID NO: 443892 - DNA, 405 bp, Homo Sapiens
  misc_feature (332)..(332): n is a, c, g, or t
tggaatgctttttgccattctgaatggtaaatgatgagacaggctaccatggatttcagcaccccttctgtgtttgatcagcaaagaggtgactcatctgaggaagttgacctgaccatggtttatcaagcagcctctaatggagatgtcaatgctctgactgcagtgattcgggaagacccttctatcctagaatgctgtgacagtgaaggatgcacgcccttgatgcatgcggtttctggacgtcaagcggacacagtgaagctgctgttgaagatgggagccaatattaacatgcaggatgcttatggccgcacaagtttatgcctggncacctacctgggctggcttgaaggcttgtgtgagtctacttcagaaacggtgccaagcacaatattcccagat

SEQ ID NO: 443893 - DNA, 466 bp, Homo Sapiens
  misc_feature (365)..(410): n is a, c, g, or t
aggcgggtcctgctttattcagaaccagcacggacccctccccgggctgctccatgcccaccgggggcctggggagagtcgggggaccaggtgaccagaggaagctccgggctcccctgccctcacccatggtccagccctgccctctgcctgggcagtctgggcggggcaggcctcagtccactcagcctgactcagcgttggcttcttgaactccaagaggcgccactgtacaaggcttcccggaggtggcggccacacgatggccaagatttaggggtctggtggcgggcagggccgtcacccgcagtccgagggggccacgggcgtccaccggcagggggagctccgggctgcctggtctnnnnnnnnnnnnnnnnnnnnnnnnnnnnnnnnnnnnnnnnnnnnnngtatggcttgggcgatgaggccaggcagggcctgtagagaggcacccagcgcatcc

SEQ ID NO: 443894 - DNA, 388 bp, Homo Sapiens
  misc_feature (33)..(33): n is a, c, g, or t
  misc_feature (362)..(362): n is a, c, g, or t
ttttctgcagagacgcagctgcggatgcgctgncgggcagggcgattctcctgcaaatccagcaagtcaaaagagtccgctggacagcacgctgtcatcgctgatgacactggaagggcggctgtagctccgggagaggccctcggcagggacaccaggctctgacagggattccagtgtgggcatttcagggctgaccagggctgggtccatggtgcccgctgagtatttgctgctgtgtttcaagatgcccttcctccggcaggagaggctgtgggaggttaccctggctgggtccggggggctgggggaggggatgctgctgcccatcacatcattactgtccaacagctccgaagacncactgcgctctggggaagagtagtaa

SEQ ID NO: 443895 - DNA, 946 bp, Homo Sapiens
  misc_feature (935)..(935): n is a, c, g, or t
ttttttacaaaagaaaaaatactgtttattccacacaactacatcaagcgcttcttccccattctcctctccccttgctgcccctccagccctcaggaagctttgtctgtgttgggaacagtgagaacctcagtgccagagcctggtccaagaggcaggaaggaaatctgggcatgggaaggtaattggatttccaagaacacaaaaatgtcagagtctcgcattccaaactcgtgtgttccttagtccatttggctgagttctttccctggacttcacctggataaaatgccgtggtaatgcagggtcaaaggccctagctgatccaccaggaaagttttggtctttcttccatttaaaacaaaacaaacaaaactccacacagttaaaccatttctgtccattctcctctctttccatagtaaagacgacactaagctctggtgtaagtccagaagattgttttcaaaacaaaatgtataccaactccttcagagcctgatgctaacaaaaaataaaataaacctacctcctaggtgagaggttcaggccccagctgcttcctggggggtcttacactgtgggaggaagggcagaggtcacaggccagcgagctgtgctttgggtaaacctcagggacaccctgcgacccccatgcctggggaactcagcctgcaaacctcccacccctggtattgttcctctgaatgaccaatccatcattccagcagaggagaaatggtttagttttagctcagctttgggaagacaaatttaaatgagggaggggctgagaaagcatgccaggcctaatttagaccagtggttcatgattgttttcccatcatgacacaggacagatggtgttcccctgcacgtccaccaccacagacacaccctggattatgtgctattcccagggtgccagctgtganccatttgtctc

SEQ ID NO: 443896 - DNA, 313 bp, Homo Sapiens
  misc_feature (277)..(277): n is a, c, g, or t
taatttactgaagtgtcagtcactgaatcctttacaagctctggaacttaactattctcactgaaaacttgtttgcaacacccctcccaaatgagtctgtcatctcattgaggcaggtcgataaccctgaactagagtgtggagactctctgttggagacacgctctcctgaaaagccgggtcaggcaagctgcccacctgcttcctcacctctgctacactctggcaggcatggtttgtccaacatgcagcagagcgtgtatgtgtgtgtgtagtnccgcgtctgtgcgcgctggacgtgcgtgtgctaatt

SEQ ID NO: 443897 - DNA, 389 bp, Homo Sapiens
  misc_feature (16)..(16): n is a, c, g, or t
  misc_feature (22)..(22): n is a, c, g, or t
  misc_feature (32)..(32): n is a, c, g, or t
gtaaacagtgacccanggaaanggaaaccccngcctgtgtgaacctgaactcccgggcaatctgccccggcagttgtgggggttcaagtaagcagggatttcatctgatcttttacagagaaagtaaaaactttcattgcaatgtgctgtccttcccagtagcccatcaagatccagataaacacatgctgatttcaatttgggctcatcagcagcccagttagtgtacctcaccctccacttatcagtccaagtgtattgattatcagtcaagttactgttcagggcgatccacacacgttcattagatgtttccatctgcagccacgcaaatgcattactgtagggatccagaatgctggctaagggaattgtgaagcttgcagtat

SEQ ID NO: 443898 - DNA, 529 bp, Homo Sapiens
  misc_feature (424)..(424): n is a, c, g, or t
  misc_feature (440)..(440): n is a, c, g, or t
  misc_feature (445)..(445): n is a, c, g, or t
  misc_feature (457)..(457): n is a, c, g, or t
  misc_feature (480)..(480): n is a, c, g, or t
  misc_feature (495)..(495): n is a, c, g, or t
  misc_feature (508)..(508): n is a, c, g, or t
ggggtggataaacagtgtaatgtttcctttcttctgcgacaaatccttttatcttgataaaataacgtttcccgaattccattgaggtgcttcttccaactctcaccaaagcccatggacatgttacaggccatgagtcttgagtagggccacagcctcgttgctctggatactgaccaactgcccagcagcaagaagggcagcgtcttgggcttgtcttatctggccggggctttcttggcaggagcggcccccgcatcctcactctcctcaccatggctgccctgctggtccccagggtcatccggctcagggctgcaggcacgttgcttcctgggtggggctgtggggaacgaatgcacaccacttggggactgcaaggctttgccctggggtgtaagtgtttcagtaaatttgatctatnaattgctttttttgantttanttgaattttcanaagttggggaggggacattaggntcaagtgattttttnaggaccataattntggcaaatggattaatttggg

SEQ ID NO: 443899 - DNA, 1024 bp, Homo Sapiens
tgtgtgggggctggcctggtgattggaagtctatttacagcctgtggggagaagagggcgctgggtcctgtccatcctgcaggaacagcccagctcagaccccataaatcagtgtgtgagtgacagagagacagcaggggtgttgactatccctcctcctaaggggaagaaggtgggcttctgtgtgcctgggctgtggaaggaacaggcacagatggaaaaacaaaaagaggggtgagggaggtaccagcaagggggaccctggaccccccccaccaaaaactgtctggggaacaggcagctgcccgtggttaaagcgcttagagggtgactcaggcaaaaggatgttggggagtaaccctggtgagggtttcagtcctgcctccttggaatggccccaacccccttctctggctctggcaaggggggcgggcaggatcctgtgtgcaccaaaggcagggagcccgggggcgcaaagtggggaccagggtggggatagggggacagaagtcgctactggaaacaccttggaacaatgactgcacacacaagcccctccccccatggacatacgcaccctacacctcctctccccagacatacacacatccccgcttacaagctgaggtgggagggcagaagaaagaagcaaaaagccagcatcacccaggatctttcctttagtctgaaacttaggggttccctagccacaccccatggtccacaagggtccccaagtgcagccacagaaaggctcagaaggacctatcgggcgcatgtgtgcagggacacagaccccagcagcccacgccccctcctcttctgctcatcacctctggaacccccttccattcaattagtccggccccagccttactcctctgccgtgccagttccagcacaccaactagagacactgcctgctgcgccctccacccacaccatgcacccaggggccacagaagaggaggtgcaggctggtgaagcctcctggttccaaaggggctctagggaggggtggcac

SEQ ID NO: 443900 - DNA, 417 bp, Homo Sapiens
  misc_feature (32)..(33): n is a, c, g, or t
tggtctcaaactcccagcctcaagggatcctnntgcattagcttcccaaagtgttgggattacaggcatgagccaccacacctggcctctccataatgatgttgagaccatcctcctcaacaaagaatcagtcagttcagcacctaattttcccacactgaagtctacgcaattttcatgcagactgtgcacacagtacagtgcacaaatccagagggcaacacattgtaattcatatcatccgtttccaaagtatggacatatgggacacctgggagaatccaaggccacttttcagggagggtattctggaaggtcacaacttctttggggcattaaaaaacaggaagtgttgttaaaaattgggtggggcaaatttaattattaaattcaagggcagttggccaacctgttact

SEQ ID NO: 443901 - DNA, 527 bp, Homo Sapiens
aaacagattttgatgtaacaaagcaaaaaaagtcagtgatacggagctagattccacagtgcaacaagcaagaaaacttccacttttggtgcagtatcaaaggagaataatcacaattattggaaaagattattgaagtactgggtgaggctgggtattcttcatacatttcaaccaaaagaatgtatcacaacagattggattcagaaacatgagaatccaatttttttctactaagcttgacattaaagaaatatgcaaaagtgtaaaatcaagccattctttctcactaaatttctgttgctttggaaaatagttatttttcagaaaaaaaatgtgatttatgttaacatatatttattatttttatttttgacaatagttttaaaatatcattatttcaatttctaatatggtaaacattagtaatttttgagactacaaaggatatatttaaatagtatccgcaggagttctgcagtgttcaacctgaatggctatgcaagacagccctgtctccattcaaa

SEQ ID NO: 443902 - DNA, 929 bp, Homo Sapiens
  misc_feature (158)..(158): n is a, c, g, or t
agcgggtggagtgccccccagagtcgcgccgacagctggaaatataggagcgtcgcccagagagatgagatgcgccacacgtctctataacgcacgcaaggtactcattgtgggacggggcgaggccgtcgagagggataatcgcgccgcggggaccnccgacgtggaggaattctggccaggccgaatgccccaggtgcccccgcatccagaagcaccatcctcgctgggggggaaaatacctccagggcagttgtaagagaaaccttgcagcggggggcatcccttatacggctttcctgcgtaccgcagcatgtttttccatttaggtgcaaaaattggggttcccatcgtatactcgtctaaagtcctaaatccaaggctcagtgtttagtaaggttatagaagcattggcaccagcaaccttcccagaggatccttagttttggtactttatgaagaagctgttactaccttaagtatacattggtgttaattatgctctttcatgtagatccgttacacctgcatttaagaaggtctgcactttcttctacctgccctcaccagcggccctgtgaacagccgcaacagccgcacattcactgtccattaagcttgtggagcttgtcagggacctgggcttgtcaccgttatctccagcacctcaagagcagtgcctggccctcaaacacctattgaacgcttgaattattaagacacggacagctgcaagaatacagcaaaatgtgaatgtccctcttttcagtggctctcccctcaaggatgtcgccctaaacatcccagtaccactaatggcagaggcatgtgtgtgaagccatggattcttccaagctgatggtgaagcctcatccccaaagacccagggtcctcctgatgttctaggtccccaactcttctctctctcc

SEQ ID NO: 443903 - DNA, 425 bp, Homo Sapiens
  misc_feature (383)..(383): n is a, c, g, or t
  misc_feature (395)..(395): n is a, c, g, or t
  misc_feature (400)..(400): n is a, c, g, or t
  misc_feature (411)..(411): n is a, c, g, or t
aatgcatcaaatcaaccaatgattatttaaaaacagcagctacaaaaactctgcaaagcgggttgggaatttcctgcttgggtctagcctccgtgtttcccgcgcacagcccggtctttaccctggatgcttccgaaccggcatcatctggcatctccgacagtcttgatgcgacttaacgcatggtaagaacccatcagagaaggccaaagggatttccagagacaggtagaggcactgcgctgggcagcaccagggaggaatattatcttttcaagcagctggactctgacctagaagccggaactcctgagtactgaggtcagcacctctctgcacacacccccagctataagcttgaaggaagcccctccccttctctnggccttgatttnccctnctgactcagtngggacgttcttggg

SEQ ID NO: 443904 - DNA, 350 bp, Homo Sapiens
  misc_feature (200)..(200): n is a, c, g, or t
  misc_feature (283)..(283): n is a, c, g, or t
  misc_feature (332)..(332): n is a, c, g, or t
tccagagaaccggagagcaggtcgtagaactgctgtacatccccagcatcttccttcccaaagtggggcagcaccagctcctggaacttggagtagtccagtttggcagtgctgggccctgagtccaggtgtgcacggaccagggaagtgaggagattggcaggggaggcatctgggggctgcttgggttttgaaggtanccggccccgccgccccttcaggctgtctgttcggacaacttccttcaccatgcccaccgccaggcacttctggaagcggcagnaactggcagcggtttcgccgcctcttgtccacagggcagtccttgttanccaggcagatgtacttgg

SEQ ID NO: 443905 - DNA, 1595 bp, Homo Sapiens
tccagctacatgtctattttttattcaatatattaaatatattaatcagaaaagtcacatactataaatccaggaaaatacacaaatataaatgtcagaatctgtcatttgtcttcttcctagagtgacagtttatgtacatgtggaaggagggtaggaagagagagccagcaggaggctggaaaggctgcccaggaaggcggggcccatcccttcctcccagccccgctcccacctcaagctctttcttcctgtatttacagcagcactgggcttatttacagcacggcgctatgtgttaaaaacggtttatcttacaaaaaacataaaggccggggccaggctgggggggataagacaaatcgtggggtcacccccatgaaggcatccccctccccaagggcttgagctccctgcaaacctcctggagcaggtgagaaggtggagtcattctgcagctcaagcccaggcttgggggtgctctgggggtccgtggactaaaggcacatggggtggcatatgagagtgcgcatgtgcacacgtgttcccaggcaggggtcagaagggcagcgtgtccatgaagatcttgtcaatgatgggtggagggggcaccaagtcctccagcttgaggtagaagatgcgctgcaggccctgggtgcacagggtccgcagctcgggcagtttgcccaacagacgtgacaggcagctggctggctggggctcgcccgccacagctgccacgtgctccttcaggcagctggcgatgcggttctgcagctcctccacccgccgcggctcctgcagcccatgccggtcggtgatgaggacaagggcagagaggcaggcgaaggcagggacatcgacaagcaagctgtgcagggaccttgagaaggccaggatactgtcaatccagtccccgaagccacgggcacactgcagccggtgtagcaccaggcctgagcagaagatgagcttgccctcgcctggcttagacctgtacgccaggcggaggatgaagagctccaggaaggccgactccagcaacaggtcctggtcagccggtgacagctcagcaaagccagggatcttctccgcccacttgcggatgacctccagagaaccggagagcaggtcgtagaactgctgtacatccccagcatcttccttcccaaagtggggcagcaccagctcctggaactaggaagacggtccagtggggtcagcaccccaggcaggctcttacacccactgccaggtatggctgtgtcagacacttggatgccagatcccgggagtgggagtggatctgagatcttgcccaggctctcacttgccaagtctcacatattaacccagggctgcagctgccaaaaggacatatttttctaattggccacctgcctgagggggtgcattttcccatctggtcagccgagagggggatcctctctttgatctgtcgaactggagggagtcgcttttctttctttcttttttaaacctcctttctcattcagtccttccagagggggtagctctcctaacacacacaaaggcactgcagtgctctatgcaggaatccggaccggtccagc

SEQ ID NO: 443906 - DNA, 734 bp, Homo Sapiens; identical to SEQ ID NO: 141990
  misc_feature (256)..(311): n is a, c, g, or t

SEQ ID NO: 443907 - DNA, 1087 bp, Homo Sapiens
  misc_feature (373)..(410): n is a, c, g, or t
ccggaattcccgggattacgaaacttggggggagtgcacagaagaacttcgggagcgcacgcgggaccagggaccaggctgagactcggggcgccagtccgggcaggggcagcgggagccggccggagatgccctgtatccaagcccaatatgggacaccagcaccgagtccgggaccccgtgaccacctggcaagcgaccccctgacccctgagttcatcaagcccaccatggacctggccagccccgaggcagcccccgctgcccccactgccctgcccagcttcagcaccttcatggacggctacacaggagagtttgacaccttcctctaccagctgccaggaacagtccagccatgctcctcagcctnnnnnnnnnnnnnnnnnnnnnnnnnnnnnnnnnnnnnntcccctgcctctgcctccttcaagttcgaggacttccaggtgtacggctgctaccccggccccctgagcggcccagtggatgaggccctgtcctccagtggctctgactactatggcagcccctgctcggccccgtcgccctccacgcccagcttccagccgccccagctctctccctgggatggctccttcggccacttctcgcccagccagacttacgaaggcctgcgggcatggacagagcagctgcccaaagcctctgggcccccacagcctccagccttcttttccttcagtcctcccaccggccccagccccagcctggcccagagccccctgaagttgttcccctcacaggccacccaccagctggggggagggagagagctattccatgcctacgcgctttccaggtttggcacccactttctcacacccttgagggctcgcgggctactggatacacccgtgcacctcaaccaagggcccggagcggggccccaggctggacgctgccggccgctgctgctgctgtgctgggcgacaacgcttcactgccacgcctcatggctgtccgcccactgctgacgggctgccagggctcccttcacggcgcacagctgcccgcaccacgccaagtacatctgcctggctcccaggacctgccctgctggaca

SEQ ID NO: 443908 - DNA, 1427 bp, Homo Sapiens
  misc_feature (122)..(153): n is a, c, g, or t
ggctggaccggtccggattctcgggatcaccccgtctctccctcccttgccacccaaatgttagaaaaatagctgtgaacagagagcgcttttgtctgcaatggcagcaggatctggacggnnnnnnnnnnnnnnnnnnnnnnnnnnnnnnnnacactctgacagcttgttccgtgttgcccccccacccagcgcacagtgcagaaaaacgccaagtacatctgcctggctaacaaggactgccctgtggacaagaggcggcgaaaccgctgccagttctgccgcttccagaagtgcctggcggtgggcatggtgaaggaagttgtccgagcagacagcctgaaggggcggcggggccggctaccttcaaaacccaagcagcccccagatgcctcccctgccaatctcctcacttccctggtccgtgcacacctggactcagggcccagcactgccaaactggactactccaaggtgaggtcccaccccgtgtctgccttggggaggtctatgagcacatgcagtgcctttgtgcgtgttaggagagctaccccctctggaaggactgaatgagaaaggaggtttaaaaaagaaagaaagaaaagcgactccctccagttcgacagatcaaagagaggatccccctctcggctgaccagatgggaaaatgcaccccctcaggcaggtgggccattagaaaaatatgttcttttggcagctgcagccctgggttaatatgtgagacttggcaagtgagagccctgggcaggatctcagatccactcccactcccgggatctggcatccaagtgtctgacacagccatacgtggcagtgggtgtaggagcctgcctggggtgctgaccccactggaccgtcttcctagttccaggagctggtgctgccccactttgggaaggaagatgctggggatgtacagcagttctacgacctgctctccggttctctggaggtcatccgcaagtgggcggagaagatccctggctttgctgagctgtcaccggctgaccaggacctgttgctggagtcggccttcctggagctcttcatcctccgcctggcgtacaggtgagagccactgactgtctgcccagcccctttccctgatacacctgcctgtgaaccaccctgatcgctcttcgtgcccatctgcctgccaggtctaagccaggcgagggcaagctcatcttctgctcaggcctggtgctacaccggctgcagtgtgcccgtggcttcggggactggattgacagtatccctggcccttctcaaagtcccctgcacagctttgcttgtccaatgtcccctgccctttcgcctggcctctccggccccttggttcctcatttaaccgaaaccggggcatgggggcttggcacaggaaaccccccccggccggggttggc

SEQ ID NO: 443909 - DNA, 496 bp, Homo Sapiens
cgtttgtgtagtgccaaatatatatgtgtatatatgtacaccaactaagctactggacaaccaaaagccatgtaatcatcactaactaagattttcttgtgtacaccacaatccagttcattctgaggtcatccagttccagtagtcttcttgaggaaaacaccattttcctcagttcagttttcttctccttctttgatagtataaatacaccaaccactgtgcaataaaaggccatatgatggcaaacgttagcacaccaggagacatctcgaagggccaccaagatggtctctgtgaggtgggctgaggagcagtctgcaatgttgatgttgatgattttgcctgcaaagcagtcagcgtttccagtttctgcagtctctgaaggacattctgcatgtcctcctgcagtctcatcagcacgagggcgatctgctcattgaggctgcctcgggaccctctgtcggagccccagcgctccccatcacctccactt

SEQ ID NO: 443910 - DNA, 1026 bp, Homo Sapiens
cggcgtcccagccgcctacctcgctgggaccctggtcttgctgtcccccgctggcctcctgcccaagcgactgcggccaggatgggccggaaggtgaccgtggccacctgcgcactcaaccagtgggccctggacttcgagggcaatttgcaaagaattttaaagagtattgaaattgccaaaaacagaggagcaagatacaggcttggaccagagctggaaatatgcggctacggatgttgggatcattattacgagtcggacaccctcttgcactcgtttcaagtcctagcggcccttgtggagtctcccgtcactcaggacatcatctgcgacgtggggatgcctgtaatgcaccgaaacgtccgctacaactgcagagtgatattcctcaacaggaagatcctgctcatcagacccaagatggccttggccaatgaaggcaactaccgcgagctgcgctggttcaccccgtggtcgaggagtcggcacacagaggagtactttctgcctcggatgatacaggacctgacaaagcaggaaaccgtacccttcggagatgcggtgctggtgacatgggacacctgcattggaagtgagatctgtgaggagctctggacaccccacagcccgcacatcgacatgggcctggatggcgtggagatcatcaccaacgcctcgggcagccaccacgtgctgcgcaaagccaacaccagggtggatctcgtgactatggtcaccagcaagaacggtgggatttacttgctggccaaccagaaaggttgtgacggggaccggcctgtactacgacggctgtgcccatgatgccatgaacggaagcgtctttgctcaggatcccagttttctctggatgacgtggaaagtctgacggccacgctggaactggaggacgtccggagctacaggggcggagaattcatctccaaacttggcggccaacagggcgagcccctacccccaagtggagggggactttgccctctcgtgcccccaggacttgctggg

SEQ ID NO: 443911 - DNA, 924 bp, Homo Sapiens
  misc_feature (498)..(498): n is a, c, g, or t
caatggtgctcatattttttattttttagactgagggcctgaaaaggttttccaactgaggcagggcaggtctgcgattgatgctgcattctcatcctctctgtggatcagtccctgcagcacacctgtgcggttctgcaatgcctttattttgaatcccaggcaactttgctggatgagtccttctcgtcccaggagacaagacagcaaaggtggctcagctcttgtttgtatgctgggtctgctttgaacctgaagagctggtgaagttcttccccaaagccattggagaagcagctgcatcagaggaaactgtgtcactgacactttctcccttctgtttgcagtgttgtgttaatcaagtgcttgaaaattaagtcagttgctcaagtgccctcagcttaggaagagcttcctgaaacaaataccagagttgtcaatacacccgccatgtaattgggctccatcagctttttactggatagttttcaaacaganttaaaccagaactggagccagaaaggagactctagctgaagtcatcccactcaggcgggtggactcttcactttgcattgcagagacagatgtgtttttctctcaagttcttgctgctaaggaaagccagccataggttcctgacatgtactttcttgaagggttgagagaagcataaaggctggcacctttgtccttcaagtgcaaaaggaaaaccacagtgctaatcaaaacttttctaggctgatctgcttcccaagaaagtgttttagaaaacacaggctcttctgggaatagtgagtgactgatcattagcttgctactttggcctatctgttagtgtctcccttgggtggataggataccagattttaaagagtccacaacacagggtattgcttttgtattttgttaacctgtgagatc

SEQ ID NO: 443912 - DNA, 207 bp, Homo Sapiens
  misc_feature (107)..(107): n is a, c, g, or t
  misc_feature (170)..(170): n is a, c, g, or t
catagaaaatgattttaatgtaggtatgattacagacacactcagtgatcaaaacatgaaaggaatggttatttgctcttctgattgaacaaatgaaactagaattnttcatacacataatttaaaaaaatatattcaagacaccgaaatcagttaacaaatataagganctaaacattaattagtgacagtaaaatgggcagaagc

SEQ ID NO: 443913 - DNA, 798 bp, Homo Sapiens
  misc_feature (75)..(75): n is a, c, g, or t
  misc_feature (86)..(86): n is a, c, g, or t
  misc_feature (175)..(175): n is a, c, g, or t
  misc_feature (192)..(192): n is a, c, g, or t
  misc_feature (194)..(194): n is a, c, g, or t
  misc_feature (196)..(198): n is a, c, g, or t
tggggtagaaattcccaaagccacctaggtccatggccccagggattcttccctaaggaaaaccaggctaatganccatgtttcancttatcctactgggggccccgcggcgcccaacacgaattggtctacgaaaggcttctcgtagggcccgaggtcgggccgacatgttaangtttttcaatgaagtcncncnnntgcatgcacataatttaaaaaaaatatattcaagacaccgaaatcagttaacaaatataagaactaaacattaattagtgacagtaaaatggcagaagcaaatataaaatacaaaaaccagctttactcagactttttgactgccatgtcctcctttagaaggactacagtttggctacttggtctcttctggggcagatgtggcatcctgaggtgtgttagcttctgccggtgcagatacagctcctaccacagtaggggtggtctcagataaagcagggatggcttctggagtggaagtggctcctgtctcactgggggtggtgtcagtttgaaaggctggagtttcttgacggcagctggtgtctgttggactgggtatgatgtcagcttgaacagtcatggcctcttcttctgtttccaattctgtttcttgattttgaacttcctcaccctcttctaccatagcaggtggtagttgtaataaagtctgatgataatgatgtgtagtctgtatcaaatgcatgtacatgttgtatacaaagtttgccatctggggcatattttttattatttgtacttcatgagatggtctctccc

SEQ ID NO: 443914 - DNA, 1102 bp, Homo Sapiens
aaagaggtggaggatgggatagggcaaggacggcaaaagaatggggcgaaaggggaggtttcaaagggggcgcataggtcgaaaaaagttttgttggggggactgaaaaagattcattgtggcggggggtagtgtaccgccagaggtgttgcggggtaagagaaccgcgtgagaaggcccgggacggggaagcgtgggaaaagggggggacgtgtagagtaccatgtgggggcctgcgcgcgggcgttgggaggatgacgaaggaccggggttggagaagcagggcccgcagaggcccccccatcgccccagggtgggcaggttttgagtctgcggtgcccctcgggaagcgggatgcaaaggtccgctcgggagactccaagttctctttttggtaggcactgtctgccggcttatcggggggcattagtttctggggagtgtgagatcttaaagagtccagtagcgcttcgtggacatccactgactccagagagtccggggtttccagggacggctcagaggctgggaagggtgctgacaagctgtcctccaggaggctgtcctgactggttgagtccgaggagagggcagacaccaagcctgcttcttttgctgcgtctttagaattgagctgatttaaagtctccacagcctctaagtttttctctagccggcgatgactgtgatggtcttccgaaaatggtttattgtgcaattcctgtcccagttccgggagactactccctacactcaccctgctggcaaggatgtcatcagcaagaacagagtcactttcggtgagtcgcagggtctcctcactctcgccaggagagtcctgggacctgttatccaggctgtgggttctggcatcagttgagagaatttcaaccgggacagtcacagcgtctggactgatgtcctggtggagacagtcctccgggacaataacatctaaacacgtgggctgggtttctccctgtgttgggagtgagtctgggggtacccgacggggcgtttcttctgtttcgaaggaagtgcaggtacctcctacctccttcgaaacagaagaaggtacctgcatcccgggaattccggaccg

SEQ ID NO: 443915 - DNA, 334 bp, Homo Sapiens
  misc_feature (274)..(274): n is a, c, g, or t
gcaaacacaacttaaccatactttatttgactgcatcttatttagacagcttgcacatttcaaatcccattaaatctctctccaaaaggatatgggacaatagaagaaaattatgcagcaatatccagtcaaacagcagtccaatattttgagatacacgtgatattttataggatactcaactcatatctgacgtcaatataatttatggttatgtttttacaaacctgaaagccctgtaacattacagcactcattttagtgatgtcatggngcactgaaaagtaactctggatgtactaccaatttggattttatctatactcctggaaaa

SEQ ID NO: 443916 - DNA, 850 bp, Homo Sapiens
  misc_feature (13)..(13): n is a, c, g, or t
  misc_feature (330)..(344): n is a, c, g, or t
  misc_feature (810)..(810): n is a, c, g, or t
  misc_feature (818)..(818): n is a, c, g, or t
gggttttcttaanagccccatgtttattagttacattgtgttttggccatcagtgcaatgtaacaaattttacagttaattgctttcaattgagtcagtaaacctgtgatagataatttatttaactggaaaacctaggtacccataagaaaaaagattcattctctgtgaaaactgtaggaatctgttgttgttttcatttgaatatgctctacttctgctctagtatttggtttggaatatattttgtggctctaattactgtatttttaaaaaccctacctccattaacagttggtaaaggccccttttcagggaaagtttgttgcnnnnnnnnnnnnnnnaaagggaaagctgctctttgctcagtatagtgttttgaaagtggaacataggtaacaaatactttaaaaataaagatacacaatttatatttgaaaataaaaactttctgctggtgggattatttatagttctttatttttaaagaaaatgttttcctttttatattgctcttgaaagtttaatgagcagaatacaatactggttataataaaaatatggtaaccacacagtactcagcctttcaatatgtttttggtcaaacttcatttaggcactagcatttagaagaataccaatcacagtgatgcttttgttatttaatatgaaggaaatgggaactaaaacatttatgtcatcaaattttatttcacttctttatatttgacttgctgggttgatacataatgggttgatggaacatatatttgcttaaatcactaatgggggtgggttgttaaagtaggntgggtccntggggttccacccttttaggtgtttttggccc

SEQ ID NO: 443917 - DNA, 1137 bp, Homo Sapiens
  misc_feature (539)..(539): n is a, c, g, or t
ttttggtgggaaaagccactttattaaagattctctatcacagtcccccatttctggaccagtcagattggctttgggttgaagtttctgattgtctttccttccagtttctctctttgtccatggctttctgagattcagtgtcctcgatggcatctggggaaaggtaggtgaccttggggtcctggaccaatgcagggtgagctggcagctggcagagggccaaggagtggccagccccacagcccacaaggagtcctgacgatgacagcagagcctgcaccggctttggggcccagacgttggcttcagtgccatctccgcacatgccatgctcattccagccccaagagtaacacactccaccaattattgccaaattatgctctgagccacaagagacctgtctgagcaaccaggtgtgtccatccactccagatggcagtgaccttttcattctggaaacaatgtgcttctattttctggggcacaggaaggaaagcagcctcattagccagttgcccatgcttgttgcttcnccaaacatacacctctcctgcatctgttaatgaagctgagtggtctgagccagcaagtacacacattgctttagaattctctagacctgtcactctgcttggttgcatttgctgtgagatacaatggaagagtcttgcccagggcacaaccgtcggtccacatgatgccaaaaccagtcccccactggtacacgatggccactcgcttgtagcagctactgcaatgcctcagtccagcagcaatacatacaaccttctctttatggagctgtgagcataatcgtaaaatcccagccacaggccacctgttggatgggacagccaaagagggatttgcagggggtaaaatatgggatatcctctgtgtgaccaagccccagttgcccatctttgttcaggccacttacaaagaggtctcctccatctgtgacaactgcagagtggccccctcctcctgtggtcctcctgacactcctgggtttacagaagtcattcagttgctggggcaacagcacatcttccttatggccgaggccaagttgcccatagctatttgcacctcctagctggttcttcctggatggcataccagaactgc

SEQ ID NO: 443918 - DNA, 1128 bp, Homo Sapiens
gttaaagccaatgggggaagacggaaggccatgcttgtcggggggttcttgaacacagggggagaaaaggaattttggctttttttaggtttccaagcttttaataaagttttcccaatttcttccctaaggcggacccatagtttggctcgggccccagggtaacaatcttgcccagttttctgtctgagcaacccagtgtgtgtccatcccattcccagatggccagtgcctttttcattttggaaaccaatgtgctgtctattttctgggggcacaggaaggaaagcaggcgtcattaagccagttgcccatgctttgttgcttcccccgacataccacctctcctgcaatctgttaatgaagctgagtggtctgagccagcaagaacacacattgctttagaattctgctagacctgtcactctgcttggttcctttgctgtgaaaaacaatggaagagtctgcccagggcacaaccgtcgtccacatgatgccaaaccagtcccccactggaacacgatgccactcgctgtagcagctactgcatgcctcagtccagcagcaatacaaacaaccttctctttatggagctcaatggcctggggaaccacacatcttcgaggtccatgaggaactcctaactggccaaaggagttggatccacatgatagaacttgaccattttctgtgagcataatcgtaaaatcccagccacaggccacctgttggatgggacagccaaagagggatttgcagggggtaaaatatgggatatcctctgtgtgaccaagccccagttgcccatctttgttcaggccacaaacaaagaggtctcctccatctgtgacaactgcagagtggccccctcctcctgtgatcctcctgacactcctgggtttacagaagtcattcagttgctggggcaacagcacatcttccttatggccgaggccaagttgcccatagctatttgcaccctactcctagctggttcttcctggagatgagaagtaaaatcttttaaatatgtttgtttttgaagacacctcagccgcccagcccctgaactgcccacgccgcggccagcagctcccacatctcggcgcccctcagggcccgcccgct

SEQ ID NO: 443919 - DNA, 1065 bp, Homo Sapiens
  misc_feature (24)..(24): n is a, c, g, or t
  misc_feature (40)..(40): n is a, c, g, or t
atgctctgagccacaagacacctncagttgctcccagttnaaccaatgcggacacgcaaggcatgctgttcggtggtcttgaacaggggagaaatgaatcttgcttttctagtttccagccttcataagtctccaacttcctccctagctgaccatagtctgctgggccccaggtaaccatcttgccaggtttctgtctgagcaaccaggtggtgtccatccacctccagatggcagtgaccttttcattctgggacacaatgtgcttctattttctggggcacaggaaggaaagcagcttcattagccagttgcccatgcttgttgcttcccccaacatacacctctcctgcatctgttaatgaagctgagtggtctgagccagcaagaacacacattgctttagaattctctagacctgtcactctgcttggttcctttgctgtgaaaaacaatggaagagtctgcccagggcacaaccgtcgtccacatgatgccaaaccagtcccccactggaacacgatgccactcgctgtagcagctactgcatgcctcagtccagcagcaatacaaacaaccttctctttatggagctcaatggcctggggaaccacacatcttcgaggtccatgaggaactcctaactggccaaaggagttggatccacatgatagaacttgaccattttctgtgagcataatcgtaaaatcccagccacaggccacctgttggatgggacagccaaagagggatttgcagggggtaaaatatgggatatcctctgtgtgaccaagccccagttgcccatctttgttcaggccacaaacaaagaggtctcctccatctgtgacaactgcagagtggccccctcctcctgtgatcctcctgacactcctgggtttacagaagtcattcagttgctggggcaacagcacatcttccttatggccgaggccaagttgcccatagctatttgcaccctcagccgcccagcccctgaactgcccacgccgcggccagcagctcccacatctcggcgcccctcagggcctgcaccggcccgct

SEQ ID NO: 443920 - DNA, 681 bp, Homo Sapiens
  misc_feature (201)..(250): n is a, c, g, or t
atttgcacaaagcattagaaaatactgtgatattttattattaaaaatgctgctgaaaagtttatacatatgtgtccggccatatatatcttctatcattacttaaggcaaaataaaaaacaaaactgcaaaataataacccaaggaaccattaaaccctgcgtgcctttgaagatcaagagtaaaagcctaggacaggannnnnnnnnnnnnnnnnnnnnnnnnnnnnnnnnnnnnnnnnnnnnnnnnnatagatagcaagtatattttttctcatagaactctatgaagattctataacttctttccatgtagaaataagatatcatttaagatgtactaaaatcacttttgatcataatcccctgtaaaagctaaagttattcacttaacaggaactctgtttttccttattcaaatgtcacaagcctgacgcgttactgtacatattgctagcaggagacaactggaaatactaaacaaatactggaattcacattacagacagacgaaaccaacatggatgccacacataacttcctttgtaggtttcacagagagcctatttgtgggttgctcaggtggggtcatacattgcttgcagaaatggcctgatcatagctctatgaaacaatgaattcggaatgaaatcttaccatgacacctctctgtaggaaagaa

SEQ ID NO: 443921 - DNA, 1073 bp, Homo Sapiens
cccataggcccgaaaccaactgtttattgatttttttcctcaaatactacacatgtaaaggaactgttaaactgaaaaagacttgacaatttttggtaaatccgtagcacagaaatgaggatttctgctggtaagttctcaggacagacacagacacaggtccactttccaagcaagacatctgctcactggaaacggagtgaatgcatagctggtgacggcggcgggcactgctgagtcacgtgaaacacaggttcccccacgttccccccacccccgccggcccgcgtggcccccgcgtaactctggctgcagcacctgctcccgggcgactccgggcagcccgagacactcgtgctgcgggtaagacccagcttctgtttgtgcacaagtaacacgacgactgaaatctgcaactactgcaaagacgcgggcacttttacagtgttctgctacggagccaggacaaaggccggtcagaagccggaccagcagtcagctggtgacgacgagcctccctccagcaggcaccacgtcacgagaggccgcaggccactgagccacgggaggagacccagccggccagcctgacgtgtgcctgaagtgccacagacttcaagcatgtttacaaacgaaagctcactgttcaaagctgttagatctcattaagaacagtagacagaatggttctagatactctgaatatcacataatatatacagatagacactgagacatgacagtctaagtcctacacgccatcgtatacgagaatggcatttgactatgaacagagctaaagtctgtcctttgtacctctcactcagtgattaattggtgacttgcagaagcaactacgatgttaagcaagactagagtgaaacgtactatcacactgctggcacatggggagattaccaagttcactgctcccgcctccttcacgtgctcaaggccgcagacgtcccaaaaccgcacatagcggctctccgcgtaacatgcagcgtgccagagcgcacaccgtgtcggtaacgtaggccgacgtcctcgcgcccagtaatcatatgcgtaac

SEQ ID NO: 443922 - DNA, 478 bp, Homo Sapiens
  misc_feature (13)..(13): n is a, c, g, or t
  misc_feature (32)..(32): n is a, c, g, or t
  misc_feature (71)..(71): n is a, c, g, or t
  misc_feature (88)..(88): n is a, c, g, or t
  misc_feature (97)..(97): n is a, c, g, or t
  misc_feature (102)..(102): n is a, c, g, or t
gcattaacatttntgagttctcaacagtgccnttggtttgtatagcaaattttttacaaagtaactttttnccatttttgatattttnatgaaaatnatttncttcagttttaaagccctgtccctcccccaaagaaggattaataactaccaagtaaggattatttaggagaaaaacaaaagcaaaaacagctttataaacacttgtgaaacaggggtaagtgtccgaagtcaagaccttctgggcccagtggaggtgctgggctgctccaggacaccatcaccacttcaccatccacaacatcctcaagagctgagcagccctgcacagaccctgggggggctttcctgttccacaagctccactccctttttcctctccatctttgctgttgggcctcccctccaaatctggcctaacaaaggcagcacgatctttaatacctgtgcagctttgtaaatggagccaggatactct

SEQ ID NO: 443923 - DNA, 1092 bp, Homo Sapiens
cgtgagccaccgcgcctggcctctggtttcttaacctgcagtttctgaacagaggtttttccacatttattacatttgtaggatttctctccaatataaattctctgatgttgaacaaagtttaagcaactgcttcagagttttcctctagtacaaaatgcatatagtaagttctgggatacaagtacaggtactagagccctctttatctttgtattctctgtcttaagactattcttcactttaatggcctatattttctaaaaggtctttcaacagaaattacatttataatgcttttattaactataaatttcaagtagacaatagcttttgtatatttttatgtttgtacaagtagtctcacatataaatactatcatgtgcaaaaatgctaagcattggttacaagttttgccacattttttgtatttccaggtgttttcttcagtaggaattacattaagaactgactagaattggaagtctttgccacatttttaattttaatttggcttctcatcaatataattactcttatgtctacaacagattgaggtgtgattaaaagccttctcacatttttcacattttagagtttctcttcattatgaattatcttatgattagaaaggattgaggagcatttaaagaccgcgacattcgtcaccttcgtaagacattcccctggtatgagttctcttatgtttaagaatgctgtagtatgacttaaaggctttgccacattctttacacttgtatggttttatctccagtatgaattttcttatgtgcataaagatttgcagactgtctaaaggttttgccacagtctccacacgtgtagggtttctctccagtatgaattttcttatgcgcataaagatttgcagactgtctaaaggttttgccacattctccacatgtgtagggtttctctccagtatgaattctcctatgtacataaaggattgctgactgtctaaaggctttgccacattcttcacatgtgtagggtttctctccagtatgaattctcctatgtttagtaagggttgtggaactagtaaacgctttaccacattctaaaca

SEQ ID NO: 443924 - DNA, 1047 bp, Homo Sapiens
  misc_feature (736)..(737): n is a, c, g, or t
agcaaacacttccctctgccactgtctccccagagcaggctggtgctttcccccttgccctccactctgcccaagagtccctgggaccagcgcagacagttccagggagcacagggcctccgcagccagcacccagcggtccgggcccaccaggagagccgggatgagagcgcctgtgtgccagtcacaaagcgtttatttcacacaaacaatctcattgaagcccacaataaccgtgccaggcaggtgtgacgctttccaggttacaaacaacaaactcgcccaggccacacagtcagaaggggttgcgggggcctcgaacccagaccttgagtctcacgagccagcccacggcatgcagcgagaattctcaggggtcacagccgtctcccaagcggacactgtcatgaattaccctgtttctaacgggtgggaaaatcgaggctcagggtgattcaagtaacctacctggtaccccatgtaccattctttggggatgagacagttaaaaggaatcaagctctggggtcttaagcccccaccccacccctccaacccccggttttctagatgtctaaagctgcgtcccaaacctggcaggtgcctcacaggtcaatgctgattgtcaccaacggtggggacaaagacttctcaggtagaacagcctcctcccaaggcaggggcttctgaagcctccagcctcagggagggcatggggggcggaggagcaggtcannactccgtttggaaattgccaaatgtattctacattcttaaaatcacctgggccacaacaccaacaaagacatgttggtccagatgaagttttatcctagatacaaatatttccaaaatattgtgtttccactggggggaaacccaccagtgactgcctgtccccggcaggaagggcagtgaggccccagaacaggtagagacccatccccagttcagcgtttcctccgaagagtctttgccaagaaacacaccctttccttttaaacaaattcgcgtacgctagccaaacagcccactcagctctttcca

SEQ ID NO: 443925 - DNA, 1018 bp, Homo Sapiens
cgattttaccccgggtttagtccacagggccacggggccgctccggcctgtgccagggggcttgggtctcttgtaagaccagttcccaccctgaagtcatccttgagtagaagaatccgctgtagtcccgattagtttaggctggggcttcccggcaagcactctcccggtgtcagggttccaggacgccagttgtcttgcgtgcactgggttgactcaggtccatgcgctgctcttgctctccttctatggcgctgcggcaccaccaggtggtcgaaggaccagatgcaggggccgttccggggagaagtgggcctgggtcaaggtccgcacccgctcgctcacttccagaagcagcttagcaccctgactgcccaactgtcccagccggggccagctgcgcagccttaagcaccgtgagcccctcgaagcgttcatggggggtgtgaggggagcggcgaccacgatagccagacctggctccagccccagctgcatccttagccagctgcagcagcaccccacactcggctggggtgagcagcccatccaacaccgcccgctccgacccattcagctgcctggaatcctgggtcaaggtcacaccctccaggagaaggacatccttccagtaggtcaagggctttggcttcacgggctcatggtcccaaggcctcttctcttgatcctctctgagcttttctctaagtgcctcagggatgagagctgcaggggtccaggggtcctgcgacagtccagaaaagcatcatcacccaccaaggtcagcccctggaatccctgacattagagctgaaatatctcattaaggttcttctgtttccagagaggaagacggaggtaggaaaagcccgggactcaatgtcaggagccctgggcagtggatcaaaaggatccttgaagctggtccccaggtgctccatggcatagtagagctgcctcttctcccccagggatcggaggatgaagcgctggatgtcctctctgggtccgaggccag

SEQ ID NO: 443926 - DNA, 1059 bp, Homo Sapiens
  misc_feature (47)..(57): n is a, c, g, or t
  misc_feature (226)..(226): n is a, c, g, or t
  misc_feature (299)..(299): n is a, c, g, or t
  misc_feature (306)..(306): n is a, c, g, or t
  misc_feature (308)..(308): n is a, c, g, or t
  misc_feature (314)..(314): n is a, c, g, or t
  misc_feature (397)..(397): n is a, c, g, or t
  misc_feature (425)..(425): n is a, c, g, or t
cccccaccagtagggggggttggggcttcccggaaaaaaacagggtnnnnnnnnnnngggaagattttctcgttgaggtaagagagtcccccctgtaatccccgataagtttaggcctggggggtccccgcaagaatttttctccggtttaaagggtcagacggcagttgtctgggtgcactggggattcaggttcaaggggggctctggctttcctttagggcgnttgcgcacacccagtggggtgaggacagatgcaggggcgttccggggagaagtagccctggtcaaggtcgcancccgttngntcactnccagaagcagcttagcaccctgactgcccactgtccagccccgggccagctgcaggcagtgaaaggcagggcagaaaagaggnaaggcaagggggagggtggtctcggccntagcccctgcccaactctgccgctctccacccatgggtttggagtctgtcagcatccagctctgtccatcagcccaaactgctccttctctctccatgacaacaaccccggccccagctctcagaacatcccttttctccacgctgggtcctatcaggtagtctcggtcccaagaaagctccttcacaaaagcccaggccctggggcccggcttcctgcacagcctctcctccaggtctgggcatcagacgggcccgggtgcctcctgtgctcacctgcgcagccttaagcaccgtgagcccctcgaagcgttcatggggggtgtgaggggagcggcgaccacgatagccagacctggctccagccccagctgcatccttagccagctgcagcagcaccccacactcggctggggtgagcagcccatccaacaccgcccgctccgacccattcagctgcctggaatcctgggtcaaggtcacaccctccaggagaaggacatccttccagtaggtcaagggctttggcttcacgggctcatggtcccaaggcctcttctcttgatcctctgagcttttctctaagtgcctcagggatgagagctgcagcctcgtgccgaattcgccacccaggc

SEQ ID NO: 443927 - DNA, 1346 bp, Homo Sapiens
  misc_feature (183)..(183): n is a, c, g, or t
  misc_feature (216)..(216): n is a, c, g, or t
  misc_feature (241)..(241): n is a, c, g, or t
ctgagttttctgcttagaatcagggaagctcagtgcttgacaggaacgagcagtggcactctcagtttcactgtgttacaaaggagccctgaggaagggaggccgctggctgcccaggtgccctggggggaaagggacttctgctgctgcagagagtggcacccggtggggccaggggctctnggatggtccgtaaagctccccaggacttctttnaaggatgctttacagaatgtttctnggagaccagcctcaaggtcaacccatcacaaacgtgaggaccaggaaggaaccatggccagggttgtccatttgctgtagagtatctggtgatacagtgagacactaaagagtcatcagccagttcatctttcctctgccaataagagtggatatgaacaggaatgaagtgttactggtggtatttcaggcatcaggagcctggaaaatcgatcgtaggggcccatgcctgtctgtccctaggcacctgggcagctgtcacagaggcccgttccacgactggccagggacagaactcctagtagtgcactccctgtacaacctgcacataacgggttatgtatgttcacctaaaggagagaatatactttctattcctatcgcacaaaaaccttgtaaacttcgagaggtgctgaaataagccacttctgcaagctctcctagaggactgacatcgtaacacttagagctgacgaacagactttctcctgtctccaccatcctctccgctgcttacatcctctatggctgtgctctttcccacctcagcgcagctgcgccagttcgcctgtcagcctccggttctccacgtcccctctatctctgctaatgtgctgtgcgcttcttttttattttcccccatgttatatcacttgctctgccttaaggggataattgaattcctcccttcaggcatcttgacgcttcacgcttatcatatagttattaacaattcatattcttatcgacctttctatcgccttttgcacttcacctccagaaccatgatccccctctcacatacattcttcgtcgctcactctccctatattcatctgattctttatcctattgtacttttctcgcgctctatcgcactcttgttctgcacgtctttgcccgcttcatctgcctacttgctctccgtctgatacttccggcctctctcctgcttcctggcggcgatcgatcctccctctctcaccctctgtcgtcgctccttaagcgagtgccttcgactgcccgacacagcttggcttgcttccccccacactctgctatgttctccacttatttcatgctgctcttcccttgtctatctccac

SEQ ID NO: 443928 - DNA, 460 bp, Homo Sapiens
  misc_feature (427)..(427): n is a, c, g, or t
acactcttcagttaagcacgaagtctggcttgcatggccctgcaagtctgtccccatcaggcaacatttggccccaggctgagccccatgtatgtacacaaatgggttagtgcagtgttaggagtctcttcacaaattgggaacatgatgatggctctgtgctaagcccagtccttcctgttcccctgggaggggatctcttgcctccttgtcagccaaacacctccccagctggactgggaccaaatcagccacagttcaggtgagtgctggggactcagggcctggcttctaacactaagaaaacacacgttctaagtgtggtgggggctatttggagaccttaaataagatcaagtccccacctaagatggacaaagagggccgcgaaagccaggagggggaggtttctctttgtgcttttaanccccaaccatgtataaccatgtataacaggaag

SEQ ID NO: 443929 - DNA, 674 bp, Homo Sapiens
gggttccattaaatttaagctcataaatggttactacatttataatgtaaatctccaagatacaacacatttttgttgtattgctctatgaagaggattatttttaaaagaaattccacattaaaatttatccacatttaaaacattggtgtcggtgtcccaaaataagaaaaacctaatccttctaaaatgtacaagaaactatgcctttttgaaaataaatttgccaagtgataacttgataccctacaaagaagctaaggcccaaattaaagtatatagacagacatccataaacatccctcagatagattatcaagctataggtagtatgttacattttactgggtattttatttgggaagaaagtgcccaaacagctgcatgtatttttaatctctcttataactctctgagaaccagcatgttggcatggctgtatacagtagtcaccccttaacctctggggatatattccaagaccccccagtagatgcctgaaactgtggatagtacccaaccctgcatatactatgtttttcgtatacatacatacctatgataccgtttattttataaattaggcacagcacaatgcactttgaggcaattattaaataagagttacctgaacactagcactgattccacgacagctgatctcgtaacagaga

SEQ ID NO: 443930 - DNA, 780 bp, Homo Sapiens
tgtcccattttttataaaggcccaccaggtgagttccaaaatgagggcaaaggtagaatatttctgaaaggttcatattccccaaaggggcttaattttcattgcttggcgccaaagacaaagcccgtaaaaaaggagcaagaaaagtgtgcaaagcactcccttggaagacctcgtccactaccagatcacaagaaaagcaagtgcagcccctcacatgaaaggaaggcaggcaagtaacatcggagacttccccagtctccccgacgtcttctcacgctggatgctggcactggcttatcatgaagggaaggagagcagtaacgctggagacttcccagtctccccgacatctgctcatgctggatgctggcactggcttatcagctacccactggctgaaatggaaatcaacaccagcacttcacgtgacagccacatagtgacagtccaggcacgtgaatgaccccatttgtgttcccctagtttgtggagagacttcctattgctgtgcttctcacaccctctagttttaagaatatgtcaaattgatgatatattatgcaagtaaacgatcttatatacacgaatagtgaaaggtaattaggaatatgctgaatcacctggtgctgttgaagaaaacgtgcagatgcatctctctcacctcaccgctttcttctagcttctgctatatttcatcccctattagttactctctttccctccaacttatcttcatcctcaaacctcagaggaaataatcgcaagggtcacatctcc

SEQ ID NO: 443931 - DNA, 524 bp, Homo Sapiens
  misc_feature (110)..(110): n is a, c, g, or t
tattattttttgtagactagccaagtacagtagtgaggggggaaaagagaagaacaaggagtttgacctgtaactgactgtgagcaatcaattgagataactgactaccnttggaccagcctaaagtgactttttttgaaactgctttcttcataagtgaaaggtgaatccacccaaccagcttagtctgtttatataactatggctaaatgtttaatctcataaggtttcatctgacttaaacatgaaaaaggatagttcatttgaatttagtagcttctaaaaagtagcatcacaggaaagggagacaccatgatttgcatcataaatgtaacaaatatcatgatgtgtatgcaagcaaaacatctgtgtagttaatatccaggattaaatctctagcaatatatttacctgttggtcaactgctgttcaagaaaacttccaaaggcagcaaaggatttaaaaaacagtaacaatgaattgccagaagctagaggctactatgtttagaaaatagactgaaa

SEQ ID NO: 443932 - DNA, 888 bp, Homo Sapiens
gtcagagccctggagagcagttttgcacaaaaccctcttcctcttgatgaggaactggaccgcctgagaagtgaaaccaaaatgacccgacgagaaattgatagctggttttcagagagacggaaaaaagtgaatgctgaggagaccaagaaggctgaggagaatgcctctcaggaggaagaggaggctgctgaggatgagggtggagaagaggatttggccagtgagctaagggtctctggtgaaaatggctctctggaaatgcccagcagccatatcttggcagagcgcaaagtcagccccattaaaatcaacctgaagaacctgagggtcactgaagccaatggcaggaacgagattccagggctgggtgcctgtgaccctgaggatgatgagtcaaacaaactggcagagcagctcccaggcaaagtgagctgcaaaaagactgcccagcagcggcacttgctgcggcagctctttgtccagacacagtggccaagcaaccaggactatgactccatcatggcccagacgggtctgccacggccagaggtggtgcgctggtttggagatagcaggtacgcactgaagaacggccaactcaaaatggtacgaagactataagcgaggcaacttcccaccagggctactggtcattggcccctggcaaccgggagctcctgcaggacctattacatgacacacgaagatgctgtatgaagaggacctgcaggaactctgggacaagacccagatgagctcccagcaggtcaagcaggggttgctgagcacaatgggggaggaagaccagagccgtgggcagaccacaggcagtgaggaccagggccgggtacgggtgagctcacagagtcacacggatgggtgaac

SEQ ID NO: 443933 - DNA, 488 bp, Homo Sapiens
cattcacaatgatttattggctgcccctccacaccgagctgaggtggacaagcaagaggatgaaacctccccaggacccacctaactcccaggcatcacaggaacaaggcaattttccaacagcctggcaacgtctgggactccaacgaggtctgggcccaaacctcacctgagactggccacgcccgtcccatgcacccacccctctcagacatcctggtgacctaggctgatatgagggtgaccaggagggacccttcagctataatatcatccacctcgctcacactgaagcaggctcctggcccgcccagcagcagcacaaggctgaccacagagcaggtaagcatctgtatgtttgttcaatggctgaatgagtgccagtggactccagcctgagggagacctgatacatccaggtcccaactgtgcacactcagagccccttgatagagctggatcgtggaaccccaaccagctgtttccat

SEQ ID NO: 443934 - DNA, 744 bp, Homo Sapiens
ttttttttgaaagtgttacttcttgctacattttattgatattatgtatttattttgaacacagaaaagatacattgttgcttattcattgcctagtccaggaacaagaaaagctattcagctccatctttcaaacactgatgagtaggtaggaatttttatccctttttttcccccagcactctctggaattgcagaagcaggatgtgtttcttaaaagagtctcattcctggactgcattttaaaggctatacagtacaacagacagatattttttgcctagaaaacagtacaccactaaggtggtcagaactgcttgtaaacaagtccctcccccagatggagtctggggctccaggaggctgcacgcagggatgctacagaacttctgggtggattcctttcagttccgcaccagaagaaatgctatctctacagaaaataaaattcaagattgccatccttgccactcttctgcttaagaaagagattactaaatagtcttagcccttcattggaggaacagaaatgtggggaagcaggatagggtgctgttttttaacgacgagggacaagaggtgggagggaggcagagtgatggccgctggcgatgctagcagggacactgctcagagatgcttggctgccaccctctgtgggctgggtcttcaggaatcacctctgttacctgcgtggtctttgatggaaatcgctggggtttcttggtcaagatctgagccacc

SEQ ID NO: 443935 - DNA, 659 bp, Homo Sapiens
  misc_feature (501)..(501): n is a, c, g, or t
  misc_feature (506)..(506): n is a, c, g, or t
ccacggaagccctgcccatctacctggggcctgcaaccgttcaagagatagctctaactagcaccacctgactgagggactgagggtaactggggttgggagggggcctagtgggctgtgagggcctccagtttgcgcctgagaccccagacccaggtcccccaccttgtaagtggcagggtggtgatgttgtggctcatctgccctggaatcgagagataggcacagcgcacaacggaacctcactggggcctgtcccgcctcccaggaggacaagctggccctggggtaggggtcagggcaggcagctgaccttggatggtccagcagtttccagaggcagaatagaatttgggcgcagcttgctgggcgagggtaggggcaaacgggcccaggagagggaagagaaaatcccacttcctacttcgcctctctctccgaagcgctctctacagaggcacaacaaacaggctgggaggagggacgggaggccaggagagnctccncgttccgtgaaacctttgcaggtgggttttgtgtttgtggtaggcctgtatgtgcgcatattcacacatatgtggagcacgtctagatctgtgtgtgtacatggggtatgtcagtgtagatgtctgtgtgtatacaagtttggtctatgtgtg

SEQ ID NO: 443936 - DNA, 345 bp, Homo Sapiens
ccctccgccagatgcctttcagaaaagggtctccactgtgtgtccaaatctaaacacaaacattacagtggcccagagtcttctgtccttgtctgcccggcctagctgagctgatgatgagaagaaacctcgcaggcgctccctgtgggtgctgcttttccctcccctccccgaccttgggcctccagccctcaggggggaggcggcagctttaagtccagcagggtgtaggcaaagatgttccagaagacagcgaacagcacgaagacggtgtacatggccacaaaaatccaccacagtgactggtcctggagcctctgctcgtagttcctcaggaccaccacg

SEQ ID NO: 443937 - DNA, 514 bp, Homo Sapiens
  misc_feature (36)..(36): n is a, c, g, or t
  misc_feature (395)..(395): n is a, c, g, or t
  misc_feature (412)..(412): n is a, c, g, or t
  misc_feature (421)..(421): n is a, c, g, or t
  misc_feature (438)..(438): n is a, c, g, or t
  misc_feature (443)..(443): n is a, c, g, or t
  misc_feature (490)..(490): n is a, c, g, or t
  misc_feature (502)..(502): n is a, c, g, or t
attttgaaagtggatagttgttccactcctcatccnactgtgtgcaattttattttgcctcagtgacagtcactttacagccatattggtgcaacatgcattagcaaaagaggtgcatgccgcgtgcacgtgtgtgggtgcggcacagcttctccgcagcaagaggtaaacaagacaagcactacggtggttcaagttgaagctggaggtcattttttgcccctgtaagctgagccctgaagaagaaagtcaccatgtatccatctttgttacctttttgggatttgacgctgatccagatcctcctggggacctttcaatccgctggctttttacaagggatggaaaagggattctggatggacttttttttggaactgttttggggcagggantgcttacaggggagganccaatttcntgtggaactgaggagtnccccngggtgattaatttgggtgttttcacacacagggcattttcctttttnaaagtgttgggngcctgttttagg

SEQ ID NO: 443938 - DNA, 670 bp, Homo Sapiens
aaatggtcctccacatataatttcccaaagccattattgcctttagcaaaaccaaaatatcccaaggaaaaggtattcatcctcatttttctactaaataaccccttttatttgggattctaaaaaaagaatttgttaagacacaaaaactttccattaaaaaagttgtttatttaaaaataccttctccccaattctgattccatatcaaattaaatcaagaagtgatgttacagcaataactcatcaaagtcatgagtagggaggatggcaatgaccccattagctcattagtataatctagtaagtgaaatacaaattcaactcatttacttcttcacaaaaggcaaacataattgatatacttcatatcaaaaaactagtttataaagcttgtcttcatatttcagtttaaggttcaactgatataaaatgccttaaaagaacatccaagcaatgctttggattttctttctttgcaaaattcaaggaaaacatgattggttgaagtttcttcactgctggcgaattagttaagagctacctgagattccttcgcacttccactcttccactctttgagtttccagtgattaaaatatgccagagacataatttagagagcgctagaaatgccacacagatctcatcgcttaaaaaagagtttctg

SEQ ID NO: 443939 - DNA, 1018 bp, Homo Sapiens
  misc_feature (941)..(977): n is a, c, g, or t
gcctgacacacagggcatattactcccagccagattgaagtactcaggctgagttactgcacaaaaccttaagagatccaagccaattgttaaccccaattggaaacagatttagtgcctactgtgttcttgcagaataattctgaaagtaagttttcaaagtatgaaactaatagttggatgggaaaccatgactgggtactgtgtcttgggtgtgtgctttcgttttcgagacagttcttaccttgtgttcttagtttattcgtgttgccttactggtttgtattctgattgtcgtattacttcttgagcaagagtagagtactcagatcgccacaagtaggtggaaggatggggagacagtgggcaagaagctcaagggccgggcagaagtggggtttccactgacaggggagaagccaactattgctagcacagtgacactgctcccaccctgggcagacctctcatggtgtgccacctgtcccctgtgctgtcatagaaaatccaaccaagggagtgccccttggatggtaagggatgagctacgtttttaagttatcggatctacttttcccttttactttagccaaggccatttccaaaagcatccagacatctgtgatggaggaggaggcctgagagcggaagtgctaagatgtgactcttaagccttcagaccagaaacctcaagtaggttttcagtggagaaatccagtgagattttgccctgatagtttgtagcagactccctctgaacacctgtggaacatgctgacctcccagtgtctttcgaggggaggcctgcagcacagcccctcgagttctcttccagctgcttctgtggagaggaaggtgcttgttgactgctgataatactggcggtacattcgtctgagtttgctctcgacgaattcgagctcggccgatttggcctgatnnnnnnnnnnnnnnnnnnnnnnnnnnnnnnnnnnnnncgccgccaccgcgtgaacgccagtccccatatagtcgaaca

SEQ ID NO: 443940 - DNA, 712 bp, Homo Sapiens
aacgaactgaatggcgatgtattttaaacgctcatattttgtttctcctctcacacttctccctttgcgtgttccttttccacaattctaatgctactgtccatcaaaccctggcacctgcggccacgatgtttcagagacaatcgtacggagaagccacttcacagtcagtcacaggaaggccagagccggcaacaggacacaacagagcaaggctttaaaaattactcgaaagggaagaaaacccttgaaagcctcaggcccaccctcctgccccgagggaagacacccccattgcggcggtttcctcccaagcctcgccgccgtcacaggagccctctcctctgccatcgtctgtcctggcgtttctcggacgaagctttcacctcaatctctagaagcagaaacgaaacagtcccagccctccccccgccatatccaagtatacatgagggataaaattaggcagagcagtgacaggctgtgccccaaagtccaaacaggccaggcagagaacggcagggacagggctcatgctgagaagaacagctggcgtccaggcagtgtggccagaacgggtgggcacaaaggatgggccagcatgcctaagtcatttggtgcggcgcctgcagcatctccataaggaaggtgtcaatgggtgtgtccccgatgagcttgaagagaagagatgtcccagcatttgagcccgatg

SEQ ID NO: 443941 - DNA, 1653 bp, Homo Sapiens
  misc_feature (119)..(127): n is a, c, g, or t
  misc_feature (177)..(185): n is a, c, g, or t
aaagcaggggccccccttcttttccccttccatttcccggggggccttcccagaatggctgccaggtcccgccaaagcccctgtgccctccaaaaaaggcccagggaggtgggtgatgnnnnnnnnnttcccgagccagggcccagccttgcagggaaaccaaggacaggcctcagnnnnnnnnngcagagcaaggagaagactcaggctggggagggcccggggcactctggtctgaacggggagtcgggagtctgaaaccagaaccccaaggcagagagaaaacaggggggtaagtgacccgcccctgcagcctggaggtggccccgaaaccttgcacagagggcagctcatgttctcattggctcgagggcaaaactgtgagttatctttggaaaaaggggctaccttccccctcactcagagcacagggcagcttgcttgccccacgagtcccctctcatccccgaggcggctgaggtctttgctgatgacacaccagcttgcgcccccagctgtcccctcctgattagggggaagctgtcacgggctggctgggcaccagtattcagagcagatgaagatgtcactccagacaggagggccacacaggaattctgaaaaccagcatcgataaacagcaacggaaacaaaagccccgttcccaactcctgcagctccagggctggggcccgaagaccctgtagtcgcccaagccccgtggggtgtggcagggtgtcctgagagcccggtggggaggcgcctggctgggctcacgctagttcttgccacgaaggctgctgcctcaggaaagccactgccctgggccacagacaagtagtaacagaaataaggagggtgacaacacatctcttaggcagagcagtgacaggctgtgccccaaagtccaaacaggccaggcagagaagggcagggacagggctcaggctgagaagaacagctggcgtccaggcagggtggccagaacgggtgggcacaaaggatgggcccgcaggcctaagtcatttggtgcggcgcctccagcatctccataaggaaggtgtcaatgggtgtgtccccgatgagcttgaagaagaagagatgttccaggcatttgagcccgatggagcgcagagccggcaggcggagcaagagcttagcgaaccttcccggctgctctgggtacttgtgcttgcagtaggcctccaaggacgcatagaccttctccctcagcgcctccacctcggccgggttcgagagccccttggagtcagggttaaagaggacgatggcgcgcaggcagcccagctccgtcttgtccatctgcatgtcccgcatcttggacacaagctccgtcagcaccctgtcaaagatggcgcccacccctgcgctgtgggcgctgttccggtggacgtgcagtccggtggccaggaggatcccgtccttcacggcgatggagcggtgggagaaggaggcgatgagcagctcattccagcctgcccgcagcaggatgacctggtcgtccaggggcagctcttataagtgtgggatccgcttggcccactccaccagggtgaaaagctgtttgtcggctgcttggcaaatgttggtgacagggtcgttcgccgagctggggttcagccccatgtttgc

SEQ ID NO: 443942 - DNA, 3237 bp, Homo Sapiens
  misc_feature (1279)..(1279): n is a, c, g, or t
  misc_feature (2169)..(2169): n is a, c, g, or t
ttaactttccagatgctttagacattttctcttatctttactctctttatggatctgtcatcctctctaaagtattagctatgcgtcccagctaaggcattgctaaggattgggaacggctaaagctgtctgctccaaagcatcttaaaatagatgcatctcctgccttgagatattcattcgaacccggatttcaccaaaggagggtccttatgtacttgcttacacgaagcaaatttataggaaaacaggggaaacgtcttgattaaaaataaacacaaaacactggtaaccgctccgcctttcctgggtggcgctggtgtgcggctctctccacacgcgtctctctgtacagcacatacatgtttacaccacacacctgcgtggacgagcaccagatcacgcaccccagctccacgacagggacaccagccgactacccacaggctgcacattccggcagggccctcctgggtgccccacggggaggggctcggggtcatctccagcactgtcactaggccgccagcccttgtaattcttgggaaacaccgtgctcgtaaaaccgaaggtcagggctgtccttcccagaggccgtgtgcttccagggtgcggagggccggcggctgacacaggccccagggtggaaggtcctggcaggccagcttccaagcatgccccgacgcagcctaggggagcccggctctgtggcatcttcactcctgagcctcaggagccccatctgaacggcaaagccgggaggtgaccagctgaggagcgtgcctgaaggtgccggggtgccctgggtccccaggaagcagccactgggaagtggggccctgcggggaagccgcttcatccagccgggccaaggcggggacaggcacaggtggctaatgagctgatgttagtgctatctttagaaaattaaagattgtcccaccaaaataataataattacaaaaaatcaccttaattgaactggattggtaatactactacaggtctggttaaatagaaattctacctctctactcagtgatgagccgcactccccacacatcaccttttcaaaccaacagcactgtacaactacaaggccgaatgagaaagggacgggaaggctgcgggaagtgcccgggacacgtagagcggtgggtaaggctgctgtggccagggaggccaggttctgctttcaggggttggcggccggggggcttcagtgctttacagccagccagccagccagcccagcgccggaaacgacaaagttcccaangaagcagccggaccccccgcgcaacggaggccccgtccctgggctttttcctctggagccgcgggcattcccaagggtccgggcacggatgggtgggcgctggctgcagaaggcaccaggtgttggcgttgggtcttttgcactcccaccgctggggccccaagagtacctgcaccctcctgccatttccaccacacccgccaggggcagctggggcttcctggcagtgcctgggaggggcccagctggccggggacctggtacaggtatgaggctcaacactctgcctcaggacggtggatcgggcagggggccacctctagggatccacaacgctgaaaggcaggggtggagggcggcggggaggagaggcttctggaatctctgacagcctgtctcgggcacagactcagctgcaggctccactcgggtgcctaagctcagctctggctgggagctccaggaaggcaaagaatggacactttcttccccaccaaggctggaaagctgcctctccaagccactgcctcccggtccaacctgtaggcagctcccctcaccactgaggaagcccctgctccaggtggggaaagactatggagaaggcgtccacccccccgcatcattcctagactgcggctgggaagacaagaccccctccggtatcccccccatccaccctctgttcaggcacctgccactgacaaaggctgggtccacgggactgaggcgtgaacgggaaaagtactcaggccaaagggagggccttccagtgcaaaagaggcgagttcaacctgagagggccccgcaccaccggagcccgggggcagagcctgcgggaggagcgccaggccgcactgggctgagccagggaggccccaagccccgcnccccaccccacctttacccagagcaggcgttcagtgaggctcccaagtaagggctctgggtgaacaacgctgtcccgtggacaataccaggctgggtggtcccaccagggccctgcgtgtggcccaggcccgagggcgctgcgactccgggttctcagattccaagagtcttttagacacaactggcagccagagagaaggcctgagcaggggtcccaccaatgccccggcagagccactccaggccgcggagcatctgccccacccacgaggctcccagttcctgagcccctctctctccaggccacctgccccctctgagggaaaccaacagggccaccctctttcccctcccatccccgcgggcctcacagatggctgcaggtccgcagagccctgtgcctccagcaaggccagtgaggtggtgatgccccaccctgcccgagccagggccagccctgcaggaaacaaggacaagcctcagcccaccccgcagagcaaggagaagactcaggctggggaggggccggggcactctggtctgaacggggagtcgggagtctgaaaccagaacaccaaggcagagagaaaacaggggggtgagtgacccgcccctgcagcctggaggtggccccgaaaccttgcacagagggcagctcatgttctcattggctcgagggcaaaactgtgagttatctttggaaaaaggggctaccttccccctcactcagagcacagggcagcttgcttgccccacgagtcccctctcatccccgaggcggctgaggtctttgctgatgacacaccagcttgcgcccccagctgtcccctcctgattagggggaagctgtcacgggctggctgggcaccagtattcagagcagatgaagatgtcactccagacaggagggccacacaggaattctgaaaaccagcatcgataaacagcaacggaaacaaaagccccgttcccaactcctgcagctccagggctggggcccgaagaccctgtagtcgcccaagccccgtggggtcctcgttctggattcgccacccaggcctcgctac

SEQ ID NO: 443943 - DNA, 393 bp, Homo Sapiens
  misc_feature (366)..(366): n is a, c, g, or t
ttttttttacagtctggccacttttcacagggctgctgtggtttgctgggcatctgctctagtccctagtcgccttaggttttccagtacctgagggtatcaccagtgaaggctgcaaaactgcaaagatggcagcctgccccttcctctgggagctctgtcccagaggggtacagacctggttgctggcccaaacaaccaggtggtaggtggtggctggagacactggttgggaggtctcacccagtcaggaagagtgggatcagggatctgcttaaagaagcagtctagccacacttttataaagcagctgtgctgtgtgggtgtaccacttctgcccctagttagcttgggctctccaaagtntgtaagctacggaagttgctgagacag

SEQ ID NO: 443944 - DNA, 705 bp, Homo Sapiens
  misc_feature (35)..(35): n is a, c, g, or t
  misc_feature (42)..(42): n is a, c, g, or t
  misc_feature (94)..(94): n is a, c, g, or t
  misc_feature (178)..(178): n is a, c, g, or t
  misc_feature (592)..(592): n is a, c, g, or t
  misc_feature (612)..(612): n is a, c, g, or t
  misc_feature (614)..(614): n is a, c, g, or t
tggggataaccccaaatgccacaggccccggggtngacaacngaaagtcagtttttccaaacaaaaaacaatgtttggtagcctagaatattcnacactgggcattttccacccctgcaggcagacctatacaagtagcccaaaccttcattacaaagatacttgtaagagtacttgnaatacaaatcaaaatgacataatggcactaagctaaaaaacaggctgaaaaagaaattcccaaagagagttaacaaaactggatacctggccatctcatggctgagcaagctttgtcttcttttctatgatcctgaccaatatactcccaactctgctctgatcctctattaacatgtgaagtcagagagcggtcatgctccctcaatttccaagtgtggatgggggagcaggctgggaaactcactgtgctggcaatctacctttcagtcatttcaagattgcattaacataagtgagagtctccacccaatgttttctccagctgaaggccaatttctttggagagtcaccctggacccagagaacctggctgggtactgaaggcacagcagggccaagcctgatggtgcangactctgcagagtcactctnanagaattgcaatactttccacaggttagaacacggctcccacagaagtggttaaaaactgccagctcctctccctgaacacaagccactagt

SEQ ID NO: 443945 - DNA, 804 bp, Homo Sapiens
  misc_feature (756)..(756): n is a, c, g, or t
  misc_feature (764)..(764): n is a, c, g, or t
  misc_feature (769)..(769): n is a, c, g, or t
  misc_feature (794)..(794): n is a, c, g, or t
aaaatattatggtttaagctgatttattttaaccgtagcactactgcttttattttaggttatatatcaataatggaaaatagtggccacttttcattattaatcataagataattcattgtatttgtctttcctaataaaatggcattatattaaggcccaaaatgtttactatggcccagtaaaatatagggttgttctgtgagctatttcttaggatagaaaattattccagaaagctattagttcaaaagtctctagcagtgccaaggtttcaatagtctctttaattttgaatctatgcgattgaagataagactgcatctagtttgggggttgcatgtttgtggacattcatgtttctatgtacctggaacttcttattctcaccatcacacagaattttcaagaactagttaagcaaagaaagcaaagcccagcaggtgtcagaattgggtccccaagctgagggtcattagggtgcatgtcagtgtgccaactccaatatccacacctagagaacgcacatcttcccaaaagaaatgaagcacagatgatacttgatcctcaactttgtctccagaaattttttcaggaacttgagttctttatcaaatgctcacatcctacagagaaattaaagtgttccattttcaaggttcatgaagcttcgtcaatggctggggagcagggcacacacttgttatttttattactcaggggttcccaacagggcaactaaaactaggacagggncaaaactncactnaaaattttctggaaagtttggctgntgcccctttt

SEQ ID NO: 443946 - DNA, 691 bp, Homo Sapiens
tctctaagatttttaaatcttccttcagaggaaacagtcttttgaagtttgtccattagagcttttgtctgcttagagaccttggcccaggttttcttcagcctgtagatggcacttctgtttaaggccgaggtgatctccagcacgccgttgtagttgtgcaggcatcggcagatgtccgccactgccacccatttctcgatggcgttggcacgggagctgacatcagcatagttcattatctgggaggccaccaggttactcatgtcattgaagtgttggctggttttcaataatgtaaggagttctttcgtttttatccagcttcatccaacccctgcccaagaaactcctcgtagggaatgcttctgaaaatgacatggtccaggagggtgatctgttctgccagctccatggccgacaaggactcaaagcattcggccttcatgcagtcagtcatttgaattatatcctctaattttaggtggatgtcatcttggtcatcttgtgaaagggccctgaggatattcgcggcggctttcctttcttggggaagaaggtctgggtctcgcaaaacttcttctagcaaatttaggacattcatctttagttcattgttgagttcgaaatcctgtgcgtgctttgagacccagtgacggaggacgttcagaactcgattggtagccgttct
